(19) United States
(12) Patent Application Publication
(10) Pub. No.: US 2014/0065620 A1
(43) Pub. Date: Mar. 6, 2014

(54) NUCLEIC ACIDS FOR DETECTING BREAST CANCER

(71) Applicant: MAYO FOUNDATION FOR MEDICAL EDUCATION AND RESEARCH, Rochester, MN (US)

(72) Inventors: Edith A. Perez, Rochester, MN (US); E. Aubrey Thompson, JR., Jacksonville, FL (US); Yan Asmann, Rochester, MN (US)

(73) Assignee: MAYO FOUNDATION FOR MEDICAL EDUCATION AND RESEARCH, Rochester, MN (US)

(21) Appl. No.: 13/725,414

(22) Filed: Dec. 21, 2012

Related U.S. Application Data
(60) Provisional application No. 61/581,627, filed on Dec. 29, 2011.

(51) Int. Cl. C12Q 1/68

(52) U.S. Cl. CPC C12Q 1/6886
USPC 435/6.12; 536/23.4

(57) ABSTRACT

This document provides methods and materials involved in detecting breast cancer. For example, nucleic acids for detecting gene rearrangements (e.g., translocations) associated with breast cancer as well as methods and materials for detecting breast cancer are provided.

### CROSS-REFERENCE TO RELATED APPLICATIONS

[0001] This application claims the benefit of U.S. Provisional Application Ser. No. 61/581,627, filed Dec. 29, 2011. The disclosure of the prior application is considered part of (and is incorporated by reference in) the disclosure of this application.

### BACKGROUND

[0002] 1. Technical Field

[0003] This document relates to methods and materials involved in detecting breast cancer. For example, this document provides nucleic acids for detecting gene rearrangements (e.g., translocations) associated with breast cancer as well as methods and materials for detecting breast cancer.

[0004] 2. Background Information

[0005] Gene fusion events resulting from inversions, interstitial deletion, or translocations represent one of the most common types of genomic rearrangement. So far, the majority of fusion genes have been identified in leukemias, lymphomas, and sarcomas. Recently, the discovery of TMPRSS2-ERG fusions in prostate cancer and EML4-ALK fusion in non-small cell lung tumors suggests that gene fusion events may as well occur with a relatively high frequency in solid tumors, leading to the generation of fusion proteins with unique oncogenic properties. The BCR-ABL1 fusion gene can be used as a diagnostic marker for chronic myelogenous leukemia (CML), and is a drug target of Imatinib (Gleevec) in cells that harbor the BCR-ABL1 fusion gene. The prostate cancer specific TMPRSS2-ERG fusion events place growth regulatory genes under the influence of an androgen-regulated promoter, giving rise to an oncogene that has the potential to amplify normal androgen-dependent growth.

### SUMMARY

[0006] This document provides methods and materials involved in detecting breast cancer. For example, this document provides nucleic acids for detecting gene rearrangements (e.g., translocations) associated with breast cancer as well as methods and materials for detecting breast cancer. As described herein, a patient sample (e.g., a breast tissue sample) can be assessed for the presence or absence of one or more of the gene rearrangements set forth in Table 3, 4, 5, 6, 8, or 10. In some cases, the presence of one or more gene rearrangements set forth in Table 3, 4, 5, 6, 8, or 10 can indicate that the patient has breast cancer. Detecting a gene rearrangement set forth in Table 3, 4, 5, 6, 8, or 10 can allow clinicians and patients to diagnose breast cancer in an efficient and effective manner.

[0007] In general, one aspect of this document features a primer pair comprising, or consisting essentially of, first and second primers, wherein an amplification reaction comprising the first and second primers has the ability to amplify a nucleic acid having a fusion partner A sequence and a fusion partner B sequence, wherein the fusion partner A sequence is present in a first human gene set forth in Table 3, 4, 5, 6, 8, or 10 and the fusion partner B sequence is present in a second human gene set forth in Table 3, 4, 5, 6, 8, or 10 as being a fusion partner with the first human gene. The fusion partner A sequence can be at least 10 nucleotides. The fusion partner A sequence can be at least 50 nucleotides. The fusion partner A sequence can be at least 100 nucleotides. The fusion partner B sequence can be at least 10 nucleotides. The fusion partner B sequence can be at least 50 nucleotides. The fusion partner B sequence can be at least 100 nucleotides. The first primer can be between 13 and 100 nucleotides in length. The first primer can be between 15 and 50 nucleotides in length. The second primer can be between 13 and 100 nucleotides in length. The second primer can be between 15 and 50 nucleotides in length. The fusion partner A sequence can be present in a human LIMA1 nucleic acid, and the fusion partner B sequence can be present in a human USP22 nucleic acid. The fusion partner A sequence can be present in a human LIMA1 nucleic acid, and the fusion partner B sequence can be present in a human USP22 nucleic acid. The fusion partner A sequence can be present in a human ACACA nucleic acid, and the fusion partner B sequence can be present in a human STAC2 nucleic acid. The fusion partner A sequence can be present in a human FAM102A nucleic acid, and the fusion partner B sequence can be present in a human CIZ1 nucleic acid. The fusion partner A sequence can be present in a human GLB1 nucleic acid, and the fusion partner B sequence can be present in a human CMTM7 nucleic acid. The fusion partner A sequence can be present in a human MED1 nucleic acid, and the fusion partner B sequence can be present in a human STXBP4 nucleic acid. The fusion partner A sequence can be present in a human PIP4K2B nucleic acid, and the fusion partner B sequence can be present in a human RAD51C nucleic acid. The fusion partner A sequence can be present in a human RAB22A nucleic acid, and the fusion partner B sequence can be present in a human MYO9B nucleic acid. The fusion partner A sequence can be present in a human RPS6KB 1 nucleic acid, and the fusion partner B sequence can be present in a human SNF8 nucleic acid. The fusion partner A sequence can be present in a human STARD3 nucleic acid, and the fusion partner B sequence can be present in a human DOK5 nucleic acid. The fusion partner A sequence can be present in a human TRPC4AP nucleic acid, and the fusion partner B sequence can be present in a human MRPL45 nucleic acid. The fusion partner A sequence can be present in a human ZMYND8 nucleic acid, and the fusion partner B sequence can be present in a human CEP250 nucleic acid. The fusion partner A sequence can be present in a human CTAGE5 nucleic acid, and the fusion partner B sequence can be present in a human SIP1 nucleic acid. The fusion partner A sequence can be present in a human MLL5 nucleic acid, and the fusion partner B sequence can be present in a human LHFPL3 nucleic acid. The fusion partner A sequence can be present in a human SEC22B nucleic acid, and the fusion partner B sequence can be present in a human NOTCH2 nucleic acid. The fusion partner A sequence can be present in a human EIF3K nucleic acid, and the fusion partner B sequence can be present in a human CYP39A1 nucleic acid. The fusion partner A sequence can be present in a human RAB7A nucleic acid, and the fusion partner B sequence can be present in a human LRCH3 nucleic acid. The fusion partner A sequence can be present in a human RNF187 nucleic acid, and the fusion partner B sequence can be present in a human OBSCN nucleic acid. The fusion partner A sequence can be present in a human SLC37A1 nucleic acid, and the fusion partner B sequence can be present in a human ABCG1 nucleic acid. The fusion partner A sequence can be present in a human EXOC7 nucleic acid, and the fusion partner B sequence can be present in a human CYTH1 nucleic acid. The fusion partner A sequence can be present in a human BRE nucleic acid, and the fusion partner B sequence can be present in a human DPYSL5 nucleic acid. The fusion partner A sequence can be present in a human CD151 nucleic acid, and the fusion partner B sequence can be present in a human DRD4 nucleic acid. The fusion partner A sequence can be present in a human LDLRAD3 nucleic acid, and the fusion partner B sequence can be present in a human TCP11L1 nucleic acid. The fusion partner A sequence can be present in a human RFT1 nucleic acid, and the fusion partner B sequence can be present in a human UQCRC2 nucleic acid. The fusion partner A sequence can be present in a human GSDMC nucleic acid, and the fusion partner B sequence can be present in a human PVT1 nucleic acid. The fusion partner A sequence can be present in a human INTS1 nucleic acid, and the fusion partner B sequence can be present in a human PRKAR1B nucleic acid. The fusion partner A sequence can be present in a human POLDIP2 nucleic acid, and the fusion partner B sequence can be present in a human BRIP1 nucleic acid. The fusion partner A sequence can be present in a human MYH9 nucleic acid, and the fusion partner B sequence can be present in a human EIF3D nucleic acid. The fusion partner A sequence can be present in a human BRIP1 nucleic acid, and the fusion partner B sequence can be present in a human TMEM49 nucleic acid. The fusion partner A sequence can be present in a human SUPT4H1 nucleic acid, and the fusion partner B sequence can be present in a human CCDC46 nucleic acid. The fusion partner A sequence can be present in a human TMEM104 nucleic acid, and the fusion partner B sequence can be present in a human CDK12 nucleic acid. The fusion partner A sequence can be present in a human RIMS2 nucleic acid, and the fusion partner B sequence can be present in a human ATP6V1C1 nucleic acid. The fusion partner A sequence can be present in a human TIAL1 nucleic acid, and the fusion partner B sequence can be present in a human C10orf119 nucleic acid. The fusion partner A sequence can be present in a human MECP2 nucleic acid, and the fusion partner B sequence can be present in a human TMLHE nucleic acid. The fusion partner A sequence can be present in a human ARID1A nucleic acid, and the fusion partner B sequence can be present in a human MAST2 nucleic acid. The fusion partner A sequence can be present in a human UBR5 nucleic acid, and the fusion partner B sequence can be present in a human SLC25A32 nucleic acid. The fusion partner A sequence can be present in a human KLHDC2 nucleic acid, and the fusion partner B sequence can be present in a human SNTB1 nucleic acid. The fusion partner A sequence can be present in a human ARID1A nucleic acid, and the fusion partner B sequence can be present in a human WDTC1 nucleic acid. The fusion partner A sequence can be present in a human HDGF nucleic acid, and the fusion partner B sequence can be present in a human S100A10 nucleic acid. The fusion partner A sequence can be present in a human PPP1R12B nucleic acid, and the fusion partner B sequence can be present in a human SNX27 nucleic acid. The fusion partner A sequence can be present in a human SRGAP2 nucleic acid, and the fusion partner B sequence can be present in a human PRPF3 nucleic acid. The fusion partner A sequence can be present in a human WIPF2 nucleic acid, and the fusion partner B sequence can be present in a human ERBB2 nucleic acid.

[0008] In another aspect, this document features an isolated nucleic acid comprising, or consisting essentially of, a fusion partner A sequence and a fusion partner B sequence, wherein the fusion partner A sequence is present in a first human gene set forth in Table 3, 4, 5, 6, 8, or 10 and the fusion partner B sequence is present in a second human gene set forth in Table 3, 4, 5, 6, 8, or 10 as being a fusion partner with the first human gene. The fusion partner A sequence can be at least 10 nucleotides. The fusion partner A sequence can be at least 50 nucleotides. The fusion partner A sequence can be at least 100 nucleotides. The fusion partner B sequence can be at least 10 nucleotides. The fusion partner B sequence can be at least 50 nucleotides. The fusion partner B sequence can be at least 100 nucleotides. The fusion partner A sequence can be present in a human LIMA1 nucleic acid, and the fusion partner B sequence can be present in a human USP22 nucleic acid. The fusion partner A sequence can be present in a human LIMA1 nucleic acid, and the fusion partner B sequence can be present in a human USP22 nucleic acid. The fusion partner A sequence can be present in a human ACACA nucleic acid, and the fusion partner B sequence can be present in a human STAC2 nucleic acid. The fusion partner A sequence can be present in a human FAM102A nucleic acid, and the fusion partner B sequence can be present in a human CIZ1 nucleic acid. The fusion partner A sequence can be present in a human GLB1 nucleic acid, and the fusion partner B sequence can be present in a human CMTM7 nucleic acid. The fusion partner A sequence can be present in a human MED1 nucleic acid, and the fusion partner B sequence can be present in a human STXBP4 nucleic acid. The fusion partner A sequence can be present in a human PIP4K2B nucleic acid, and the fusion partner B sequence can be present in a human RAD51C nucleic acid. The fusion partner A sequence can be present in a human RAB22A nucleic acid, and the fusion partner B sequence can be present in a human MYO9B nucleic acid. The fusion partner A sequence can be present in a human RPS6KB1 nucleic acid, and the fusion partner B sequence can be present in a human SNF8 nucleic acid. The fusion partner A sequence can be present in a human STARD3 nucleic acid, and the fusion partner B sequence can be present in a human DOK5 nucleic acid. The fusion partner A sequence can be present in a human TRPC4AP nucleic acid, and the fusion partner B sequence can be present in a human MRPL45 nucleic acid. The fusion partner A sequence can be present in a human ZMYND8 nucleic acid, and the fusion partner B sequence can be present in a human CEP250 nucleic acid. The fusion partner A sequence can be present in a human CTAGE5 nucleic acid, and the fusion partner B sequence can be present in a human SIP1 nucleic acid. The fusion partner A sequence can be present in a human MLL5 nucleic acid, and the fusion partner B sequence can be present in a human LHFPL3 nucleic acid. The fusion partner A sequence can be present in a human SEC22B nucleic acid, and the fusion partner B sequence can be present in a human NOTCH2 nucleic acid. The fusion partner A sequence can be present in a human EIF3K nucleic acid, and the fusion partner B sequence can be present in a human CYP39A1 nucleic acid. The fusion partner A sequence can be present in a human RAB7A nucleic acid, and the fusion partner B sequence can be present in a human LRCH3 nucleic acid. The fusion partner A sequence can be present in a human RNF187 nucleic acid, and the fusion partner B sequence can be present in a human OBSCN nucleic acid. The fusion partner A sequence can be present in a human SLC37A1 nucleic acid, and the fusion partner B sequence can be present in a human ABCG1 nucleic acid. The fusion partner A sequence can be present in a human EXOC7 nucleic acid, and the fusion partner B sequence can be present in a human CYTH1 nucleic acid. The fusion partner A sequence can be present in a human BRE nucleic acid, and the fusion partner B sequence can be present in a human DPYSL5 nucleic acid. The fusion partner A sequence can be present in a human CD151 nucleic acid, and the fusion partner B sequence can be present in a human DRD4 nucleic acid. The fusion partner A sequence can be present in a human LDLRAD3 nucleic acid, and the fusion partner B sequence can be present in a human TCP11L1 nucleic acid. The fusion partner A sequence can be present in a human RFT1 nucleic acid, and the fusion partner B sequence can be present in a human UQCRC2 nucleic acid. The fusion partner A sequence can be present in a human GSDMC nucleic acid, and the fusion partner B sequence can be present in a human PVT1 nucleic acid. The fusion partner A sequence can be present in a human INTS1 nucleic acid, and the fusion partner B sequence can be present in a human PRKAR1B nucleic acid. The fusion partner A sequence can be present in a human POLDIP2 nucleic acid, and the fusion partner B sequence can be present in a human BRIP1 nucleic acid. The fusion partner A sequence can be present in a human MYH9 nucleic acid, and the fusion partner B sequence can be present in a human EIF3D nucleic acid. The fusion partner A sequence can be present in a human BRIP1 nucleic acid, and the fusion partner B sequence can be present in a human TMEM49 nucleic acid. The fusion partner A sequence can be present in a human SUPT4H1 nucleic acid, and the fusion partner B sequence can be present in a human CCDC46 nucleic acid. The fusion partner A sequence can be present in a human TMEM104 nucleic acid, and the fusion partner B sequence can be present in a human CDK12 nucleic acid. The fusion partner A sequence can be present in a human RIMS2 nucleic acid, and the fusion partner B sequence can be present in a human ATP6V1C1 nucleic acid. The fusion partner A sequence can be present in a human TIAL1 nucleic acid, and the fusion partner B sequence can be present in a human C10orf119 nucleic acid. The fusion partner A sequence can be present in a human MECP2 nucleic acid, and the fusion partner B sequence can be present in a human TMLHE nucleic acid. The fusion partner A sequence can be present in a human ARID1A nucleic acid, and the fusion partner B sequence can be present in a human MAST2 nucleic acid. The fusion partner A sequence can be present in a human UBR5 nucleic acid, and the fusion partner B sequence can be present in a human SLC25A32 nucleic acid. The fusion partner A sequence can be present in a human KLHDC2 nucleic acid, and the fusion partner B sequence can be present in a human SNTB1 nucleic acid. The fusion partner A sequence can be present in a human ARID1A nucleic acid, and the fusion partner B sequence can be present in a human WDTC1 nucleic acid. The fusion partner A sequence can be present in a human HDGF nucleic acid, and the fusion partner B sequence can be present in a human S100A10 nucleic acid. The fusion partner A sequence can be present in a human PPP1R12B nucleic acid, and the fusion partner B sequence can be present in a human SNX27 nucleic acid. The fusion partner A sequence can be present in a human SRGAP2 nucleic acid, and the fusion partner B sequence can be present in a human PRPF3 nucleic acid. The fusion partner A sequence can be present in a human WIPF2 nucleic acid, and the fusion partner B sequence can be present in a human ERBB2 nucleic acid.

[0009] Unless otherwise defined, all technical and scientific terms used herein have the same meaning as commonly understood by one of ordinary skill in the art to which this invention pertains. Although methods and materials similar or equivalent to those described herein can be used to practice the invention, suitable methods and materials are described below. All publications, patent applications, patents, and other references mentioned herein are incorporated by reference in their entirety. In case of conflict, the present specification, including definitions, will control. In addition, the materials, methods, and examples are illustrative only and not intended to be limiting.

[0010] The details of one or more embodiments of the invention are set forth in the accompanying drawings and the description below. Other features, objects, and advantages of the invention will be apparent from the description and drawings, and from the claims.

### DESCRIPTION OF DRAWINGS

[0011] FIG. 1 is a flow chart of the work flow of the fusion detection algorithm implemented in SnowShoes-FTD.

[0012] FIG. 2 contains photographs of PCR validation of candidate fusion products. The PCR primers were designed using the template sequences generated by SnowShoes-FTD. The double stranded cDNA libraries were constructed using total RNAs from each of the cell lines. The primer sequences and the expected PCR product sizes for each of the fusion candidates were detailed in Table 5. (a) The PCR products from 50 fusion candidates with unique isoforms. The fusion candidates were grouped by the cell lines in which the fusion candidates were discovered. (b) The PCR products from 5 fusion candidates with two fusion isoforms each. Note that there are multiple PCR bands in the lanes for CDK12-TMEM104, and the lowest bands were those from the fusion product.

[0013] FIG. 3 contains schematics of in-frame fusion transcripts and their predicted protein sequences. (a) Starting from the fusion junction spanning reads that aligned to both fusion partner genes, the two junction boundary exons from fusion partner genes A and B were identified. (b) Obtaining the IDs and sequences of all exons belonging to the two fusion partner genes A and B based on the curated refFlat file. In this example, Gene A has 7 exons with the 3^{rd} exon as the fusion boundary exon, and gene B has 10 exons with the 6^{th} exon as the fusion boundary exon. (c) Obtaining all known transcripts for the two fusion partner genes. Gene A has two known transcripts (A1 and A2) both of which contain the fusion boundary exon. Gene B has 4 known transcripts (B 1→B4) and three of which (B1, B3, and B4) contain the fusion boundary exon. (d) Generating the list of exhaustive fusion transcripts using the known transcripts containing the fusion boundary exons. There are 6 possible fusion transcripts: A 1-B1, A 1-B3, A 1-B4, A2-B1, A2-B3, and A2-B4. Note that because the differences between the transcripts B1 and B4 are “fused out”, the fusion transcript of A1-B1 is identical to that of A1-B4. Similarly, A2-B1 is identical to A2-B4. The fusion transcripts that cause frame shift in gene B are defined as “out of frame”, and the ones that did not cause any frame shift are defined as “in frame” fusions. Each of the in frame fusions are translated into amino acid sequences of the fusion proteins.

[0014] FIG. 4 contains a detailed description of ARID1A_MAST2 (a) and WIPF2_ERBB2 (b) fusion transcripts. Using the process described in FIG. 3, SnowShoes-FTD uses the RNA sequence of all known transcripts of the fusion partners to predict the sequence of all potential in frame and out of frame fusion transcripts. Abundance of individual exons for each of the fusion partners, normalized to total exon abundance, was extracted from the mRNA-Seq data.

[0015] FIG. 5 is a photograph of RT-PCR results performed using the PCR primers provided by Maher et al. (Proc. Natl. Acad. Sci. USA, 106(30):12353-8 (2009)) for five indicated fusion transcripts. The PCR validated four of the fusion products (lanes 2-5). However, the fusion product was not observed for ARGAP19_DRG1 (lane 6). The first lane is the 50-pb ladder.

[0016] FIG. 6. Multiple fusion transcripts are expressed in breast tumors of different subtypes. Subtype specific fusion transcripts are identified with oval symbols. All fusion transcripts are given according to orientation 5 fusion partner->3′ fusion partner. Transcripts are further identified according to sentinel status in each tumor subtype (S), redundancy in each subtype (R), and fusion transcript isoforms detection in each subtype (I). Fusion products are identified as follows: 3′UTR=fusion that changes 3′UTR of 5′ fusion partner; 5′UTR=fusion in 5′UTR of 5′ fusion partner; CIF=coding in frame fusion to produce a chimaeric protein; CTT=C-terminal truncation of 5′ fusion partner resulting from frame shift.

[0017] FIG. 7. Chromosomal distribution of fusion transcripts and fusion partner genes is non-random. Connection between the chromosomal loci of fusion transcripts in shown in Panel A for all sentinel fusions as well as for tumor subtype specific fusion transcripts. The chromosomal ‘heat map’ (Panel B) shows the top four (red) and bottom four (green) chromosomes, identified by the genomic coordinates of fusion partner genes.

[0018] FIG. 8. Chromosomal mapping of fusion partner genes reveals tumor sup type specific clusters. Chromosomal mapping was carried out using PheGen (NCBI) to assign chromosomal coordinates of all fusion gene partners. Clusters that are uniquely associated with HER2+ tumors are designated by an arrow with a single asterisk (Chr1q21.22-21.3), whereas an arrow with two asterisks designates a large ER+ cluster at chr11q13.1-q13.3, and an arrow with three asterisks identifies TN clusters at chr8q24.3, chr12q13.13, and chr17q25.1-25.3.

[0019] FIG. 9 is a listing of predicted chimeric protein products of fusion transcripts. Amino acids pertaining to 5′ fusion partners are highlighted with a single underline. Amino acids pertaining to 3′ fusion partners fused in frame are highlighted with a double underline. Amino acids that are inserted at fusions junctions are highlighted with a wavy underline.

[0020] FIG. 10 is a listing of the predicted amino acid sequence of the ARID1A->MAST2 fusion protein (SEQ ID NO:1530). This chimeric protein arises from a fusion transcript in which exon 1 of ARID1A (with start codon) is spliced in frame to exon 2 of MAST2. Underlined amino acids are derived from exon 1 of ARID1A, whereas the other amino acids are derived from MAST2.

[0021] FIG. 11 is a photograph demonstrating shRNA knockdown of the ARID1A->MAST2 fusion transcript.

[0022] FIG. 12 is a graph demonstrating that knockdown of the ARID1A->MAST2 fusion transcript by shRNA inhibits growth of MDA-MB-468 cultures.

### DETAILED DESCRIPTION

[0023] This document provides methods and materials involved in assessing gene rearrangements (e.g., translocations). For example, this document provides methods and materials for determining whether or not a sample (e.g., breast tissue sample) from a mammal (e.g., a human) contains a gene rearrangement set forth in Table 3, 4, 5, 6, 8, or 10. In some cases, the methods and materials provided herein can be used to detect the presence of a gene rearrangement set forth in Table 3, 4, 5, 6, 8, or 10 within a breast tissue sample, thereby indicating that the breast tissue is likely to be cancerous. Detecting a gene rearrangement set forth in Table 3, 4, 5, 6, 8, or 10 can be used to diagnose breast cancer in a mammal, typically when known clinical symptoms of or known risk factors for breast cancer also are present.

[0024] The term “nucleic acid” as used herein can be RNA or DNA, including cDNA, genomic DNA, and synthetic (e.g. chemically synthesized) DNA. The nucleic acid can be double-stranded or single-stranded. Where single-stranded, the nucleic acid can be the sense strand or the antisense strand. In addition, nucleic acid can be circular or linear.

[0025] The term “isolated” as used herein with reference to nucleic acid refers to a naturally-occurring nucleic acid that is not immediately contiguous with both of the sequences with which it is immediately contiguous (one on the 5′ end and one on the 3′ end) in the naturally-occurring genome of the organism or cell from which it is derived. For example, an isolated nucleic acid can be, without limitation, a recombinant DNA molecule of any length, provided one of the nucleic acid sequences normally found immediately flanking that recombinant DNA molecule in a naturally-occurring genome is removed or absent. Thus, an isolated nucleic acid includes, without limitation, a recombinant DNA that exists as a separate molecule (e.g., a cDNA or a genomic DNA fragment produced by PCR or restriction endonuclease treatment) independent of other sequences as well as recombinant DNA that is incorporated into a vector, an autonomously replicating plasmid, a virus (e.g., a retrovirus, adenovirus, or herpes virus), or into the genomic DNA of a prokaryote or eukaryote. In addition, an isolated nucleic acid can include a recombinant DNA molecule that is part of a hybrid or fusion nucleic acid sequence.

[0026] The term “isolated” as used herein with reference to nucleic acid also includes any non-naturally-occurring nucleic acid since non-naturally-occurring nucleic acid sequences are not found in nature and do not have immediately contiguous sequences in a naturally-occurring genome. For example, non-naturally-occurring nucleic acid such as an engineered nucleic acid is considered to be isolated nucleic acid. Engineered nucleic acid can be made using common molecular cloning or chemical nucleic acid synthesis techniques. Isolated non-naturally-occurring nucleic acid can be independent of other sequences, or incorporated into a vector, an autonomously replicating plasmid, a virus (e.g., a retrovirus, adenovirus, or herpes virus), or the genomic DNA of a prokaryote or eukaryote. In addition, a non-naturally-occurring nucleic acid can include a nucleic acid molecule that is part of a hybrid or fusion nucleic acid sequence.

[0027] It will be apparent to those of skill in the art that a nucleic acid existing among hundreds to millions of other nucleic acid molecules within, for example, cDNA or genomic libraries, or gel slices containing a genomic DNA restriction digest is not to be considered an isolated nucleic acid.

[0028] In one embodiment, this document provides a primer pair having the ability to amplify a nucleic acid that includes (a) a first nucleic acid sequence from one gene listed in a gene rearrangement set forth in Table 3, 4, 5, 6, 8, or 10 (e.g., a fusion partner A sequence) and (b) a second nucleic acid sequence from another gene that is listed in Table 3, 4, 5, 6, 8, or 10 as being in combination with that one gene (e.g., a fusion partner B sequence). For example, this document provides primer pairs that have the ability to amplify a nucleic acid that includes a LIMA1 nucleic acid sequence (e.g., a fusion partner A sequence) and a USP22 nucleic acid sequence (e.g., a fusion partner B sequence). The primers of the primer pair can be any appropriate length including, without limitation, lengths ranging from about 10 nucleotides to about 100 nucleotides (e.g., from about 15 nucleotides to about 100 nucleotides, from about 20 nucleotides to about 100 nucleotides, from about 15 nucleotides to about 75 nucleotides, from about 15 nucleotides to about 50 nucleotides, from about 15 nucleotides to about 25 nucleotides, from about 13 nucleotides to about 50 nucleotides, or from about 17 nucleotides to about 50 nucleotides).

[0029] The primers can be designed to amplify any appropriate length of the fusion partner A sequence and the fusion partner B sequence. For example, the fusion partner A sequence of an amplified nucleic acid can be about 5 to about 2500 nucleotides in length (e.g., about 10 to about 2500 nucleotides in length, about 15 to about 2500 nucleotides in length, about 20 to about 2500 nucleotides in length, about 25 to about 2500 nucleotides in length, about 20 to about 1000 nucleotides in length, about 20 to about 500 nucleotides in length, or about 50 to about 100 nucleotides in length), and the fusion partner B sequence of that amplified nucleic acid can be about 5 to about 2500 nucleotides in length (e.g., about 10 to about 2500 nucleotides in length, about 15 to about 2500 nucleotides in length, about 20 to about 2500 nucleotides in length, about 25 to about 2500 nucleotides in length, about 20 to about 1000 nucleotides in length, about 20 to about 500 nucleotides in length, or about 50 to about 100 nucleotides in length). In some cases, the combined length of the fusion partner A and fusion partner B sequences that are amplified can be between about 50 and about 5000 nucleotides (e.g., between about 75 and about 5000 nucleotides, between about 100 and about 5000 nucleotides, between about 250 and about 5000 nucleotides, between about 500 and about 5000 nucleotides, between about 50 and about 2500 nucleotides, between about 500 and about 2500 nucleotides, or between about 50 and about 1000 nucleotides). In some cases, the primer pairs provided herein have the ability to amplify a junction region of a gene rearrangement that involves a two gene fusion set forth in Table 3, 4, 5, 6, 8, or 10. For example, a primer pair provided herein can amplify a junction region between a RAB7A nucleic acid sequence and a LRCH3 nucleic acid sequence.

[0030] Examples of particular primer pairs for amplifying a gene rearrangement provided herein include, without limitation, those primer pairs set forth in Table 5.

[0031] This document also provides isolated nucleic acid molecules having (a) a first nucleic acid sequence from one gene listed in a gene rearrangement set forth in Table 3, 4, 5, 6, 8, or 10 (e.g., a fusion partner A sequence) and (b) a second nucleic acid sequence from another gene that is listed in Table 3, 4, 5, 6, 8, or 10 as being in combination with that one gene (e.g., a fusion partner B sequence). For example, this document provides isolated nucleic acid molecules that include a LIMA1 nucleic acid sequence (e.g., a fusion partner A sequence) and a USP22 nucleic acid sequence (e.g., a fusion partner B sequence). Other examples of isolated nucleic acid molecules provided herein include, without limitation, those having a sequence set forth in the “Fusion Transcript Coding Sequence” column of Table 6 as well as those having a sequence that encodes an amino acid sequence set forth in the “Fusion Protein Sequence” column of Table 6. The isolated nucleic acid molecules provided herein can be any appropriate length including, without limitation, lengths ranging from about 50 and about 5000 nucleotides (e.g., between about 75 and about 5000 nucleotides, between about 100 and about 5000 nucleotides, between about 250 and about 5000 nucleotides, between about 500 and about 5000 nucleotides, between about 50 and about 2500 nucleotides, between about 500 and about 2500 nucleotides, or between about 50 and about 1000 nucleotides).

[0032] As described herein, the primer pairs and isolated nucleic acid molecules provided herein can be used to determine whether or not a patient has breast cancer. For example, a patient sample (e.g., a breast tissue sample) can be assessed for the presence or absence of one or more of the gene rearrangements set forth in Table 3, 4, 5, 6, 8, or 10 using a primer pair provided herein or an isolated nucleic acid that was amplified using an amplification reaction. In some cases, the presence of one or more gene rearrangements set forth in Table 3, 4, 5, 6, 8, or 10 can indicate that the patient has breast cancer.

[0033] This document also provides methods for detecting the presence of breast cancer. Such methods can include detecting the presence of one or more gene rearrangements set forth in Table 3, 4, 5, 6, 8, or 10. Any appropriate method can be used to detect a gene rearrangement set forth in Table 3, 4, 5, 6, 8, or 10. For example, the nucleic acid amplification techniques described herein can be used to detect a gene rearrangement set forth in Table 3, 4, 5, 6, 8, or 10.

[0034] The invention will be further described in the following examples, which do not limit the scope of the invention described in the claims.

### EXAMPLES

### Example 1

### Identification and Characterization of Fusion Transcripts in Breast Cancer and Normal Cell Lines

### Breast Cell Lines

[0035] Twenty-two breast cancer cell lines and one non-tumorigenic breast epithelial cell line (MCF10A) were obtained from the American Type Culture Collection (ATCC) (Table 1). All cell lines were thawed and expanded to allow for isolation of total RNA from low passage cells, which should exhibit minimal deviation from the ATCC type reference cells. Eight primary human mammary epithelial cell (HMEC) cultures were established from biopsies of Mayo Clinic patients undergoing evaluation of suspected breast lesions (Table 1). All of the biopsy samples from which the cell lines were derived were assessed as benign.

### RNA Preparation and Sequencing

[0036] Total RNA extraction was performed using Exiqon's miRCURY RNA Isolation Kit. One microgram of total RNA was used for the sequencing library preparation, which was modified from conventional Illumina mRNA-Seq protocols to facilitate paired end RNA sequence analysis (Sun et al., PLoS ONE, 6(2):e17490 (2011)). The cDNA fragments were amplified by PCR and sequenced at both ends for 50 bases (50-base pair-end sequencing) using the Illumina Genome Analyzer IIx. Sequencing was carried out at the Illumina assay development facility at Hayward, Calif. and at the Mayo Clinic Advanced Genomic Technology Center at Rochester, Minn. The FASTQ read files for each sample were used for further analysis.

### Construction of Exhaustive One-Directional Exon Junction Database

[0037] The exon-exon boundary database was generated using the exon and gene definition files downloaded from UCSC Table Browser (table: refFlat; track: RefSeq Genes; group: Genes and Gene Prediction Tracks) in reference to human genome build 36 (hg18). Among 35,983 total transcripts in the refFlat file, 765 transcripts with alternative haplotypes and 1,482 transcripts with multiple/redundant genomic locations were removed. Based on the exon boundaries of all transcripts defined in the curated refFlat file, all possible one-directional combinations of exon-exon boundary sequences for the sequencing length of 50 bases were generated to ensure that no reads will map to more than one junction using a developed algorithm. The curated refFlat file and its future updated versions in reference to both Genome Build 36 and 37, as well as the FASTA files of exon-exon boundary sequences for different sequencing lengths (50-, 75-, and 100-base) can be downloaded from the following website: http://mayoresearch.mayo.edu/mayo/research/biostat/stand-alone-packages.cfm.

### Analytic Workflow for Fusion Detection

[0038] With reference to FIG. 1, the SnowShoes-FTD tool consisted of (i) read alignments to both reference genome and exon junction database; (ii) annotation of aligned read pairs to identify potential fusion candidates; (iii) filtering of false positive candidates; (iv) generation of a continuous sequence region spanning fusion junction points for PCR primer design for experimental validation; (v) prediction of fusion mechanism; and (vi) prediction of the in-frame vs. out of frame fusion products and generation of the predicted protein sequences of the in-frame fusion products based on known transcripts of the two partner genes. In addition, the tool filtered out reads mapped with poor quality as described above.

### Read Alignment and Filtering for Fusion Detection

[0039] The two ends of RNA-Seq reads were aligned to both the Human Reference Genome Build 36 (hg18) and exon junctions using BWA (Li and Durbin, Bioinformatics, 25(14):1754-60 (2009)) with a seed length of 32 allowing 4% of maximum edit distance. The BWA aligned reads were stored in the Sequence Alignment/Map (SAM) format (Li et al., Bioinformatics, 25(16):2078-9 (2009)). The pairs of SAM files from the alignment of two ends of the same sample were sorted according to read IDs using SAMtools (Li et al., Bioinformatics, 25(16):2078-9 (2009)). The reads with neither end mapped to genome or exon junctions are not informative and were filtered out. If the Phred-scaled Mapping Quality Score (MAPQ) of either end was less than 20, the end pair was considered low quality and was excluded from further analysis. Note that this also filtered out read pairs with either or both ends mapped to multiple locations since BWA assigns a MAPQ of zero to such reads.

### Annotation of Aligned Reads

[0040] After filtering, the reads remaining in the SAM files were categorized into 5 groups: (1) reads with both ends mapped to genome locations; (2) reads with both ends mapped to exon junctions; (3) reads with one end mapped to the genome and the other mapped to exons; (4) reads with one end mapped to the genome and the other end not mapped; and (5) reads with one end mapped to exon junctions and the other not mapped. All mapped ends were annotated using the genes and exons defined in the curated refFlat file. For a read to be annotated as being mapped to a gene, it was required that either the start or the end of the read be mapped within the boundaries of an exon of that gene. If a read aligned to both genome and an exon junction, the annotation from the exon junction alignment took precedence.

### False Positive Filtering

[0041] There were two steps of filtering to minimize the false fusion rate that could plague nomination of fusion gene candidates. The first filtering step was performed on the reads pairs that were annotated to two different genes, also known as fusion encompassing reads. This began with the filtering of fusion candidates with significant sequence similarities between the two fusion partners.

[0042] In addition, a gene distance filter was implemented to exclude fusions formed by two genes that were within M kb of each other on the reference genome, in order to eliminate chimeric transcripts that might arise from overlapping genes or transcriptional read through of adjacent genes. Furthermore, the fusion candidates with less than N fusion encompassing reads were filtered out. The second filtering step focused on the fusion candidates with supporting evidences of both fusion encompassing read pairs and fusion junction spanning reads. The mapping orientations of the end pairs were compared to the orientations of the two fusion partner genes on the genome, and the fusion candidates with inconsistent mapping orientations between end pairs were filtered out. Also, the algorithm required at least X unique fusion junction spanning reads and no more than Y fusion junction points per fusion candidate. These thresholds (M, N, X, and Y) were user defined.

### Prediction of the Fusion Mechanism

[0043] If a fusion product was formed by two partner genes from two different chromosomes, a translocation was listed as the mechanism of fusion. The translocation event can be accompanied by inversion of the two partner genes that have the opposite strand orientations. When the two partner genes were located on the same chromosome, the mechanism of the fusion could be translocation alone, inversion alone, and inversion and translocation concurrently. These three scenarios were determined based on the strand orientations and the relative chromosomal positions of the two partners. However, when an intra-chromosomal fusion arose without altering the relative orders of the two partners with the same strand orientation, the fusion can be the consequence of a translocation or an interstitial deletion.

### Prediction of the Fusion Protein Product

[0044] Prediction of the fusion protein sequences was carried out using all of the known transcripts of the two fusion partner genes as defined in the refFlat file. As shown in FIG. 3, the two exons from each of the two fusion partner genes that aligned to the fusion spanning reads (fusion boundary exons) were first identified. Next, among all know transcripts of the two fusion partner genes, the transcripts containing the boundary exons were identified, and a list of putative fusion transcripts was generated. Each of the putative fusion transcripts was then translated into predicted amino acid sequence, and each of the putative fusion proteins was characterized as whether it's in frame. In addition, the fusion products were categorized as: (1) coding region to coding region fusion which results in in-frame fusion product, a frame-shift for the 3′ gene, or an in-frame fusion with a single amino acid mutation at the fusion junction point. The single amino acid mutation was listed in the SnowShoes-FTD output; (2) 5′ UTR to coding region fusion in which the promoter of the 5′ gene fused in front of a coding region of the 3′ gene; (3) 5′ UTR to 3′ UTR fusion in which coding regions from both partner genes were fused out; (4) 3′ UTR to 3′ UTR fusion in which the 5′ gene was intact but the coding region of the 3′ gene was fused out; (5) 5′ UTR to 5′ UTR fusion in which the promoter of the 5′ gene potentially drives the expression of 3′ gene as the consequence of the fusion; (6) 3′ UTR to 5′ UTR or coding region fusion in which the stop codon of the 5′ gene terminates the translation of any coding regions of the 3′ gene; (7) coding region to 5′ UTR fusion in which the sequence between the coding region of the 5′ gene and the start codon of the 3′ gene may result in an insertion of single or multiple amino acids that are listed in the output file; (8) the coding region to 3′ UTR fusion which may result in the shortening of the 5′ gene with or without the addition of foreign amino acids.

### Nucleotide Sequences Spanning Fusion Junction Points for PCR Primer Design

[0045] The chromosomal orientations of the two fusion partners, the mapping orientations of the two ends from fusion encompassing read pairs, as well as the sequence and orientation of the fusion junction spanning read(s) were used to report a template region for PCR primer design in order to quickly validate the fusion candidates with RT-PCR. From 5′ to 3′, the template region consisted of the exon region from partner A from the start of the exon to the fusion junction point, a “∥” sign that signified the fusion junction point, and the exon region from partner B from the start of the fusion junction point to the end of the exon. Since the orientation of the primer template region did not necessarily define directionality (5′ to 3′) of the fusion transcript, it was necessary to use double stranded cDNAs as the template for PCR validation.

### PCR and Sanger Sequencing Validations of Fusion Candidates

[0046] Double stranded cDNA were synthesized using the total RNAs from each of the 31 cell lines. To minimize potential artifacts that might arise during library construction, different cDNA libraries were constructed and used for sequencing and for PCR validation. PCR primers were designed using the template regions recommended by SnowShoes-FTD. The 5′ and 3′ primers were complementary to the template regions that represent the two fusion partners, respectively. The fusion transcript was considered validated if a PCR product of the predicted size was detected. The PCR bands from randomly selected fusion transcripts were sequenced using Sanger sequencing to further confirm the nucleotide sequence of the predicted fusion junctions.

### Quantification of Gene and Exon Expression Levels

[0047] The gene expression levels were calculated as the sum of the individual exon read counts and exon junction read counts. The expression levels of genes and exons were normalized using the total aligned reads from the sample and the length of the exon or gene (Reads per kilo-bases per million, RPKM).

### Results

### Flexibility of the Choice of Sequence Alignment Tools

[0048] There are several sequencing platforms and multiple sequence alignment algorithms designed for Next Generation sequencing of transcriptome. The SnowShoes-FTD worked with raw or post-alignment files of different platforms. When FASTQ files obtained from Illumina Genome Analyzer or HiSeq sequencers were provided as input, SnowShoes-FTD was designed such that the user can choose BWA or Bowtie (Langmead et al., Genome Biol, 10(3):R25 (2009)) for alignment. SnowShoes-FTD also was designed to accept post-alignment files (BAM) for both genome and exon junction alignments from different sequencing platforms including Life Technologies' SOLiD sequencer. Since the exon junction database generated by SnowShoes-FTD was preferred over other publically available junction databases, the user needed to align the reads to the exon junctions provided by SnowShoes-FTD if BAM files were provided as input files. The results reported herein were obtained using FASTQ as input files and BWA as the aligner.

### User-Defined Parameters for SnowShoes-FTD

[0049] The following parameters were user-defined for detection of fusion transcripts using SnowShoes-FTD: (i) the minimum number of fusion encompassing reads (default value: 10); (ii) the minimum number of unique fusion junction spanning reads (must be ≧1 with a default set to 2); (iii) the minimum distance between the two fusion partner genes if both are located on the same chromosome (default value: 100 kb); (iv) the maximum number of fusion isoforms allowed between two fusion partners (default value: 2); and (v) whether the fusion transcripts feature junction points at exon boundaries (default=Yes). The default values of the parameters were chosen to minimize false positive rate. For example, the minimum number of unique fusion junction spanning reads was set to 2 by default to avoid the false detection of fusion junction spanning reads arising from the PCR artifacts which may give multiple junction spanning reads that are identical in alignment positions. In addition, the limit of the maximum fusion isoforms between two partner genes was based on the hypothesis that if there are too many fusion isoforms between two partners, the fusion event would appear to be existing by random fusion events without obvious biological significances.

### List of Reference Files Available

[0050] A list of reference files was available for download in preparation for the fusion transcript detection using SnowShoes-FTD: (1) the one-directional exhaustive exon-exon junction database generated for read-lengths 50-, 75-, and 100-bases. This was provided in the FASTA format; and (2) the curated gene and exon definition files (refFlat files) from both genome builds 36 and 37. The gene and exon definition files are updated periodically. All reference files can be obtained from the SnowShoes website: http://mayoresearch.mayo.edu/mayo/research/biostat/stand-alone-packages.cfm.

### Detection of Fusion Transcripts in 31 Breast Cell Lines

[0051] The SnowShoes-FTD tool was applied to the 50-base pair-end RNA-Seq data from 22 breast cancer cell lines, one established non-tumorigenic breast cell line (MCF10A), and 8 primary HMEC cultures (Table 1). The fusion transcript candidates of these 31 breast cell lines were nominated using the default parameter values based on genome build 36 (hg18). As shown in Table 2, read pairs sequenced per sample totaled to 18-33 millions, among which 45-58% had both ends mapped to the genome, 3-5% had both ends mapped to exon junctions, 11-18% had one end mapped to the genome and the other mapped to exon junctions, 5-15% had one end mapped to the genome and the other not mapped, 1-2% had one end mapped to exon junctions and the 2nd end not mapped. In addition, there were 2-9% of the read pairs with neither ends mapped to the genome or exon junctions. 11-20% of the reads were filtered out due to low mapping quality and/or redundant mapping.

TABLE 1
Sample information of the 31 breast cell lines.

| | | | Flow | |
|---|---|---|---|---|
| Sample | | | Cell | Run |
| Number | Sample ID | Sample Description | Lane # | Number |
| 1 | BT-474 | Cancer Cell Line | 1 | Run #1 |
| 2 | MCF10A | Non-Tumorigenic | 2 | |
| 3 | BT-20 | Cancer Cell Line | 3 | |
| 4 | MCF7 | Cancer Cell Line | 4 | |
| 5 | MDA-MB-468 | Cancer Cell Line | 6 | |
| 6 | T47D | Cancer Cell Line | 7 | |
| 7 | ZR-75-1 | Cancer Cell Line | 8 | |
| 8 | HCC1937 | Cancer Cell Line | 1 | Run #2 |
| 9 | HCC1954 | Cancer Cell Line | 2 | |
| 10 | HCC2218 | Cancer Cell Line | 3 | |
| 11 | HCC1599 | Cancer Cell Line | 4 | |
| 12 | HCC1395 | Cancer Cell Line | 5 | |
| 13 | BT549 | Cancer Cell Line | 6 | |
| 14 | Hs578T | Cancer Cell Line | 7 | |
| 15 | MDA-MB-175V-II | Cancer Cell Line | 8 | |
| 16 | MDA-MB-361 | Cancer Cell Line | 1 | Run #3 |
| 17 | MDA-MB-436 | Cancer Cell Line | 2 | |
| 18 | MDA-MB-453 | Cancer Cell Line | 3 | |
| 19 | SK-BR-3 | Cancer Cell Line | 4 | |
| 20 | UACC812 | Cancer Cell Line | 5 | |
| 21 | HCC1187 | Cancer Cell Line | 6 | |
| 22 | HCC1428 | Cancer Cell Line | 7 | |
| 23 | HCC1806 | Cancer Cell Line | 8 | |
| 24 | DHF 168 | Normal HMEC* | 1 | Run #4 |
| 25 | BSO19B | Normal HMEC | 2 | |
| 26 | BSO28 | Normal HMEC | 3 | |
| 27 | BSO29 | Normal HMEC | 4 | |
| 28 | BSO30 | Normal HMEC | 5 | |
| 29 | BSO32N | Normal HMEC | 6 | |
| 30 | BSO36 | Normal HMEC | 7 | |
| 31 | BSO37 | Normal HMEC | 8 | |

HMEC: Human Mammalian Epithelial Cells Primarily cultured from benign breast biopsy samples.

TABLE 2

| Row | Cell Line: | BT-474 | MCF10A | BT-20 | MCF7 | MDA-MB-468 | T47D |
|---|---|---|---|---|---|---|---|
| A | Total Read Pairs | 33,108,579 | 29,942,274 | 33,004,454 | 29,777,246 | 32,629,020 | 27,834,336 |
| B | Both ends mapped to | 967,599 | 1,185,024 | 1,465,055 | 1,287,318 | 1,325,523 | 1,233,551 |
| | exon junctions | | | | | | |
| C | Both ends mapped to | 15,472,214 | 16,126,686 | 17,293,975 | 15,491,395 | 15,622,395 | 14,106,192 |
| | genome | | | | | | |
| D | End 1 map to genome; | 1,921,698 | 2,306,577 | 2,490,157 | 2,275,646 | 1,780,577 | 1,991,704 |
| | End 2 map to junction | | | | | | |
| E | End 1 map to junctions; | 1,956,072 | 2,344,307 | 2,532,582 | 2,301,062 | 1,796,695 | 2,022,605 |
| | End 2 map to genome | | | | | | |
| F | End 1 map to genome, | 3,165,404 | 1,534,609 | 1,937,424 | 1,434,814 | 2,527,943 | 1,531,133 |
| | End 2 not mapped | | | | | | |
| G | End 1 not mapped, End 2 | 2,082,290 | 918,848 | 1,029,301 | 1,005,043 | 1,321,144 | 956,473 |
| | map to genome | | | | | | |
| H | End 1 map to exon | 451,657 | 266,065 | 351,723 | 262,611 | 446,131 | 283,188 |
| | junction, End 2 not | | | | | | |
| | mapped | | | | | | |
| I | End 1 not mapped, End 2 | 288,340 | 130,259 | 153,356 | 157,406 | 209,534 | 144,249 |
| | map to exon junction | | | | | | |
| J | Both Ends Not Mapped | 1,413,251 | 987,653 | 1,083,161 | 861,804 | 3,150,078 | 873,260 |
| K | Filtered (MapQ, | 5,390,054 | 4,142,246 | 4,667,720 | 4,700,147 | 4,449,000 | 4,691,981 |
| | Mappability) | | | | | | |
| L | Total Read Pairs | 33,108,579 | 29,942,274 | 33,004,454 | 29,777,246 | 32,629,020 | 27,834,336 |
| M | Both Ends Mapped to | 967,599 | 1,185,024 | 1,465,055 | 1,287,318 | 1,325,523 | 1,233,551 |
| | Exon Junctions | | | | | | |
| N | Both Ends Mapped to | 15,472,214 | 16,126,686 | 17,293,975 | 15,491,395 | 15,622,395 | 14,106,192 |
| | Genome | | | | | | |
| O | One End Mapped to | 3,877,770 | 4,650,884 | 5,022,739 | 4,576,708 | 3,577,272 | 4,014,309 |
| | Genome, One End | | | | | | |
| | Mapped to Exon Junction | | | | | | |
| P | One End Mapped to | 5,247,694 | 2,453,457 | 2,966,725 | 2,439,857 | 3,849,087 | 2,487,606 |
| | Genome, One End Not | | | | | | |
| | Mapped | | | | | | |
| Q | One End Mapped of Exon | 739,997 | 396,324 | 505,079 | 420,017 | 655,665 | 427,437 |
| | Junction, One End Not | | | | | | |
| | Mapped | | | | | | |
| R | Both Ends Not Mapped | 1,413,251 | 987,653 | 1,083,161 | 861,804 | 3,150,078 | 873,260 |
| S | Filtered Read Pairs | 5,390,054 | 4,142,246 | 4,667,720 | 4,700,147 | 4,449,000 | 4,691,981 |
| T | Total Read Pairs | 33,108,579 | 29,942,274 | 33,004,454 | 29,777,246 | 32,629,020 | 27,834,336 |
| U | Both Ends Mapped to | 2.9225% | 3.9577% | 4.4390% | 4.3232% | 4.0624% | 4.4318% |
| | Exon Junctions | | | | | | |
| V | Both Ends Mapped to | 46.7317% | 53.8593% | 52.3989% | 52.0243% | 47.8788% | 50.6791% |
| | Genome | | | | | | |
| W | One End Mapped to | 11.7123% | 15.5328% | 15.2184% | 15.3698% | 10.9635% | 14.4221% |
| | Genome, One End | | | | | | |
| | Mapped to Exon Junction | | | | | | |
| X | One End Mapped to | 15.8500% | 8.1940% | 8.9889% | 8.1937% | 11.7965% | 8.9372% |
| | Genome, One End Not | | | | | | |
| | Mapped | | | | | | |
| Y | One End Mapped of Exon | 2.2351% | 1.3236% | 1.5303% | 1.4105% | 2.0095% | 1.5356% |
| | Junction, One End Not | | | | | | |
| | Mapped | | | | | | |
| Z | Both Ends Not Mapped | 4.2685% | 3.2985% | 3.2819% | 2.8942% | 9.6542% | 3.1373% |
| AA | Filtered Read Pairs | 16.2799% | 13.8341% | 14.1427% | 15.7844% | 13.6351% | 16.8568% |

| Row | ZR-75-1 | HCC1954 | HCC2218 | HCC1599 | HCC1395 | BT549 | Hs578T | MDA-MB-175V-II | MDA-MB-361 |
|---|---|---|---|---|---|---|---|---|---|
| A | 28,279,001 | 21,368,082 | 21,646,565 | 20,839,210 | 20,885,816 | 20,564,387 | 21,163,489 | 19,975,881 | 18,982,847 |
| B | 906,388 | 1,057,290 | 1,057,372 | 1,060,908 | 1,028,507 | 992,377 | 1,139,460 | 790,780 | 760,538 |
| C | 12,865,780 | 11,457,498 | 10,468,135 | 11,075,098 | 10,889,876 | 11,217,404 | 11,469,811 | 10,843,542 | 11,152,244 |
| D | 1,553,829 | 1,654,404 | 1,293,163 | 1,699,329 | 1,719,327 | 1,698,529 | 1,902,759 | 1,364,672 | 1,217,291 |
| E | 1,569,922 | 1,683,656 | 1,315,053 | 1,723,060 | 1,745,710 | 1,720,513 | 1,940,243 | 1,377,012 | 1,240,587 |
| F | 2,756,407 | 839,016 | 771,655 | 761,735 | 794,179 | 754,211 | 1,002,891 | 763,913 | 787,834 |
| G | 1,636,306 | 605,286 | 562,351 | 524,216 | 549,597 | 488,195 | 625,354 | 502,625 | 402,695 |
| H | 426,338 | 144,308 | 134,419 | 128,164 | 137,034 | 127,247 | 210,186 | 109,477 | 124,795 |
| I | 244,443 | 86,449 | 84,679 | 69,464 | 73,921 | 60,734 | 97,234 | 54,231 | 48,261 |
| J | 1,942,352 | 1,104,408 | 1,505,030 | 367,688 | 547,157 | 250,766 | 429,522 | 545,897 | 380,510 |
| K | 4,377,236 | 2,735,767 | 4,454,708 | 3,429,548 | 3,400,508 | 3,254,411 | 2,346,029 | 3,623,732 | 2,868,092 |
| L | 28,279,001 | 21,368,082 | 21,646,565 | 20,839,210 | 20,885,816 | 20,564,387 | 21,163,489 | 19,975,881 | 18,982,847 |
| M | 906,388 | 1,057,290 | 1,057,372 | 1,060,908 | 1,028,507 | 992,377 | 1,139,460 | 790,780 | 760,538 |
| N | 12,865,780 | 11,457,498 | 10,468,135 | 11,075,098 | 10,889,876 | 11,217,404 | 11,469,811 | 10,843,542 | 11,152,244 |
| O | 3,123,751 | 3,338,060 | 2,608,216 | 3,422,389 | 3,465,037 | 3,419,042 | 3,843,002 | 2,741,684 | 2,457,878 |
| P | 4,392,713 | 1,444,302 | 1,334,006 | 1,285,951 | 1,343,776 | 1,242,406 | 1,628,245 | 1,266,538 | 1,190,529 |
| Q | 670,781 | 230,757 | 219,098 | 197,628 | 210,955 | 187,981 | 307,420 | 163,708 | 173,056 |
| R | 1,942,352 | 1,104,408 | 1,505,030 | 367,688 | 547,157 | 250,766 | 429,522 | 545,897 | 380,510 |
| S | 4,377,236 | 2,735,767 | 4,454,708 | 3,429,548 | 3,400,508 | 3,254,411 | 2,346,029 | 3,623,732 | 2,868,092 |
| T | 28,279,001 | 21,368,082 | 21,646,565 | 20,839,210 | 20,885,816 | 20,564,387 | 21,163,489 | 19,975,881 | 18,982,847 |
| U | 3.2052% | 4.9480% | 4.8847% | 5.0909% | 4.9244% | 4.8257% | 5.3841% | 3.9587% | 4.0064% |
| V | 45.4959% | 53.6197% | 48.3593% | 53.1455% | 52.1401% | 54.5477% | 54.1962% | 54.2832% | 58.7491% |
| W | 11.0462% | 15.6217% | 12.0491% | 16.4228% | 16.5904% | 16.6260% | 18.1586% | 13.7250% | 12.9479% |
| X | 15.5335% | 6.7592% | 6.1627% | 6.1708% | 6.4339% | 6.0415% | 7.6937% | 6.3403% | 6.2716% |
| Y | 2.3720% | 1.0799% | 1.0122% | 0.9483% | 1.0100% | 0.9141% | 1.4526% | 0.8195% | 0.9116% |
| Z | 6.8685% | 5.1685% | 6.9527% | 1.7644% | 2.6198% | 1.2194% | 2.0295% | 2.7328% | 2.0045% |
| AA | 15.4788% | 12.8031% | 20.5793% | 16.4572% | 16.2814% | 15.8255% | 11.0853% | 18.1405% | 15.1089% |

| | MDA-MB- | MDA-MB- | | | | | | | | |
|---|---|---|---|---|---|---|---|---|---|---|
| Row | 436 | 453 | SK-BR-3 | UACC812 | HCC1187 | HCC1428 | HCC1806 | HCC1937 | BN1 | BN2 |
| A | 19,326,929 | 18,821,975 | 18,958,559 | 19,338,997 | 19,807,859 | 19,126,250 | 18,714,788 | 18,104,523 | 21,550,821 | 21,353,151 |
| B | 1,013,331 | 853,132 | 879,624 | 872,827 | 982,195 | 905,990 | 969,604 | 860,993 | 1,060,260 | 1,094,922 |
| C | 10,245,609 | 10,758,747 | 9,956,488 | 10,852,009 | 10,622,768 | 10,149,823 | 9,707,659 | 10,205,243 | 11,809,197 | 11,606,028 |
| D | 1,668,058 | 1,425,541 | 1,516,716 | 1,480,106 | 1,449,627 | 1,434,064 | 1,436,302 | 1,496,280 | 1,906,149 | 1,657,758 |
| E | 1,687,689 | 1,436,359 | 1,531,754 | 1,500,490 | 1,467,590 | 1,446,630 | 1,451,970 | 1,507,298 | 1,918,891 | 1,680,564 |
| F | 703,619 | 627,395 | 700,675 | 722,458 | 903,348 | 845,077 | 900,149 | 534,762 | 654,737 | 750,144 |
| G | 445,262 | 393,266 | 430,142 | 434,050 | 512,627 | 486,248 | 496,522 | 397,224 | 443,296 | 552,817 |
| H | 121,839 | 90,442 | 114,555 | 111,533 | 162,509 | 148,712 | 168,810 | 75,098 | 98,768 | 98,206 |
| I | 59,423 | 44,966 | 55,628 | 52,103 | 74,421 | 69,319 | 74,394 | 41,912 | 51,730 | 57,704 |
| J | 403,083 | 225,327 | 428,803 | 275,411 | 524,031 | 645,819 | 546,545 | 338,321 | 470,350 | 495,573 |
| K | 2,979,016 | 2,966,800 | 3,344,174 | 3,038,010 | 3,108,743 | 2,994,568 | 2,962,833 | 2,647,392 | 3,137,443 | 3,359,435 |
| | MDA-MB- | MDA-MB- | | | | | | | MDA-MB- | MDA-MB- |
| Row | 436 | 453 | SK-BR-3 | UACC812 | HCC1187 | HCC1428 | HCC1806 | HCC1937 | 436 | 453 |
| L | 19,326,929 | 18,821,975 | 18,958,559 | 19,338,997 | 19,807,859 | 19,126,250 | 18,714,788 | 18,104,523 | 21,550,821 | 21,353,151 |
| M | 1,013,331 | 853,132 | 879,624 | 872,827 | 982,195 | 905,990 | 969,604 | 860,993 | 1,060,260 | 1,094,922 |
| N | 10,245,609 | 10,758,747 | 9,956,488 | 10,852,009 | 10,622,768 | 10,149,823 | 9,707,659 | 10,205,243 | 11,809,197 | 11,606,028 |
| O | 3,355,747 | 2,861,900 | 3,048,470 | 2,980,596 | 2,917,217 | 2,880,694 | 2,888,272 | 3,003,578 | 3,825,040 | 3,338,322 |
| P | 1,148,881 | 1,020,661 | 1,130,817 | 1,156,508 | 1,415,975 | 1,331,325 | 1,396,671 | 931,986 | 1,098,033 | 1,302,961 |
| Q | 181,262 | 135,408 | 170,183 | 163,636 | 236,930 | 218,031 | 243,204 | 117,010 | 150,498 | 155,910 |
| R | 403,083 | 225,327 | 428,803 | 275,411 | 524,031 | 645,819 | 546,545 | 338,321 | 470,350 | 495,573 |
| S | 2,979,016 | 2,966,800 | 3,344,174 | 3,038,010 | 3,108,743 | 2,994,568 | 2,962,833 | 2,647,392 | 3,137,443 | 3,359,435 |
| T | 19,326,929 | 18,821,975 | 18,958,559 | 19,338,997 | 19,807,859 | 19,126,250 | 18,714,788 | 18,104,523 | 21,550,821 | 21,353,151 |
| U | 5.2431% | 4.5326% | 4.6397% | 4.5133% | 4.9586% | 4.7369% | 5.1810% | 4.7557% | 4.9198% | 5.1277% |
| V | 53.0121% | 57.1606% | 52.5171% | 56.1146% | 53.6291% | 53.0675% | 51.8716% | 56.3685% | 54.7970% | 54.3528% |
| W | 17.3631% | 15.2051% | 16.0797% | 15.4124% | 14.7276% | 15.0615% | 15.4331% | 16.5902% | 17.7489% | 15.6339% |
| X | 5.9445% | 5.4227% | 5.9647% | 5.9802% | 7.1486% | 6.9607% | 7.4629% | 5.1478% | 5.0951% | 6.1020% |
| Y | 0.9379% | 0.7194% | 0.8977% | 0.8461% | 1.1961% | 1.1400% | 1.2995% | 0.6463% | 0.6983% | 0.7301% |
| Z | 2.0856% | 1.1971% | 2.2618% | 1.4241% | 2.6456% | 3.3766% | 2.9204% | 1.8687% | 2.1825% | 2.3208% |
| AA | 15.4138% | 15.7624% | 17.6394% | 15.7092% | 15.6945% | 15.6568% | 15.8315% | 14.6228% | 14.5583% | 15.7327% |

| Row | BN3 | BN4 | BN5 | BN6 | BN7 | BN8 | Min | Max |
|---|---|---|---|---|---|---|---|---|
| A | 20,924,924 | 22,510,790 | 21,057,269 | 24,033,748 | 21,682,601 | 20,257,198 | 18,104,523 | 33,108,579 |
| B | 1,045,586 | 1,149,385 | 958,317 | 1,146,878 | 1,083,300 | 945,339 | 760,538 | 1,465,055 |
| C | 11,204,204 | 12,296,033 | 11,542,896 | 13,355,714 | 12,005,466 | 11,203,857 | 9,707,659 | 17,293,975 |
| D | 1,861,254 | 2,049,317 | 1,723,515 | 2,076,865 | 1,673,894 | 1,721,057 | 1,217,291 | 2,490,157 |
| E | 1,868,123 | 2,062,445 | 1,736,873 | 2,089,358 | 1,689,254 | 1,732,145 | 1,240,587 | 2,532,582 |
| F | 657,416 | 645,611 | 639,013 | 762,606 | 741,286 | 646,232 | 534,762 | 3,165,404 |
| G | 445,708 | 425,788 | 417,370 | 495,086 | 515,542 | 425,145 | 393,266 | 2,082,290 |
| H | 99,404 | 97,012 | 91,801 | 113,551 | 111,449 | 93,334 | 75,098 | 451,657 |
| I | 51,038 | 44,827 | 45,871 | 54,262 | 65,365 | 47,633 | 41,912 | 288,340 |
| J | 432,782 | 425,987 | 685,134 | 428,998 | 494,662 | 512,827 | 225,327 | 3,150,078 |
| K | 3,259,409 | 3,314,385 | 3,216,479 | 3,510,430 | 3,302,383 | 2,929,629 | 2,346,029 | 5,390,054 |
| Row | SK-BR-3 | UACC812 | HCC1187 | HCC1428 | HCC1806 | HCC1937 | Min | Max |
| L | 20,924,924 | 22,510,790 | 21,057,269 | 24,033,748 | 21,682,601 | 20,257,198 | 18,104,523 | 33,108,579 |
| M | 1,045,586 | 1,149,385 | 958,317 | 1,146,878 | 1,083,300 | 945,339 | 760,538 | 1,465,055 |
| N | 11,204,204 | 12,296,033 | 11,542,896 | 13,355,714 | 12,005,466 | 11,203,857 | 9,707,659 | 17,293,975 |
| O | 3,729,377 | 4,111,762 | 3,460,388 | 4,166,223 | 3,363,148 | 3,453,202 | 2,457,878 | 5,022,739 |
| P | 1,103,124 | 1,071,399 | 1,056,383 | 1,257,692 | 1,256,828 | 1,071,377 | 931,986 | 5,247,694 |
| Q | 150,442 | 141,839 | 137,672 | 167,813 | 176,814 | 140,967 | 117,010 | 739,997 |
| R | 432,782 | 425,987 | 685,134 | 428,998 | 494,662 | 512,827 | 225,327 | 3,150,078 |
| S | 3,259,409 | 3,314,385 | 3,216,479 | 3,510,430 | 3,302,383 | 2,929,629 | 2,346,029 | 5,390,054 |
| T | 20,924,924 | 22,510,790 | 21,057,269 | 24,033,748 | 21,682,601 | 20,257,198 | 18,104,523 | 33,108,579 |
| U | 4.9968% | 5.1059% | 4.5510% | 4.7719% | 4.9962% | 4.6667% | 2.9225% | 5.3841% |
| V | 53.5448% | 54.6228% | 54.8167% | 55.5707% | 55.3691% | 55.3080% | 45.4959% | 58.7491% |
| W | 17.8227% | 18.2657% | 16.4332% | 17.3349% | 15.5108% | 17.0468% | 10.9635% | 18.2657% |
| X | 5.2718% | 4.7595% | 5.0167% | 5.2330% | 5.7965% | 5.2889% | 4.7595% | 15.8500% |
| Y | 0.7190% | 0.6301% | 0.6538% | 0.6982% | 0.8155% | 0.6959% | 0.6301% | 2.3720% |
| Z | 2.0683% | 1.8924% | 3.2537% | 1.7850% | 2.2814% | 2.5316% | 1.1971% | 9.6542% |
| AA | 15.5767% | 14.7235% | 15.2749% | 14.6063% | 15.2306% | 14.4622% | 11.0853% | 20.5793% |

[0052] 55 fusion transcript candidates were nominated (Tables 3 and 4). Fifty of these had unique isoforms while the rest had 2 isoforms. As shown in FIG. 2A, all 50 fusion transcripts with a single fusion isoform were validated as evidenced by generation of PCR products of the predicted sizes. Several fusion transcripts were randomly selected for further validation using Sanger sequencing of the PCR bands. All PCR products were confirmed by Sanger sequencing with the observation that the predicted DNA sequence conformed to the actual DNA sequence of the PCR product. All isoforms were similarly validated for the 5 fusion candidates with two isoforms (FIG. 2B). The sequences of the primers used in PCR validations are set forth in Table 5, which includes the primers for the alternative isoforms of the 5 fusion candidates with 2 isoforms each.

TABLE 3
List of fusion transcripts identified.

| | | | | | Total | Between | # of |
|---|---|---|---|---|---|---|---|
| | | | In | | Read | Exon | Fusion |
| FUSION Transcript | Mechanism | Type | Frame | Strand | Pairs | Boundaries | Isoforms |
| LIMA1->USP22 | T | inter-chr | YES | − | 16 | YES | 1 |
| ACACA->STAC2 | T | intra-chr | YES | − | 72 | YES | 1 |
| FAM102A->CIZ1 | T | intra-chr | | − | 31 | YES | 2 |
| GLB1->CMTM7 | I | intra-chr | YES | − | 13 | YES | 1 |
| MED1->STXBP4 | I AND T | intra-chr | YES | − | 54 | YES | 1 |
| PIP4K2B->RAD51C | I AND T | intra-chr | | − | 15 | YES | 1 |
| RAB22A->MYO9B | T | inter-chr | | + | 16 | YES | 1 |
| RPS6KB1->SNF8 | I AND T | intra-chr | YES | + | 162 | YES | 1 |
| STARD3->DOK5 | T | inter-chr | | + | 21 | YES | 1 |
| TRPC4AP->MRPL45 | I AND T | inter-chr | YES | − | 27 | YES | 1 |
| ZMYND8->CEP250 | I | intra-chr | | − | 189 | YES | 2 |
| CTAGE5->SIP1 | T | intra-chr | | + | 64 | YES | 1 |
| MLL5->LHFPL3 | T | intra-chr | | + | 23 | YES | 1 |
| PUM1->TRERF1 | T | inter-chr | | − | 58 | YES | 1 |
| SEC22B->NOTCH2 | I AND T | intra-chr | | + | 22 | YES | 1 |
| EIF3K->CYP39A1 | I AND T | inter-chr | YES | + | 91 | YES | 1 |
| RAB7A->LRCH3 | DOR T | intra-chr | | + | 14 | YES | 1 |
| RNF187->OBSCN | T | intra-chr | | + | 11 | YES | 1 |
| SLC37A1->ABCG1 | T | intra-chr | YES | + | 20 | YES | 1 |
| CYTH1->PRPSAP1 | DOR T | intra-chr | YES | − | 33 | YES | 1 |
| EXOC7->CYTH1 | T | intra-chr | YES | − | 20 | YES | 1 |
| BRE->DPYSL5 | T | intra-chr | YES | + | 13 | YES | 1 |
| CD151->DRD4 | T | intra-chr | | + | 11 | YES | 1 |
| LDLRAD3->TCP11L1 | T | intra-chr | | + | 25 | YES | 1 |
| RFT1->UQCRC2 | I AND T | inter-chr | YES | − | 102 | YES | 1 |
| TAX1BP1->AHCY | I AND T | inter-chr | YES | + | 54 | YES | 1 |
| NFIA->EHF | T | inter-chr | YES | + | 18 | YES | 1 |
| GSDMC->PVT1 | I | intra-chr | | − | 23 | YES | 1 |
| INTS1->PRKAR1B | DOR T | intra-chr | YES | − | 24 | YES | 1 |
| PHF20L1->SAMD12 | I AND T | intra-chr | YES | + | 106 | YES | 1 |
| STRADB->NOP58 | DOR T | intra-chr | YES | + | 10 | YES | 1 |
| POLDIP2->BRIP1 | T | intra-chr | | − | 13 | YES | 1 |
| ADAMTS19->SLC27A6 | T | intra-chr | | + | 30 | YES | 1 |
| ARFGEF2->SULF2 | I AND T | intra-chr | YES | + | 421 | YES | 1 |
| ATXN7L3->FAM171A2 | T | intra-chr | | − | 10 | YES | 1 |
| BCAS4->BCAS3 | T | inter-chr | | + | 1697 | YES | 1 |
| GCN1L1->MSI1 | T | intra-chr | YES | − | 25 | YES | 1 |
| MYH9->EIF3D | T | intra-chr | YES | − | 16 | YES | 1 |
| RPS6KB1->DIAPH3 | I AND T | inter-chr | | + | 25 | YES | 1 |
| SULF2->PRICKLE2 | T | inter-chr | | − | 26 | YES | 1 |
| ODZ4->NRG1 | I AND T | inter-chr | YES | − | 12 | YES | 1 |
| BRIP1->TMEM49 | I | intra-chr | | − | 28 | YES | 1 |
| SUPT4H1->CCDC46 | T | intra-chr | | − | 17 | YES | 1 |
| TMEM104->CDK12 | T | intra-chr | YES | + | 10 | YES | 2 |
| RIMS2->ATP6V1C1 | T | intra-chr | YES | + | 11 | YES | 1 |
| TIAL1->C10orf119 | T | intra-chr | | − | 12 | YES | 1 |
| MECP2->TMLHE | T | intra-chr | | − | 29 | YES | 1 |
| ARID1A->MAST2 | DOR T | intra-chr | YES | + | 18 | YES | 1 |
| UBR5->SLC25A32 | T | intra-chr | | − | 28 | YES | 1 |
| KLHDC2->SNTB1 | I AND T | inter-chr | YES | + | 25 | YES | 1 |
| ARID1A->WDTC1 | DOR T | intra-chr | YES | + | 23 | YES | 1 |
| HDGF->S100A10 | DOR T | intra-chr | YES | − | 154 | YES | 1 |
| PPP1R12B->SNX27 | T | intra-chr | YES | + | 45 | YES | 1 |
| SRGAP2->PRPF3 | T | intra-chr | YES | + | 22 | YES | 2 |
| WIPF2->ERBB2 | T | intra-chr | YES | + | 66 | YES | 2 |

The fusion transcripts are named as the 5′ gene -> 3′ gene. For example, LIMA1-> USP22 is a fusion transcript formed between two partner genes, LIMA1 and USP22, in which LIMA1 is the 5′ gene and USP22 is the 3′ gene.
In the fusion mechanism column, T stands for translocation; I stands for inversion; and D stands for interstitial deletion.
Intra-chr: intra-chromosomal fusion;
Inter-chr: inter-chromosomal fusion.

TABLE 4

| Row | FUSION GENE | Potential Fusion Mechanism | Type |
|---|---|---|---|
| 1 | ACACA->STAC2 | Translocation | intra-chromosomal |
| 2 | ADAMTS19->SLC27A6 | Translocation | intra-chromosomal |
| 3 | ARFGEF2->SULF2 | Inversion AND Translocation | intra-chromosomal |
| 4 | ARID1A->MAST2 | Interstitial_Deletion OR Translocation | intra-chromosomal |
| 5 | ARID1A->WDTC1 | Interstitial_Deletion OR Translocation | intra-chromosomal |
| 6 | ATXN7L3->FAM171A2 | Translocation | intra-chromosomal |
| 7 | BCAS4->BCAS3 | Translocation | inter-chromosomal |
| 8 | BRE->DPYSL5 | Translocation | intra-chromosomal |
| 9 | BRIP1->TMEM49 | Inversion Alone | intra-chromosomal |
| 10 | CD151->DRD4 | Translocation | intra-chromosomal |
| 11 | CTAGE5->SIP1 | Translocation | intra-chromosomal |
| 12 | CYTH1->PRPSAP1 | Interstitial_Deletion OR Translocation | intra-chromosomal |
| 13 | EIF3K->CYP39A1 | Inversion AND Translocation | inter-chromosomal |
| 14 | EXOC7->CYTH1 | Translocation | intra-chromosomal |
| 15 | FAM102A->CIZ1 | Translocation | intra-chromosomal |
| 16 | FAM102A->CIZ1 | Translocation | intra-chromosomal |
| 17 | GCN1L1->MSI1 | Translocation | intra-chromosomal |
| 18 | GLB1->CMTM7 | Inversion Alone | intra-chromosomal |
| 19 | GSDMC->PVT1 | Inversion Alone | intra-chromosomal |
| 20 | HDGF->S100A10 | Interstitial_Deletion OR Translocation | intra-chromosomal |
| 21 | INTS1->PRKAR1B | Interstitial_Deletion OR Translocation | intra-chromosomal |
| 22 | KLHDC2->SNTB1 | Inversion AND Translocation | inter-chromosomal |
| 23 | LDLRAD3->TCP11L1 | Translocation | intra-chromosomal |
| 24 | LIMA1->USP22 | Translocation | inter-chromosomal |
| 25 | MECP2->TMLHE | Translocation | intra-chromosomal |
| 26 | MED1->STXBP4 | Inversion AND Translocation | intra-chromosomal |
| 27 | MLL5->LHFPL3 | Translocation | intra-chromosomal |
| 28 | MYH9->EIF3D | Translocation | intra-chromosomal |
| 29 | NFIA->EHF | Translocation | inter-chromosomal |
| 30 | ODZ4->NRG1 | Inversion AND Translocation | inter-chromosomal |
| 31 | PHF20L1->SAMD12 | Inversion AND Translocation | intra-chromosomal |
| 32 | PIP4K2B->RAD51C | Inversion AND Translocation | intra-chromosomal |
| 33 | POLDIP2->BRIP1 | Translocation | intra-chromosomal |
| 34 | PPP1R12B->SNX27 | Translocation | intra-chromosomal |
| 35 | PRPF3->SRGAP2 | Interstitial_Deletion OR Translocation | intra-chromosomal |
| 36 | PUM1->TRERF1 | Translocation | inter-chromosomal |
| 37 | RAB22A->MYO9B | Translocation | inter-chromosomal |
| 38 | RAB7A->LRCH3 | Interstitial_Deletion OR Translocation | intra-chromosomal |
| 39 | RFT1->UQCRC2 | Inversion AND Translocation | inter-chromosomal |
| 40 | RIMS2->ATP6V1C1 | Translocation | intra-chromosomal |
| 41 | RNF187->OBSCN | Translocation | intra-chromosomal |
| 42 | RPS6KB1->DIAPH3 | Inversion AND Translocation | inter-chromosomal |
| 43 | RPS6KB1->SNF8 | Inversion AND Translocation | intra-chromosomal |
| 44 | SEC22B->NOTCH2 | Inversion AND Translocation | intra-chromosomal |
| 45 | SLC37A1->ABCG1 | Translocation | intra-chromosomal |
| 46 | SRGAP2->PRPF3 | Translocation | intra-chromosomal |
| 47 | STARD3->DOK5 | Translocation | inter-chromosomal |
| 48 | STRADB->NOP58 | Interstitial_Deletion OR Translocation | intra-chromosomal |
| 49 | SULF2->PRICKLE2 | Translocation | inter-chromosomal |
| 50 | SUPT4H1->CCDC46 | Translocation | intra-chromosomal |
| 51 | TAX1BP1->AHCY | Inversion AND Translocation | inter-chromosomal |
| 52 | TIAL1->C10orf119 | Translocation | intra-chromosomal |
| 53 | TMEM104->CDK12 | Translocation | intra-chromosomal |
| 54 | TMEM104->CDK12 | Translocation | intra-chromosomal |
| 55 | TRPC4AP->MRPL45 | Inversion AND Translocation | inter-chromosomal |
| 56 | UBR5->SLC25A32 | Translocation | intra-chromosomal |
| 57 | WIPF2->ERBB2 | Translocation | intra-chromosomal |
| 58 | WIPF2->ERBB2 | Translocation | intra-chromosomal |
| 59 | ZMYND8->CEP250 | Inversion Alone | intra-chromosomal |
| 60 | ZMYND8->CEP250 | Inversion Alone | intra-chromosomal |

| Row | Inversion | Exon Mapping Information | Fusion Strand |
|---|---|---|---|
| 1 | NO | E2:chr17:STAC2:NM_198993:34627645:34627952:−: | REVERSE Strand |
| | | 285_307\|\|E53:chr17:ACACA:NM_198839:32553565:32553662: | |
| | | −:1_27 | |
| 2 | NO | E1:chr5:ADAMTS19:NM_133638:128824001:128824074:+: | FORWARD Strand |
| | | 45_73\|\|E9:chr5:SLC27A6:NM_014031:128391936:128392034: | |
| | | +:1_19 | |
| 3 | YES | E3:chr20:SULF2:NM_198596:45798853:45799093:−: | FORWARD_Strand |
| | | 211_240\|\|E1:chr20:ARFGEF2:NM_006420:46971681:46971954: | |
| | | +:273_254 | |
| 4 | NO | E2:chr1:MAST2:NM_015112:46062691:46062839:+:21_1\|\|E1: | FORWARD_Strand |
| | | chr1:ARID1A:NM_006015:26895108:26896618:+:1510_1482 | |
| 5 | NO | E1:chr1:ARID1A:NM_006015:26895108:26896618:+:1487_1510\|\| | FORWARD Strand |
| | | E4:chr1:WDTC1:NM_015023:27481316:27481363:+: | |
| | | 1_26 | |
| 6 | NO | E1:chr17:ATXN7L3:NM_001098833:39630913:39631055:−: | REVERSE_Strand |
| | | 26_1\|\|E4:chr17:FAM171A2:NM_198475:39789323:39789482: | |
| | | −:159_136 | |
| 7 | NO | E1:chr20:BCAS4:NM_017843:48844873:48845117:+:221_244\|\| | FORWARD Strand |
| | | E24:chr17:BCAS3:NM_001099432:56800469:56800637: | |
| | | +:1_23 | |
| 8 | NO | E2:chr2:DPYSL5:NM_020134:26974867:26975132:+:19_1\|\| | FORWARD_Strand |
| | | E8:chr2:BRE:NM_199192:28205641:28205751:+:110_80 | |
| 9 | YES | E3:chr17:BRIP1:NM_032043:57291938:57292050:−: | REVERSE_Strand |
| | | 25_1\|\|E10:chr17:TMEM49:NM_030938:55249854:55249916: | |
| | | +:1_25 | |
| 10 | NO | E4:chr11:CD151:NM_139030:826768:826843:+:52_75\|\|E4:chr11: | FORWARD Strand |
| | | DRD4:NM_000797:630400:630703:+:1_26 | |
| 11 | NO | E9:chr14:SIP1:NM_001009182:38675394:38675928:+:24_1\|\| | FORWARD_Strand |
| | | E20:chr14:CTAGE5:NM_203354:38865818:38865977:+:159_134 | |
| 12 | NO | E1:chr17:CYTH1:NM_004762:74289878:74289971:−: | REVERSE_Strand |
| | | 27_1\|\|E3:chr17:PRPSAP1:NM_002766:71852346:71852413: | |
| | | −:67_44 | |
| 13 | | E3:chr6:CYP39A1:NM_016593:46715189:46715364:−: | FORWARD_Strand |
| | | 152_175\|\|E6:chr19:EIF3K:NM_013234:43815080:43815158: | |
| | | +:78_53 | |
| 14 | NO | E3:chr17:CYTH1:NM_004762:74217326:74217409:−: | REVERSE Strand |
| | | 58_83\|\|E6:chr17:EXOC7:NM_001145297:71605471:71605694: | |
| | | −:1_25 | |
| 15 | NO | E4:chr9:CIZ1:NM_012127:129989962:129990034:−: | REVERSE Strand |
| | | 55_72\|\|E1:chr9:FAM102A:NM_001035254:129782091:129782633: | |
| | | −:1_32 | |
| 16 | NO | E1:chr9:FAM102A:NM_001035254:129782091:129782633:−: | REVERSE_Strand |
| | | 26_1\|\|E5:chr9:CIZ1:NM_012127:129987646:129987876:−: | |
| | | 230_207 | |
| 17 | NO | E2:chr12:GCN1L1:NM_006836:119112483:119112586:−: | REVERSE_Strand |
| | | 22_1\|\|E12:chr12:MSI1:NM_002442:119269631:119269700: | |
| | | −:69_42 | |
| 18 | YES | E3:chr3:CMTM7:NM_138410:32458335:32458509:+:28_1\|\| | REVERSE_Strand |
| | | E15:chr3:GLB1:NM_001079811:33030551:33030806:−:1_22 | |
| 19 | YES | E9:chr8:PVT1:NR_003367:129182407:129182681:+:24_1\|\| | REVERSE_Strand |
| | | E5:chr8:GSDMC:NM_031415:130844053:130844159:−: | |
| | | 1_25 | |
| 20 | NO | E1:chr1:HDGF:NM_004494:154987758:154988167:−: | REVERSE_Strand |
| | | 25_1\|\|E2:chr1:S100A10:NM_002966:150225198:150225351: | |
| | | −:153_129 | |
| 21 | NO | E14:chr7:INTS1:NM_001080453:1500977:1501055:−: | REVERSE_Strand |
| | | 25_1\|\|E2:chr7:PRKAR1B:NM_002735:717491:717690:−: | |
| | | 199_175 | |
| 22 | YES | E12:chr14:KLHDC2:NM_014315:49319009:49319062:+:27_53\|\| | FORWARD_Strand |
| | | E5:chr8:SNTB1:NM_021021:121630182:121630379:−: | |
| | | 197_175 | |
| 23 | NO | E2:chr11:LDLRAD3:NM_174902:36014228:36014375:+:122_147\|\| | FORWARD Strand |
| | | E4:chr11:TCP11L1:NM_001145541:33035236:33035357: | |
| | | +:1_24 | |
| 24 | NO | E4:chr12:LIMA1:NM_016357:48902070:48902535:−: | REVERSE_Strand |
| | | 25_1\|\|E2:chr17:USP22:NM_015276:20872446:20872579:−: | |
| | | 133_109 | |
| 25 | NO | E5:chrX:TMLHE:NM_018196:154407310:154407487:−: | REVERSE Strand |
| | | 153_177\|\|E2:chrX:MECP2:NM_004992:153010835:153010959: | |
| | | −:1_25 | |
| 26 | YES | E17:chr17:STXBP4:NM_178509:50573669:50573727:+:24_1\|\| | REVERSE_Strand |
| | | E1:chr17:MED1:NM_004774:34860816:34861053:−:1_26 | |
| 27 | NO | E13:chr7:MLL5:NM_182931:104509370:104509480:+:87_110\|\| | FORWARD Strand |
| | | E3:chr7:LHFPL3:NM_199000:104333869:104336239:+: | |
| | | 1_26 | |
| 28 | NO | E2:chr22:EIF3D:NM_003753:35251991:35252124:−: | REVERSE Strand |
| | | 112_133\|\|E1:chr22:MYH9:NM_002473:35113797:35114009: | |
| | | −:1_28 | |
| 29 | NO | E2:chr1:NFIA:NM_001145511:61326408:61326940:+:506_532\|\| | FORWARD Strand |
| | | E5:chr11:EHF:NM_012153:34629664:34629733:+:1_24 | |
| 30 | YES | E4:chr8:NRG1:NM_013960:32572887:32573065:+:32_1\|\|E12: | REVERSE_Strand |
| | | chr11:ODZ4:NM_001098816:78242796:78243007:−:1_19 | |
| 31 | YES | E5:chr8:SAMD12:NM_001101676:119270875:119279152:−: | FORWARD_Strand |
| | | 8254_8277\|\|E9:chr8:PHF20L1:NM_032205:133886041:133886167: | |
| | | +:126_100 | |
| 32 | YES | E7:chr17:PIP4K2B:NM_003559:34187465:34187579:−: | REVERSE_Strand |
| | | 27_1\|\|E6:chr17:RAD51C:NM_058216:54156399:54156460: | |
| | | +:1_20 | |
| 33 | NO | E17:chr17:BRIP1:NM_032043:57148093:57148206:−: | REVERSE Strand |
| | | 90_113\|\|E2:chr17:POLDIP2:NM_015584:23706947:23707029: | |
| | | −:1_27 | |
| 34 | NO | E1:chr1:PPP1R12B:NM_002481:200584452:200584893:+:417_441\|\| | FORWARD Strand |
| | | E8:chr1:SNX27:NM_030918:149922455:149922545: | |
| | | +:1_25 | |
| 35 | NO | E8:chr1:PRPF3:NM_004698:148577259:148577426:+:140_167\|\| | FORWARD Strand |
| | | E4:chr1:SRGAP2:NM_001170637:204632668:204632884: | |
| | | +:1_22 | |
| 36 | NO | E4:chr1:PUM1:NM_001020658:31186584:31186706:−: | REVERSE_Strand |
| | | 29_1\|\|E5:chr6:TRERF1:NM_033502:42343869:42345564:−: | |
| | | 1695_1675 | |
| 37 | NO | E2:chr20:RAB22A:NM_020673:56319504:56319584:+:59_80\|\| | FORWARD Strand |
| | | E3:chr19:MYO9B:NM_004145:17117206:17117301:+:1_28 | |
| 38 | NO | E1:chr3:RAB7A:NM_004637:129927668:129927892:+:204_224\|\| | FORWARD Strand |
| | | E16:chr3:LRCH3:NM_032773:199076690:199076739: | |
| | | +:1_30 | |
| 39 | YES | E10:chr3:RFT1:NM_052859:53113008:53113153:−: | REVERSE_Strand |
| | | 23_1\|\|E9:chr16:UQCRC2:NM_003366:21890346:21890442: | |
| | | +:1_27 | |
| 40 | NO | E1:chr8:RIMS2:NM_001100117:104582151:104582466:+:288_315\|\| | FORWARD Strand |
| | | E9:chr8:ATP6V1C1:NM_001695:104144358:104144451: | |
| | | +:1_22 | |
| 41 | NO | E2:chr1:RNF187:NM_001010858:226743283:226743376:+: | FORWARD Strand |
| | | 70_93\|\|E79:chr1:OBSCN:NM_052843:226605164:226605267: | |
| | | +:1_26 | |
| 42 | YES | E28:chr13:DIAPH3:NM_001042517:59137723:59138981:−: | FORWARD_Strand |
| | | 1235_1258\|\|E6:chr17:RPS6KB1:NM_003161:55362259:55362317: | |
| | | +:58_33 | |
| 43 | YES | E1:chr17:RPS6KB1:NM_003161:55325224:55325468:+:220_244\|\| | FORWARD_Strand |
| | | E2:chr17:SNF8:NM_007241:44376285:44376336:−: | |
| | | 51_27 | |
| 44 | YES | E27:chr1:NOTCH2:NM_024408:120266781:120266924:−: | FORWARD_Strand |
| | | 119_143\|\|E1:chr1:SEC22B:NM_004892:143807763:143807978: | |
| | | +:215_191 | |
| 45 | NO | E12:chr21:SLC37A1:NM_018964:42852136:42852268:+:111_132\|\| | FORWARD Strand |
| | | E5:chr21:ABCG1:NM_207174:42570073:42570124: | |
| | | +:1_28 | |
| 46 | NO | E3:chr1:SRGAP2:NM_001170637:204623991:204624054:+: | FORWARD Strand |
| | | 45_63\|\|E15:chr1:PRPF3:NM_004698:148588256:148588318: | |
| | | +:1_31 | |
| 47 | NO | E1:chr17:STARD3:NM_001165937:35046858:35047010:+:128_152\|\| | FORWARD Strand |
| | | E7:chr20:DOK5:NM_018431:52693403:52693524: | |
| | | +:1_25 | |
| 48 | NO | E5:chr2:STRADB:NM_018571:202045922:202046044:+:99_122\|\| | FORWARD Strand |
| | | E11:chr2:NOP58:NM_015934:202870346:202870481: | |
| | | +:1_26 | |
| 49 | NO | E1:chr20:SULF2:NM_001161841:45848198:45848767:−: | REVERSE_Strand |
| | | 25_1\|\|E8:chr3:PRICKLE2:NM_198859:64054566:64060641: | |
| | | −:6075_6051 | |
| 50 | NO | E4:chr17:CCDC46:NM_001037325:61115708:61115798:−: | REVERSE Strand |
| | | 67_90\|\|E4:chr17:SUPT4H1:NM_003168:53779547:53779601: | |
| | | −:1_26 | |
| 51 | YES | E1:chr7:TAX1BP1:NM_001079864:27746262:27746413:+:126_151\|\| | FORWARD_Strand |
| | | E2:chr20:AHCY:NM_001161766:32346861:32347052: | |
| | | −:191_168 | |
| 52 | NO | E3:chr10:TIAL1:NM_003252:121337653:121337750:−: | REVERSE_Strand |
| | | 26_1\|\|E2:chr10:C10orf119:NM_024834:121609300:121609386: | |
| | | −:86_63 | |
| 53 | NO | E14:chr17:CDK12:NM_016507:34940382:34944326:+:22_1\|\| | FORWARD_Strand |
| | | E5:chr17:TMEM104:NM_017728:70297933:70298030:+:97_70 | |
| 54 | NO | E5:chr17:TMEM104:NM_017728:70297933:70298030:+:72_97\|\| | FORWARD Strand |
| | | E2:chr17:CDK12:NM_015083:34940409:34944326:+:1_24 | |
| 55 | YES | E3:chr20:TRPC4AP:NM_199368:33129509:33129638:−: | REVERSE_Strand |
| | | 26_1\|\|E7:chr17:MRPL45:NM_032351:33731535:33731709: | |
| | | +:1_21 | |
| 56 | NO | E1:chr8:UBR5:NM_015902:103493576:103493671:−: | REVERSE_Strand |
| | | 26_1\|\|E2:chr8:SLC25A32:NM_030780:104489037:104489188: | |
| | | −:151_128 | |
| 57 | NO | E1:chr17:WIPF2:NM_133264:35629099:35629270:+:148_171\|\| | FORWARD Strand |
| | | E4:chr17:ERBB2:NM_001005862:35104766:35104960: | |
| | | +:1_26 | |
| 58 | NO | E1:chr17:WIPF2:NM_133264:35629099:35629270:+:145_171\|\| | FORWARD Strand |
| | | E5:chr17:ERBB2:NM_001005862:35116768:35116920: | |
| | | +:1_23 | |
| 59 | YES | E20:chr20:ZMYND8:NM_183047:45286376:45286616:−: | REVERSE_Strand |
| | | 23_1\|\|E21:chr20:CEP250:NM_007186:33541876:33542044: | |
| | | +:1_27 | |
| 60 | YES | E20:chr20:ZMYND8:NM_183047:45286376:45286616:−: | REVERSE_Strand |
| | | 27_1\|\|E22:chr20:CEP250:NM_007186:33542451:33542586: | |
| | | +:1_20 | |

| | Total | | Alignment | Orientation of | |
|---|---|---|---|---|---|
| | Read | Alignment Orientation | Orientations | Two Fusion | Fusion between |
| Row | Pairs | Consistency of Two Ends | of Two Ends | Partners | exon boundaries |
| 1 | 72 | YES | f_r | r_r | YES |
| 2 | 30 | YES | f_r | f_f | YES |
| 3 | 421 | YES | f_f | f_r | YES |
| 4 | 18 | YES | f_r | f_f | YES |
| 5 | 23 | YES | f_r | f_f | YES |
| 6 | 10 | YES | f_r | r_r | YES |
| 7 | 1697 | NO\|f_f = \|r_r = 3\|f_r = 1566 | f_r\|r_r | f_f | YES |
| 8 | 13 | YES | f_r | f_f | YES |
| 9 | 28 | YES | r_r | f_r | YES |
| 10 | 11 | YES | f_r | f_f | YES |
| 11 | 64 | YES | f_r | f_f | YES |
| 12 | 33 | YES | f_r | r_r | YES |
| 13 | 91 | YES | f_f | f_r | YES |
| 14 | 20 | YES | f_r | r_r | YES |
| 15 | 31 | YES | f_r | r_r | YES |
| 16 | 31 | YES | f_r | r_r | YES |
| 17 | 25 | YES | f_r | r_r | YES |
| 18 | 13 | YES | r_r | f_r | YES |
| 19 | 23 | YES | r_r | f_r | YES |
| 20 | 154 | YES | f_r | r_r | YES |
| 21 | 24 | YES | f_r | r_r | YES |
| 22 | 25 | YES | f_f | f_r | YES |
| 23 | 25 | YES | f_r | f_f | YES |
| 24 | 16 | YES | f_r | r_r | YES |
| 25 | 29 | YES | f_r | r_r | YES |
| 26 | 54 | YES | r_r | f_r | YES |
| 27 | 23 | YES | f_r | f_f | YES |
| 28 | 16 | YES | f_r | r_r | YES |
| 29 | 18 | YES | f_r | f_f | YES |
| 30 | 12 | YES | r_r | f_r | YES |
| 31 | 106 | YES | f_f | f_r | YES |
| 32 | 15 | YES | r_r | f_r | YES |
| 33 | 13 | YES | f_r | r_r | YES |
| 34 | 45 | YES | f_r | f_f | YES |
| 35 | 22 | YES | f_r | f_f | YES |
| 36 | 58 | YES | f_r | r_r | YES |
| 37 | 16 | YES | f_r | f_f | YES |
| 38 | 14 | YES | f_r | f_f | YES |
| 39 | 102 | YES | r_r | f_r | YES |
| 40 | 11 | YES | f_r | f_f | YES |
| 41 | 11 | YES | f_r | f_f | YES |
| 42 | 25 | YES | f_f | f_r | YES |
| 43 | 162 | YES | f_f | f_r | YES |
| 44 | 22 | YES | f_f | f_r | YES |
| 45 | 20 | YES | f_r | f_f | YES |
| 46 | 22 | YES | f_r | f_f | YES |
| 47 | 21 | YES | f_r | f_f | YES |
| 48 | 10 | YES | f_r | f_f | YES |
| 49 | 26 | YES | f_r | r_r | YES |
| 50 | 17 | YES | f_r | r_r | YES |
| 51 | 54 | YES | f_f | f_r | YES |
| 52 | 12 | YES | f_r | r_r | YES |
| 53 | 10 | YES | f_r | f_f | YES |
| 54 | 10 | YES | f_r | f_f | YES |
| 55 | 27 | YES | r_r | f_r | YES |
| 56 | 28 | YES | f_r | r_r | YES |
| 57 | 66 | YES | f_r | f_f | YES |
| 58 | 66 | YES | f_r | f_f | YES |
| 59 | 189 | YES | r_r | f_r | YES |
| 60 | 189 | YES | r_r | f_r | YES |

| | Number | | Recommended Sequence for |
|---|---|---|---|
| | of Fusion | | Primer Design |
| Row | Isoforms | Description | (SEQ ID NO:) |
| 1 | 1 | Breast Cancer Cell Line | 1 |
| 2 | 1 | Breast Cancer Cell Line | 2 |
| 3 | 1 | Breast Cancer Cell Line | 3 |
| 4 | 1 | Breast Cancer Cell Line | 4 |
| 5 | 1 | Breast Cancer Cell Line | 5 |
| 6 | 1 | Breast Cancer Cell Line | 6 |
| 7 | 1 | Breast Cancer Cell Line | 7 |
| 8 | 1 | Breast Cancer Cell Line | 8 |
| 9 | 1 | Breast Cancer Cell Line | 9 |
| 10 | 1 | Breast Cancer Cell Line | 10 |
| 11 | 1 | Breast Cancer Cell Line | 11 |
| 12 | 1 | Breast Cancer Cell Line | 12 |
| 13 | 1 | Breast Cancer Cell Line | 13 |
| 14 | 1 | Breast Cancer Cell Line | 14 |
| 15 | 2 | Breast Cancer Cell Line | 15 |
| 16 | 2 | Breast Cancer Cell Line | 16 |
| 17 | 1 | Breast Cancer Cell Line | 17 |
| 18 | 1 | Breast Cancer Cell Line | 18 |
| 19 | 1 | Breast Cancer Cell Line | 19 |
| 20 | 1 | Breast Cancer Cell Line | 20 |
| 21 | 1 | Breast Cancer Cell Line | 21 |
| 22 | 1 | Breast Cancer Cell Line | 22 |
| 23 | 1 | Breast Cancer Cell Line | 23 |
| 24 | 1 | Breast Cancer Cell Line | 24 |
| 25 | 1 | Breast Cancer Cell Line | 25 |
| 26 | 1 | Breast Cancer Cell Line | 26 |
| 27 | 1 | Breast Cancer Cell Line | 27 |
| 28 | 1 | Breast Cancer Cell Line | 28 |
| 29 | 1 | Breast Cancer Cell Line | 29 |
| 30 | 1 | Breast Cancer Cell Line | 30 |
| 31 | 1 | Breast Cancer Cell Line | 31 |
| 32 | 1 | Breast Cancer Cell Line | 32 |
| 33 | 1 | Breast Cancer Cell Line | 33 |
| 34 | 1 | Breast Cancer Cell Line | 34 |
| 35 | 2 | Breast Cancer Cell Line | 35 |
| 36 | 1 | Breast Cancer Cell Line | 36 |
| 37 | 1 | Breast Cancer Cell Line | 37 |
| 38 | 1 | Breast Cancer Cell Line | 38 |
| 39 | 1 | Breast Cancer Cell Line | 39 |
| 40 | 1 | Breast Cancer Cell Line | 40 |
| 41 | 1 | Breast Cancer Cell Line | 41 |
| 42 | 1 | Breast Cancer Cell Line | 42 |
| 43 | 1 | Breast Cancer Cell Line | 43 |
| 44 | 1 | Breast Cancer Cell Line | 44 |
| 45 | 1 | Breast Cancer Cell Line | 45 |
| 46 | 2 | Breast Cancer Cell Line | 46 |
| 47 | 1 | Breast Cancer Cell Line | 47 |
| 48 | 1 | Breast Cancer Cell Line | 48 |
| 49 | 1 | Breast Cancer Cell Line | 49 |
| 50 | 1 | Breast Cancer Cell Line | 50 |
| 51 | 1 | Breast Cancer Cell Line | 51 |
| 52 | 1 | Breast Cancer Cell Line | 52 |
| 53 | 2 | Breast Cancer Cell Line | 53 |
| 54 | 2 | Breast Cancer Cell Line | 54 |
| 55 | 1 | Breast Cancer Cell Line | 55 |
| 56 | 1 | Breast Cancer Cell Line | 56 |
| 57 | 2 | Breast Cancer Cell Line | 57 |
| 58 | 2 | Breast Cancer Cell Line | 58 |
| 59 | 2 | Breast Cancer Cell Line | 59 |
| 60 | 2 | Breast Cancer Cell Line | 60 |

TABLE 5

| | Primer 1 | Primer 2 | | |
|---|---|---|---|---|
| | (SEQ | (SEQ | Product | |
| Fusion Gene | ID NO:) | ID NO:) | Size | Cell Line |
| LIMA1->USP22 | 333 | 393 | 86 | BT-20 |
| ACACA->STAC2 | 334 | 394 | 80 | BT-474 |
| ZMYND8->CEP250 | 335 | 395 | 83 | BT-474 |
| isoform 1 | | | | |
| ZMYND8->CEP250 | 336 | 396 | 96 | BT-474 |
| isoform 2 | | | | |
| FAM102A->CIZ1 | 337 | 397 | 84 | BT-474 |
| isoform 1 | | | | |
| FAM102A->CIZ1 | 338 | 398 | 99 | BT-474 |
| isoform 2 | | | | |
| GLB1->CMTM7 | 339 | 399 | 98 | BT-474 |
| STARD3->DOK5 | 340 | 400 | 111 | BT-474 |
| MED1->STXBP4 | 341 | 401 | 94 | BT-474 |
| TRPC4AP->MRPL45 | 342 | 402 | 89 | BT-474 |
| RAB22A->MYO9B | 343 | 403 | 98 | BT-474 |
| PIP4K2B->RAD51C | 344 | 404 | 81 | BT-474 |
| RPS6KB1->SNF8 | 345 | 405 | 82 | BT-474 |
| CTAGE5->SIP1 | 346 | 406 | 80 | HCC1187 |
| MLL5->LHFPL3 | 347 | 407 | 91 | HCC1187 |
| SEC22B->NOTCH2 | 348 | 408 | 97 | HCC1187 |
| PUM1->TRERF1 | 349 | 409 | 90 | HCC1187 |
| EIF3K->CYP39A1 | 350 | 410 | 96 | HCC1395 |
| RAB7A->LRCH3 | 351 | 411 | 100 | HCC1395 |
| SLC37A1->ABCG1 | 352 | 412 | 88 | HCC1428 |
| RNF187->OBSCN | 353 | 413 | 92 | HCC1428 |
| EXOC7->CYTH1 | 354 | 414 | 83 | HCC1599 |
| CYTH1->PRPSAP1 | 355 | 415 | 84 | HCC1599 |
| TAX1BP1->AHCY | 356 | 416 | 91 | HCC1806 |
| BRE->DPYSL5 | 357 | 417 | 97 | HCC1806 |
| CD151->DRD4 | 358 | 418 | 84 | HCC1806 |
| LDLRAD3->TCP11L1 | 359 | 419 | 100 | HCC1806 |
| RFT1->UQCRC2 | 360 | 420 | 99 | HCC1806 |
| NFIA->EHF | 361 | 421 | 92 | HCC1937 |
| GSDMC->PVT1 | 362 | 422 | 95 | HCC1954 |
| INTS1->PRKAR1B | 363 | 423 | 100 | HCC1954 |
| STRADB->NOP58 | 364 | 424 | 98 | HCC1954 |
| PHF20L1->SAMD12 | 365 | 425 | 92 | HCC1954 |
| POLDIP2->BRIP1 | 366 | 426 | 99 | HCC2218 |
| ADAMTS19->SLC27A6 | 367 | 427 | 81 | MCF7 |
| ARFGEF2->SULF2 | 368 | 428 | 98 | MCF7 |
| ATXN7L3->FAM171A2 | 369 | 429 | 100 | MCF7 |
| BCAS4->BCAS3 | 370 | 430 | 82 | MCF7 |
| RPS6KB1->DIAPH3 | 371 | 431 | 83 | MCF7 |
| MYH9->EIF3D | 372 | 432 | 97 | MCF7 |
| GCN1L1->MSI1 | 373 | 433 | 98 | MCF7 |
| SULF2->PRICKLE2 | 374 | 434 | 81 | MCF7 |
| ODZ4->NRG1 | 375 | 435 | 98 | MDA-MB- |
| | | | | 175V-II |
| BRIP1->TMEM49 | 376 | 436 | 91 | MDA-MB- |
| | | | | 361 |
| SUPT4H1->CCDC46 | 377 | 437 | 96 | MDA-MB- |
| | | | | 361 |
| TMEM104->CDK12 | 378 | 438 | 90 | MDA-MB- |
| isoform 1 | | | | 361 |
| TMEM104->CDK12 | 379 | 439 | 87 | MDA-MB- |
| isoform 2 | | | | 361 |
| RIMS2->ATP6V1C1 | 380 | 440 | 80 | MDA-MB- |
| | | | | 436 |
| TIAL1->C10orf119 | 381 | 441 | 80 | MDA-MB- |
| | | | | 436 |
| MECP2->TMLHE | 382 | 442 | 88 | MDA-MB- |
| | | | | 453 |
| ARID1A->MAST2 | 383 | 443 | 120 | MDA-MB- |
| | | | | 468 |
| UBR5->SLC25A32 | 384 | 444 | 95 | MDA-MB- |
| | | | | 468 |
| KLHDC2->SNTB1 | 385 | 445 | 90 | SK-BR-3 |
| ARID1A->WDTC1 | 386 | 446 | 114 | UACC812 |
| WIPF2->ERBB2 | 387 | 447 | 98 | UACC812 |
| isoform 1 | | | | |
| WIPF2->ERBB2 | 388 | 448 | 91 | UACC812 |
| isoform 2 | | | | |
| HDGF->S100A10 | 389 | 449 | 88 | UACC812 |
| PPP1R12B->SNX27 | 390 | 450 | 98 | UACC812 |
| SRGAP2->PRPF3 | 391 | 451 | 92 | UACC812 |
| isoform 1 | | | | |
| SRGAP2->PRPF3 | 392 | 452 | 90 | UACC812 |
| isoform 2 | | | | |

[0053] Among the 55 fusion candidates, 30 were in-frame (Tables 3 and 6). A fusion product was defined as “in frame” when there was no frame shift in the 3′ gene, regardless whether there is single amino acid mutation or single/multiple amino acid insertion at the fusion junction point. The fusion junction point mutations were also listed in Table 6. In addition, the list of fusion transcripts as the result of exhaustive combinations of all transcripts from two partner genes may contain identical fusion products if the differences between the transcripts from the same partner are “fused out.” For example, as shown in FIG. 3D, the fusion transcript of A1-B4 was identical to that of A1-B1, and the fusion transcript of A2-B4 was identical to that of A2-B1. These identical fusion proteins were flagged in the SnowShoes output file (Table 6).

TABLE 6

| # | FUSION | NOTE | Transcripts | In frame | Junction Point Mutations | Boundary Exon 5′ Gene |
|---|---|---|---|---|---|---|
| 1 | ACACA->STAC2 | | NM_198834->NM_198993 | YES | | E49: chr17: 32553565-32553662 |
| 2 | ACACA->STAC2 | | NM_198836->NM_198993 | YES | | E49: chr17: 32553565-32553662 |
| 3 | ACACA->STAC2 | | NM_198837->NM_198993 | YES | | E47: chr17: 32553565-32553662 |
| 4 | ACACA->STAC2 | | NM_198838->NM_198993 | YES | | E48: chr17: 32553565-32553662 |
| 5 | ACACA->STAC2 | | NM_198839->NM_198993 | YES | | E53: chr17: 32553565-32553662 |
| 6 | ADAMTS19->SLC27A6 | | NM_133638->NM_001017372 | | | E1: chr5: 128824001-128824074 |
| 7 | ADAMTS19->SLC27A6 | | NM_133638->NM_014031 | | | E1: chr5: 128824001-128824074 |
| 8 | ARFGEF2->SULF2 | | NM_006420->NM_001161841 | YES | GGT->ACC(G->T) | E1: chr20: 46971681-46971954 |
| 9 | ARFGEF2->SULF2 | | NM_006420->NM_018837 | YES | GGT->ACC(G->T) | E1: chr20: 46971681-46971954 |
| 10 | ARFGEF2->SULF2 | | NM_006420->NM_198596 | YES | GGT->ACC(G->T) | E1: chr20: 46971681-46971954 |
| 11 | ARID1A->MAST2 | | NM_006015->NM_015112 | YES | | E1: chr1: 26895108-26896618 |
| 12 | ARID1A->MAST2 | | NM_139135->NM_015112 | YES | | E1: chr1: 26895108-26896618 |
| 13 | ARID1A->WDTC1 | | NM_006015->NM_015023 | YES | | E1: chr1: 26895108-26896618 |
| 14 | ARID1A->WDTC1 | | NM_139135->NM_015023 | YES | | E1: chr1: 26895108-26896618 |
| 15 | ATXN7L3->FAM171A2 | | NM_001098833->NM_198475 | | | E1: chr17: 39630913-39631055 |
| 16 | ATXN7L3->FAM171A2 | | NM_020218->NM_198475 | | | E1: chr17: 39630913-39631055 |
| 17 | BCAS4->BCAS3 | | NM_001010974->NM_001099432 | | | E1: chr20: 48844873-48845117 |
| 18 | BCAS4->BCAS3 | | NM_001010974->NM_017679 | | | E1: chr20: 48844873-48845117 |
| 19 | BCAS4->BCAS3 | | NM_017843->NM_001099432 | | | E1: chr20: 48844873-48845117 |
| 20 | BCAS4->BCAS3 | | NM_017843->NM_017679 | | | E1: chr20: 48844873-48845117 |
| 21 | BCAS4->BCAS3 | | NM_198799->NM_001099432 | | | E1: chr20: 48844873-48845117 |
| 22 | BCAS4->BCAS3 | | NM_198799->NM_017679 | | | E1: chr20: 48844873-48845117 |
| 23 | BRE->DPYSL5 | | NM_004899->NM_020134 | YES | INSERTION: CAGAAC(QN) | E7: chr2: 28205641-28205751 |
| 24 | BRE->DPYSL5 | | NM_199191->NM_020134 | YES | INSERTION: CAGAAC(QN) | E7: chr2: 28205641-28205751 |
| 25 | BRE->DPYSL5 | | NM_199192->NM_020134 | YES | INSERTION: CAGAAC(QN) | E7: chr2: 28205641-28205751 |
| 26 | BRE->DPYSL5 | | NM_199193->NM_020134 | YES | INSERTION: CAGAAC(QN) | E8: chr2: 28205641-28205751 |
| 27 | BRE->DPYSL5 | | NM_199194->NM_020134 | YES | INSERTION: CAGAAC(QN) | E8: chr2: 28205641-28205751 |
| 28 | BRIP1->TMEM49 | | NM_032043->NM_030938 | | | E3: chr17: 57291938-57292050 |
| 29 | CD151->DRD4 | | NM_001039490->NM_000797 | | | E4: chr11: 826768-826843 |
| 30 | CD151->DRD4 | | NM_004357->NM_000797 | | | E5: chr11: 826768-826843 |
| 31 | CD151->DRD4 | | NM_139029->NM_000797 | | | E5: chr11: 826768-826843 |
| 32 | CD151->DRD4 | | NM_139030->NM_000797 | | | E4: chr11: 826768-826843 |
| 33 | CTAGE5->SIP1 | | NM_005930->NM_001009182 | | | E20: chr14: 38865818-38865977 |
| 34 | CTAGE5->SIP1 | | NM_005930->NM_001009183 | | | E20: chr14: 38865818-38865977 |
| 35 | CTAGE5->SIP1 | | NM_005930->NM_003616 | | | E20: chr14: 38865818-38865977 |
| 36 | CTAGE5->SIP1 | | NM_203354->NM_001009182 | | | E20: chr14: 38865818-38865977 |
| 37 | CTAGE5->SIP1 | | NM_203354->NM_001009183 | | | E20: chr14: 38865818-38865977 |
| 38 | CTAGE5->SIP1 | | NM_203354->NM_003616 | | | E20: chr14: 38865818-38865977 |
| 39 | CTAGE5->SIP1 | | NM_203355->NM_001009182 | | | E19: chr14: 38865818-38865977 |
| 40 | CTAGE5->SIP1 | | NM_203355->NM_001009183 | | | E19: chr14: 38865818-38865977 |
| 41 | CTAGE5->SIP1 | | NM_203355->NM_003616 | | | E19: chr14: 38865818-38865977 |
| 42 | CTAGE5->SIP1 | | NM_203356->NM_001009182 | | | E20: chr14: 38865818-38865977 |
| 43 | CTAGE5->SIP1 | | NM_203356->NM_00100918 | | | E20: chr14: 38865818-38865977 |
| 44 | CTAGE5->SIP1 | | NM_203356->NM_003616 | | | E20: chr14: 38865818-38865977 |
| 45 | CYTH1->PRPSAP1 | | NM_004762->NM_002766 | YES | GAA->TTC(E->F) | E1: chr17: 74289878-74289971 |
| 46 | CYTH1->PRPSAP1 | | NM_017456->NM_002766 | YES | GAA->TTC(E->F) | E1: chr17: 74289878-74289971 |
| 47 | EIF3K->CYP39A1 | | NM_013234->NM_016593 | YES | GCA->TGC(A->C) | E6: chr19: 43815080-43815158 |
| 48 | EXOC7->CYTH1 | | NM_001013839->NM_004762 | YES | GTT->AAC(V->N) | E5: chr17: 71605471-71605694 |
| 49 | EXOC7->CYTH1 | | NM_001013839->NM_017456 | YES | GTT->AAC(V->N) | E5: chr17: 71605471-71605694 |
| 50 | EXOC7->CYTH1 | | NM_001145297->NM_004762 | YES | GTT->AAC(V->N) | E5: chr17: 71605471-71605694 |
| 51 | EXOC7->CYTH1 | | NM_001145297->NM_017456 | YES | GTT->AAC(V->N) | E5: chr17: 71605471-71605694 |
| 52 | EXOC7->CYTH1 | | NM_001145298->NM_004762 | YES | GTT->AAC(V->N) | E5: chr17: 71605471-71605694 |
| 53 | EXOC7->CYTH1 | | NM_001145298->NM_017456 | YES | GTT->AAC(V->N) | E5: chr17: 71605471-71605694 |
| 54 | EXOC7->CYTH1 | | NM_001145299->NM_004762 | YES | GTT->AAC(V->N) | E5: chr17: 71605471-71605694 |
| 55 | EXOC7->CYTH1 | | NM_001145299->NM_017456 | YES | GTT->AAC(V->N) | E5: chr17: 71605471-71605694 |
| 56 | EXOC7->CYTH1 | | NM_015219->NM_004762 | YES | GTT->AAC(V->N) | E5: chr17: 71605471-71605694 |
| 57 | EXOC7->CYTH1 | | NM_015219->NM_017456 | YES | GTT->AAC(V->N) | E5: chr17: 71605471-71605694 |
| 58 | EXOC7->CYTH1 | | NR_028133->NM_004762 | YES | | E4: chr17: 71605471-71605694 |
| 59 | EXOC7->CYTH1 | | NR_028133->NM_017456 | YES | | E4: chr17: 71605471-71605694 |
| 60 | FAM102A->CIZ1 | | NM_001035254-> | | | E1: chr9: 129782091-129782633 |
| | | | NM_001131015 | | | |
| 61 | FAM102A->CIZ1 | | NM_001035254-> | | | E1: chr9: 129782091-129782633 |
| | | | NM_001131015 | | | |
| 62 | FAM102A->CIZ1 | | NM_001035254-> | | | E1: chr9: 129782091-129782633 |
| | | | NM_001131016 | | | |
| 63 | FAM102A->CIZ1 | | NM_001035254-> | | | E1: chr9: 129782091-129782633 |
| | | | NM_001131016 | | | |
| 64 | FAM102A->CIZ1 | | NM_001035254-> | | | E1: chr9: 129782091-129782633 |
| | | | NM_001131017 | | | |
| 65 | FAM102A->CIZ1 | | NM_001035254-> | | | E1: chr9: 129782091-129782633 |
| | | | NM_001131017 | | | |
| 66 | FAM102A->CIZ1 | | NM_001035254-> | | | E1: chr9: 129782091-129782633 |
| | | | NM_001131018 | | | |
| 67 | FAM102A->CIZ1 | | NM_001035254-> | | | E1: chr9: 129782091-129782633 |
| | | | NM_001131018 | | | |
| 68 | FAM102A->CIZ1 | | NM_001035254->NM_012127 | | | E1: chr9: 129782091-129782633 |
| 69 | FAM102A->CIZ1 | | NM_001035254->NM_012127 | | | E1: chr9: 129782091-129782633 |
| 70 | GCN1L1->MSI1 | | NM_006836->NM_002442 | YES | GCC->GGC(A->G) | E2: chr12: 119112483-119112586 |
| 71 | GLB1->CMTM7 | | NM_000404->NM_138410 | YES | | E15: chr3: 33030551-33030806 |
| 72 | GLB1->CMTM7 | | NM_000404->NM_181472 | YES | | E15: chr3: 33030551-33030806 |
| 73 | GLB1->CMTM7 | | NM_001079811->NM_138410 | YES | | E15: chr3: 33030551-33030806 |
| 74 | GLB1->CMTM7 | | NM_001079811->NM_181472 | YES | | E15: chr3: 33030551-33030806 |
| 75 | GLB1->CMTM7 | | NM_001135602->NM_138410 | YES | | E12: chr3: 33030551-33030806 |
| 76 | GLB1->CMTM7 | | NM_001135602->NM_181472 | YES | | E12: chr3: 33030551-33030806 |
| 77 | GSDMC->PVT1 | | NM_031415->NR_003367 | | | E5: chr8: 130844053-130844159 |
| 78 | HDGF-> | | NM_004494->NM_002966 | YES | | E1: chr1: 154987758-154988167 |
| | S100A10 | | | | | |
| 79 | INTS1-> | | NM_001080453-> | YES | | E14: chr7: 1500977-1501055 |
| | PRKAR1B | | NM_001164758 | | | |
| 80 | INTS1->PRKAR1B | | NM_001080453-> | YES | | E14: chr7: 1500977-1501055 |
| | | | NM_001164759 | | | |
| 81 | INTS1->PRKAR1B | | NM_001080453-> | YES | | E14: chr7: 1500977-1501055 |
| | | | NM_001164760 | | | |
| 82 | INTS1->PRKAR1B | | NM_001080453-> | YES | | E14: chr7: 1500977-1501055 |
| | | | NM_001164761 | | | |
| 83 | INTS1->PRKAR1B | | NM_001080453-> | YES | | E14: chr7: 1500977-1501055 |
| | | | NM_001164762 | | | |
| 84 | INTS1->PRKAR1B | | NM_001080453->NM_002735 | YES | | E14: chr7: 1500977-1501055 |
| 85 | KLHDC2->SNTB1 | | NM_014315->NM_021021 | YES | CGG->CCT(R->P) | E12: chr14: 49319009-49319062 |
| 86 | LDLRAD3->TCP11L1 | | NM_174902->NM_001145541 | | | E2: chr11: 36014228-36014375 |
| 87 | LDLRAD3->TCP11L1 | | NM_174902->NM_018393 | | | E2: chr11: 36014228-36014375 |
| 88 | LIMA1->USP22 | | NM_001113546->NM_015276 | YES | | E4: chr12: 48902070-48902535 |
| 89 | LIMA1->USP22 | | NM_016357->NM_015276 | YES | | E4: chr12: 48902070-48902535 |
| 90 | MECP2->TMLHE | | NM_004992->NM_001184797 | | | E2: chrX: 153010835-153010959 |
| 91 | MECP2->TMLHE | | NM_004992->NM_018196 | | | E2: chrX: 153010835-153010959 |
| 92 | MED1->STXBP4 | | NM_004774->NM_178509 | YES | TGT->GGT(C->G) | E1: chr17: 34860816-34861053 |
| 93 | MLL5->LHFPL3 | | NM_018682->NM_199000 | | | E12: chr7: 104509370-104509480 |
| 94 | MLL5->LHFPL3 | | NM_182931->NM_199000 | | | E13: chr7: 104509370-104509480 |
| 95 | MYH9->EIF3D | | NM_002473->NM_003753 | YES | | E1: chr22: 35113797-35114009 |
| 96 | NFIA->EHF | | NM_001134673->NM_012153 | YES | | E2: chr1: 61326408-61326940 |
| 97 | NFIA->EHF | | NM_001145511->NM_012153 | YES | | E2: chr1: 61326408-61326940 |
| 98 | NFIA->EHF | | NM_001145512->NM_012153 | YES | | E3: chr1: 61326408-61326940 |
| 99 | NFIA->EHF | | NM_005595->NM_012153 | YES | | E2: chr1: 61326408-61326940 |
| 100 | ODZ4->NRG1 | | NM_001098816-> | YES | | E12: chr11: 78242796-78243007 |
| | | | NM_001160002 | | | |
| 101 | ODZ4->NRG1 | | NM_001098816-> | YES | | E12: chr11: 78242796-78243007 |
| | | | NM_001160004 | | | |
| 102 | ODZ4->NRG1 | | NM_001098816-> | YES | | E12: chr11: 78242796-78243007 |
| | | | NM_001160005 | | | |
| 103 | ODZ4->NRG1 | | NM_001098816-> | YES | | E12: chr11: 78242796-78243007 |
| | | | NM_001160007 | | | |
| 104 | ODZ4->NRG1 | | NM_001098816-> | YES | | E12: chr11: 78242796-78243007 |
| | | | NM_001160008 | | | |
| 105 | ODZ4->NRG1 | | NM_001098816->NM_004495 | YES | | E12: chr11: 78242796-78243007 |
| 106 | ODZ4->NRG1 | | NM_001098816->NM_013956 | YES | | E12: chr11: 78242796-78243007 |
| 107 | ODZ4->NRG1 | | NM_001098816->NM_013957 | YES | | E12: chr11: 78242796-78243007 |
| 108 | ODZ4->NRG1 | | NM_001098816->NM_013958 | YES | | E12: chr11: 78242796-78243007 |
| 109 | ODZ4->NRG1 | | NM_001098816->NM_013960 | YES | | E12: chr11: 78242796-78243007 |
| 110 | ODZ4->NRG1 | | NM_001098816->NM_013962 | YES | | E12: chr11: 78242796-78243007 |
| 111 | ODZ4->NRG1 | | NM_001098816->NM_013964 | YES | | E12: chr11: 78242796-78243007 |
| 112 | PHF20L1->SAMD12 | | NM_016018->NM_001101676 | YES | GCA->TGC(A->C) | E8: chr8: 133886041-133886167 |
| 113 | PHF20L1->SAMD12 | | NM_032205->NM_001101676 | YES | GCA->TGC(A->C) | E8: chr8: 133886041-133886167 |
| 114 | PHF20L1->SAMD12 | | NM_198513->NM_001101676 | YES | GCA->TGC(A->C) | E7: chr8: 133886041-133886167 |
| 115 | PIP4K2B->RAD51C | | NM_003559->NM_058216 | | | E7: chr17: 34187465-34187579 |
| 116 | POLDIP2->BRIP1 | | NM_015584->NM_032043 | | | E2: chr17: 23706947-23707029 |
| 117 | PPP1R12B->SNX27 | | NM_001167857->NM_030918 | YES | | E1: chr1: 200584452-200584893 |
| 118 | PPP1R12B->SNX27 | | NM_001167858->NM_030918 | YES | | E1: chr1: 200584452-200584893 |
| 119 | PPP1R12B->SNX27 | | NM_002481->NM_030918 | YES | | E1: chr1: 200584452-200584893 |
| 120 | PRPF3->SRGAP2 | | NM_004698->NM_001042758 | | | E8: chr1: 148577259-148577426 |
| 121 | PRPF3->SRGAP2 | | NM_004698->NM_001170637 | | | E8: chr1: 148577259-148577426 |
| 122 | PRPF3->SRGAP2 | | NM_004698->NM_015326 | | | E8: chr1: 148577259-148577426 |
| 123 | PUM1->TRERF1 | | NM_001020658->NM_033502 | | | E20: chr1: 31186584-31186706 |
| 124 | PUM1->TRERF1 | | NM_014676->NM_033502 | | | E20: chr1: 31186584-31186706 |
| 125 | RAB22A->MYO9B | | NM_020673->NM_001130065 | | | E2: chr20: 56319504-56319584 |
| 126 | RAB22A->MYO9B | | NM_020673->NM_004145 | | | E2: chr20: 56319504-56319584 |
| 127 | RAB7A->LRCH3 | | NM_004637->NM_032773 | | | E1: chr3: 129927668-129927892 |
| 128 | RFT1->UQCRC2 | | NM_052859->NM_003366 | YES | | E10: chr3: 53113008-53113153 |
| 129 | RIMS2->ATP6V1C1 | | NM_001100117->NM_001695 | YES | | E1: chr8: 104582151-104582466 |
| 130 | RNF187-> | | NM_001010858-> | | | E2: chr1: 226743283-226743376 |
| | OBSCN | | NM_001098623 | | | |
| 131 | RNF187-> | | NM_001010858->NM_052843 | | | E2: chr1: 226743283-226743376 |
| | OBSCN | | | | | |
| 132 | RPS6KB1-> | | NM_003161->NM_001042517 | | | E6: chr17: 55362259-55362317 |
| | DIAPH3 | | | | | |
| 133 | RPS6KB1->SNF8 | | NM_003161->NM_007241 | YES | | E1: chr17: 55325224-55325468 |
| 134 | SEC22B-> | | NM_004892->NM_024408 | | | E1: chr1: 143807763-143807978 |
| | NOTCH2 | | | | | |
| 135 | SLC37A1-> | | NM_018964->NM_004915 | YES | | E12: chr21: 42852136-42852268 |
| | ABCG1 | | | | | |
| 136 | SLC37A1-> | | NM_018964->NM_016818 | YES | | E12: chr21: 42852136-42852268 |
| | ABCG1 | | | | | |
| 137 | SLC37A1-> | | NM_018964->NM_207174 | YES | | E12: chr21: 42852136-42852268 |
| | ABCG1 | | | | | |
| 138 | SLC37A1-> | | NM_018964->NM_207627 | YES | | E12: chr21: 42852136-42852268 |
| | ABCG1 | | | | | |
| 139 | SLC37A1-> | | NM_018964->NM_207628 | YES | | E12: chr21: 42852136-42852268 |
| | ABCG1 | | | | | |
| 140 | SLC37A1-> | | NM_018964->NM_207629 | YES | | E12: chr21: 42852136-42852268 |
| | ABCG1 | | | | | |
| 141 | SRGAP2-> | | NM_001042758->NM_004698 | YES | | E2: chr1: 204623991-204624054 |
| | PRPF3 | | | | | |
| 142 | SRGAP2-> | | NM_001170637->NM_004698 | YES | | E2: chr1: 204623991-204624054 |
| | PRPF3 | | | | | |
| 143 | SRGAP2-> | | NM_015326->NM_004698 | YES | | E2: chr1: 204623991-204624054 |
| | PRPF3 | | | | | |
| 144 | STARD3->DOK5 | 5′UTR of STARD3 fused into the | NM_001165937->NM_018431 | | | E1: chr17: 35046858-35047010 |
| | | coding region of DOK5 | | | | |
| 145 | STARD3->DOK5 | 5′UTR of STARD3 | NM_001165938-> | | | E1: chr17: 35046858-35047010 |
| | | fused into the coding | NM_018431 | | | |
| | | region of DOK5 | | | | |
| 146 | STARD3->DOK5 | 5′UTR of STARD3 | NM_006804->NM_018431 | | | E1: chr17: 35046858-35047010 |
| | | fused into the coding | | | | |
| | | region of DOK5 | | | | |
| 147 | STRADB->NOP58 | | NM_018571->NM_015934 | YES | | E5: chr2: 202045922-202046044 |
| 148 | SULF2->PRICKLE2 | 5′UTR of SULF2 fused | NM_001161841-> | | | E1: chr20: 45848198-45848767 |
| | | into the coding region of | NM_198859 | | | |
| | | PRICKLE2 | | | | |
| 149 | SULF2->PRICKLE2 | | NM_018837->NM_198859 | | | E21: chr20: 45848198-45848767 |
| 150 | SULF2->PRICKLE2 | 5′UTR of SULF2 fused | NM_198596->NM_198859 | | | E1: chr20: 45848198-45848767 |
| | | into the coding region of | | | | |
| | | PRICKLE2 | | | | |
| 151 | SUPT4H1->CCDC46 | | NM_003168-> | | | E4: chr17: 53779547-53779601 |
| | | | NM_001037325 | | | |
| 152 | SUPT4H1->CCDC46 | | NM_003168->NM_145036 | | | E4: chr17: 53779547-53779601 |
| 153 | TAX1BP1->AHCY | 5′UTR of TAX1BP1 | NM_001079864-> | | | E1: chr7: 27746262-27746413 |
| | | fused into the coding | NM_000687 | | | |
| | | region of AHCY | | | | |
| 154 | TAX1BP1->AHCY | 5′UTR of TAX1BP1 | NM_001079864-> | YES | | E1: chr7: 27746262-27746413 |
| | | fused into the 5′ UTR of | NM_001161766 | | | |
| | | AHCY | | | | |
| 155 | TAX1BP1->AHCY | 5′UTR of TAX1BP1 | NM_006024->NM_000687 | | | E1: chr7: 27746262-27746413 |
| | | fused into the coding | | | | |
| | | region of AHCY | | | | |
| 156 | TAX1BP1->AHCY | 5′UTR of TAX1BP1 | NM_006024-> | YES | | E1: chr7: 27746262-27746413 |
| | | fused into the 5′ UTR of | NM_001161766 | | | |
| | | AHCY | | | | |
| 157 | TIAL1->C10orf119 | | NM_001033925-> | | | E2: chr10: 121337653-121337750 |
| | | | NM_024834 | | | |
| 158 | TIAL1->C10orf119 | | NM_003252->NM_024834 | | | E2: chr10: 121337653-121337750 |
| 159 | TMEM104->CDK12 | | NM_017728->NM_015083 | | | E5: chr17: 70297933-70298030 |
| 160 | TMEM104->CDK12 | | NM_017728->NM_015083 | YES | GAG->CAG(E->Q) | E5: chr17: 70297933-70298030 |
| 161 | TMEM104->CDK12 | | NM_017728->NM_016507 | YES | GCA->CCA(A->P) | E5: chr17: 70297933-70298030 |
| 162 | TMEM104->CDK12 | | NM_017728->NM_016507 | | | E5: chr17: 70297933-70298030 |
| 163 | TRPC4AP->MRPL45 | | NM_015638->NM_032351 | YES | | E2: chr20: 33129509-33129638 |
| 164 | TRPC4AP->MRPL45 | | NM_199368->NM_032351 | YES | | E2: chr20: 33129509-33129638 |
| 165 | UBR5->SLC25A32 | | NM_015902->NM_030780 | | | E1: chr8: 103493576-103493671 |
| 166 | WIPF2->ERBB2 | | NM_133264->NM_001005862 | YES | | E1: chr17: 35629099-35629270 |
| 167 | WIPF2->ERBB2 | | NM_133264->NM_001005862 | YES | | E1: chr17: 35629099-35629270 |
| 168 | WIPF2->ERBB2 | | NM_133264->NM_004448 | | | E1: chr17: 35629099-35629270 |
| 169 | ZMYND8->CEP250 | | NM_012408->NM_007186 | | | E19: chr20: 45286376-45286616 |
| 170 | ZMYND8->CEP250 | | NM_012408->NM_007186 | | | E19: chr20: 45286376-45286616 |
| 170 | ZMYND8->CEP250 | | NM_183047->NM_007186 | | | E19: chr20: 45286376-45286616 |
| 172 | ZMYND8->CEP250 | | NM_183047->NM_007186 | | | E19: chr20: 45286376-45286616 |
| 173 | ZMYND8->CEP250 | | NM_183048->NM_007186 | | | E19: chr20: 45286376-45286616 |
| 174 | ZMYND8->CEP250 | | NM_183048->NM_007186 | | | E19: chr20: 45286376-45286616 |

| | | Fusion Transcript | |
|---|---|---|---|
| | | Coding Sequence | |
| # | Boundary Exon 3′ Gene | (SEQ ID:) | Fusion Protein Sequence (SEQ ID NO: or GenBank Accession No.) |
| 1 | E2: chr17: 34627645-34627952 | 61 | 235 |
| 2 | E2: chr17: 34627645-34627952 | 62 | 236 |
| 3 | E2: chr17: 34627645-34627952 | 63 | 237 |
| 4 | E2: chr17: 34627645-34627952 | 64 | 238 |
| 5 | E2: chr17: 34627645-34627952 | 65 | Identical Fusion Product as in NM_198836->NM_198993 |
| 6 | E8: chr5: 128391936-128392034 | 66 | 239 |
| 7 | E9: chr5: 128391936-128392034 | 67 | Identical Fusion Product as in NM_133638->NM_001017372 |
| 8 | E3: chr20: 45798853-45799093 | 68 | 240 |
| 9 | E3: chr20: 45798853-45799093 | 60 | Identical Fusion Product as in NM_006420->NM_001161841 |
| 10 | E3: chr20: 45798853-45799093 | 70 | 241 |
| 11 | E2: chr1: 46062691-46062839 | 71 | 242 |
| 12 | E2: chr1: 46062691-46062839 | 72 | Identical Fusion Product as in NM_006015->NM_015112 |
| 13 | E4: chr1: 27481316-27481363 | 73 | 243 |
| 14 | E4: chr1: 27481316-27481363 | 74 | Identical Fusion Product as in NM_006015->NM_015023 |
| 15 | E4: chr17: 39789323-39789482 | 75 | 244 |
| 16 | E4: chr17: 39789323-39789482 | 76 | Identical Fusion Product as in NM_001098833->NM_198475 |
| 17 | E24: chr17: 56800469-56800637 | 77 | 245 |
| 18 | E23: chr17: 56800469-56800637 | 78 | Identical Fusion Product as in NM_001010974->NM_001099432 |
| 19 | E24: chr17: 56800469-56800637 | 79 | Identical Fusion Product as in NM_001010974->NM_001099432 |
| 20 | E23: chr17: 56800469-56800637 | 80 | Identical Fusion Product as in NM_001010974->NM_001099432 |
| 21 | E24: chr17: 56800469-56800637 | 81 | Identical Fusion Product as in NM_001010974->NM_001099432 |
| 22 | E23: chr17: 56800469-56800637 | 82 | Identical Fusion Product as in NM_001010974->NM_001099432 |
| 23 | E2: chr2: 26974867-26975132 | 83 | 246 |
| 24 | E2: chr2: 26974867-26975132 | 84 | Identical Fusion Product as in NM_004899->NM_020134 |
| 25 | E2: chr2: 26974867-26975132 | 85 | Identical Fusion Product as in NM_004899->NM_020134 |
| 26 | E2: chr2: 26974867-26975132 | 86 | Identical Fusion Product as in NM_004899->NM_020134 |
| 27 | E2: chr2: 26974867-26975132 | 87 | Identical Fusion Product as in NM_004899->NM_020134 |
| 28 | E10: chr17: 55249854-55249916 | 88 | 247 |
| 29 | E4: chr11: 630400-630703 | 89 | 248 |
| 30 | E4: chr11: 630400-630703 | 90 | Identical Fusion Product as in NM_001039490->NM_000797 |
| 31 | E4: chr11: 630400-630703 | 91 | Identical Fusion Product as in NM_001039490->NM_000797 |
| 32 | E4: chr11: 630400-630703 | 92 | Identical Fusion Product as in NM_001039490->NM_000797 |
| 33 | E9: chr14: 38675394-38675928 | 93 | 249 |
| 34 | E9: chr14: 38675394-38675928 | 94 | Identical Fusion Product as in NM_005930->NM_001009182 |
| 35 | E10: chr14: 38675394-38675928 | 95 | Identical Fusion Product as in NM_005930->NM_001009182 |
| 36 | E9: chr14: 38675394-38675928 | 96 | 250 |
| 37 | E9: chr14: 38675394-38675928 | 97 | Identical Fusion Product as in NM_203354->NM_001009182 |
| 38 | E10: chr14: 38675394-38675928 | 98 | Identical Fusion Product as in NM_203354->NM_001009182 |
| 39 | E9: chr14: 38675394-38675928 | 99 | 251 |
| 40 | E9: chr14: 38675394-38675928 | 100 | Identical Fusion Product as in NM_203355->NM_001009182 |
| 41 | E10: chr14: 38675394-38675928 | 101 | Identical Fusion Product as in NM_203355->NM_001009182 |
| 42 | E9: chr14: 38675394-38675928 | 102 | 252 |
| 43 | E9: chr14: 38675394-38675928 | 103 | Identical Fusion Product as in NM_203356->NM_001009182 |
| 44 | E10: chr14: 38675394-38675928 | 104 | Identical Fusion Product as in NM_203356->NM_001009182 |
| 45 | E3: chr17: 71852346-71852413 | 105 | 253 |
| 46 | E3: chr17: 71852346-71852413 | 106 | Identical Fusion Product as in NM_004762->NM_002766 |
| 47 | E3: chr6: 46715189-46715364 | 107 | 254 |
| 48 | E2: chr17: 74217326-74217409 | 108 | 255 |
| 49 | E2: chr17: 74217326-74217409 | 109 | 256 |
| 50 | E2: chr17: 74217326-74217409 | 110 | Identical Fusion Product as in NM_001013839->NM_004762 |
| 51 | E2: chr17: 74217326-74217409 | 111 | Identical Fusion Product as in NM_001013839->NM_017456 |
| 52 | E2: chr17: 74217326-74217409 | 112 | Identical Fusion Product as in NM_001013839->NM_004762 |
| 53 | E2: chr17: 74217326-74217409 | 113 | Identical Fusion Product as in NM_001013839->NM_017456 |
| 54 | E2: chr17: 74217326-74217409 | 114 | Identical Fusion Product as in NM_001013839->NM_004762 |
| 55 | E2: chr17: 74217326-74217409 | 115 | Identical Fusion Product as in NM_001013839->NM_017456 |
| 56 | E2: chr17: 74217326-74217409 | 116 | Identical Fusion Product as in NM_001013839->NM_004762 |
| 57 | E2: chr17: 74217326-74217409 | 117 | Identical Fusion Product as in NM_001013839->NM_017456 |
| 58 | E2: chr17: 74217326-74217409 | 118 | the entire EXOC7 protein |
| 59 | E2: chr17: 74217326-74217409 | 119 | the entire EXOC7 protein |
| 60 | E4: chr9: 129989962-129990034 | 120 | 257 |
| 61 | E5: chr9: 129987646-129987876 | 121 | 258 |
| 62 | E4: chr9: 129989962-129990034 | 122 | 259 |
| 63 | E5: chr9: 129987646-129987876 | 123 | 260 |
| 64 | E4: chr9: 129989962-129990034 | 124 | 261 |
| 65 | E5: chr9: 129987646-129987876 | 125 | 262 |
| 66 | E17: chr9: 129989962-129990034 | 126 | 263 |
| 67 | E4: chr9: 129987646-129987876 | 127 | Identical Fusion Product as in NM_001035254->NM_001131015 |
| 68 | E4: chr9: 129989962-129990034 | 128 | Identical Fusion Product as in NM_001035254->NM_001131016 |
| 69 | E5: chr9: 129987646-129987876 | 129 | Identical Fusion Product as in NM_001035254->NM_001131016 |
| 70 | E12: chr12: 119269631-119269700 | 130 | 264 |
| 71 | E2: chr3: 32458335-32458509 | 131 | 265 |
| 72 | E2: chr3: 32458335-32458509 | 132 | 266 |
| 73 | E2: chr3: 32458335-32458509 | 133 | 267 |
| 74 | E2: chr3: 32458335-32458509 | 134 | 268 |
| 75 | E2: chr3: 32458335-32458509 | 135 | 269 |
| 76 | E2: chr3: 32458335-32458509 | 136 | 270 |
| 77 | E9: chr8: 129182407-129182681 | 137 | 271 |
| 78 | E2: chr1: 150225198-150225351 | 138 | 272 |
| 79 | E2: chr7: 717491-717690 | 139 | 273 |
| 80 | 140 | | Identical Fusion Product as in NM_001080453->NM_001164758 |
| 81 | 141 | | Identical Fusion Product as in NM_001080453->NM_001164758 |
| 82 | 142 | | Identical Fusion Product as in NM_001080453->NM_001164758 |
| 83 | 143 | | Identical Fusion Product as in NM_001080453->NM_001164758 |
| 84 | 144 | | Identical Fusion Product as in NM_001080453->NM_001164758 |
| 85 | 145 | 274 | |
| 86 | 146 | 275 | |
| 87 | 147 | | Identical Fusion Product as in NM_174902->NM_001145541 |
| 88 | 148 | 276 | |
| 89 | 149 | | Identical Fusion Product as in NM_001113546->NM_015276 |
| 90 | 150 | 277 | |
| 91 | 151 | 278 | |
| 92 | 152 | 279 | |
| 93 | 153 | 280 | |
| 94 | 154 | | Identical Fusion Product as in NM_018682->NM_199000 |
| 95 | 155 | 281 | |
| 96 | 156 | 282 | |
| 97 | 157 | 283 | |
| 98 | 158 | 284 | |
| 99 | 159 | | Identical Fusion Product as in NM_001134673->NM_012153 |
| 100 | 160 | 285 | |
| 101 | 161 | 286 | |
| 102 | 162 | 287 | |
| 103 | 163 | 288 | |
| 104 | 164 | 289 | |
| 105 | E2: chr8: 32572887-32573065 | 165 | 290 |
| 106 | E2: chr8: 32572887-32573065 | 166 | 291 |
| 107 | E2: chr8: 32572887-32573065 | 167 | 292 |
| 108 | E2: chr8: 32572887-32573065 | 168 | 293 |
| 109 | E2: chr8: 32572887-32573065 | 169 | 294 |
| 110 | E2: chr8: 32572887-32573065 | 170 | 295 |
| 111 | E2: chr8: 32572887-32573065 | 171 | 296 |
| 112 | E5: chr8: 119270875-119279152 | 172 | 297 |
| 113 | E5: chr8: 119270875-119279152 | 173 | Identical Fusion Product as in NM_016018->NM_001101676 |
| 114 | E5: chr8: 119270875-119279152 | 174 | 298 |
| 115 | E7: chr17: 54156399-54156460 | 175 | 299 |
| 116 | E17: chr17: 57148093-57148206 | 176 | 300 |
| 117 | E8: chr1: 149922455-149922545 | 177 | 301 |
| 118 | E8: chr1: 149922455-149922545 | 178 | Identical Fusion Product as in NM_001167857->NM_030918 |
| 119 | E8: chr1: 149922455-149922545 | 179 | Identical Fusion Product as in NM_001167857->NM_030918 |
| 120 | E3: chr1: 204632668-204632884 | 180 | 302 |
| 121 | E3: chr1: 204632668-204632884 | 181 | Identical Fusion Product as in NM_004698->NM_001042758 |
| 122 | E3: chr1: 204632668-204632884 | 182 | Identical Fusion Product as in NM_004698->NM_001042758 |
| 123 | E5: chr6: 42343869-42345564 | 183 | 303 |
| 124 | E5: chr6: 42343869-42345564 | 184 | Identical Fusion Product as in NM_001020658->NM_033502 |
| 125 | E3: chr19: 17117206-17117301 | 185 | 304 |
| 126 | E3: chr19: 17117206-17117301 | 186 | Identical Fusion Product as in NM_020673->NM_001130065 |
| 127 | E16: chr3: 199076690-199076739 | 187 | 305 |
| 128 | E9: chr16: 21890346-21890442 | 188 | 306 |
| 129 | E9: chr8: 104144358-104144451 | 189 | 307 |
| 130 | E77: chr1: 226605164-226605267 | 190 | 308 |
| 131 | E77: chr1: 226605164-226605267 | 191 | Identical Fusion Product as in NM_001010858-> |
| | | | NM_001098623 |
| 132 | E28: chr13: 59137723-59138981 | 192 | 309 |
| 133 | E2: chr17: 44376285-44376336 | 193 | 310 |
| 134 | E27: chr1: 120266781-120266924 | 194 | 311 |
| 135 | E5: chr21: 42570073-42570124 | 195 | 312 |
| 136 | E5: chr21: 42570073-42570124 | 196 | 313 |
| 137 | E5: chr21: 42570073-42570124 | 197 | Identical Fusion Product as in NM_018964->NM_016818 |
| 138 | E6: chr21: 42570073-42570124 | 198 | Identical Fusion Product as in NM_018964->NM_016818 |
| 139 | E7: chr21: 42570073-42570124 | 199 | Identical Fusion Product as in NM_018964->NM_016818 |
| 140 | E5: chr21: 42570073-42570124 | 200 | Identical Fusion Product as in NM_018964->NM_016818 |
| 141 | E15: chr1: 148588256-148588318 | 201 | 314 |
| 142 | E15: chr1: 148588256-148588318 | 202 | Identical Fusion Product as in NM_001042758->NM_004698 |
| 143 | E15: chr1: 148588256-148588318 | 203 | Identical Fusion Product as in NM_001042758->NM_004698 |
| 144 | E7: chr20: 52693403-52693524 | 204 | 315 |
| 145 | E7: chr20: 52693403-52693524 | 205 | Identical Fusion Product as in NM_001165937->NM_018431 |
| 146 | E7: chr20: 52693403-52693524 | 206 | Identical Fusion Product as in NM_001165937->NM_018431 |
| 147 | E11: chr2: 202870346-202870481 | 207 | 316 |
| 148 | E8: chr3: 64054566-64060641 | 208 | 317 |
| 149 | E8: chr3: 64054566-64060641 | 209 | 318 |
| 150 | E8: chr3: 64054566-64060641 | 210 | Identical Fusion Product as in NM_001161841->NM_198859 |
| 151 | E4: chr17: 61115708-61115798 | 211 | 319 |
| 152 | E24: chr17: 61115708-61115798 | 212 | Identical Fusion Product as in NM_003168->NM_001037325 |
| 153 | E2: chr20: 32346861-32347052 | 213 | 320 |
| 154 | E2: chr20: 32346861-32347052 | 214 | 321 |
| 155 | E2: chr20: 32346861-32347052 | 215 | Identical Fusion Product as in NM_001079864->NM_000687 |
| 156 | E2: chr20: 32346861-32347052 | 216 | Identical Fusion Product as in NM_001079864->NM_001161766 |
| 157 | E2: chr10: 121609300-121609386 | 217 | 322 |
| 158 | E2: chr10: 121609300-121609386 | 218 | Identical Fusion Product as in NM_001033925->NM_024834 |
| 159 | E1: chr17: 34940382-34944326 | 219 | 323 |
| 160 | E14: chr17: 34940409-34944326 | 220 | 324 |
| 161 | E14: chr17: 34940382-34944326 | 221 | 325 |
| 162 | E1: chr17: 34940409-34944326 | 222 | Identical Fusion Product as in NM_017728->NM_015083 |
| 163 | E7: chr17: 33731535-33731709 | 223 | 326 |
| 164 | E7: chr17: 33731535-33731709 | 224 | Identical Fusion Product as in NM_015638->NM_032351 |
| 165 | E2: chr8: 104489037-104489188 | 225 | 327 |
| 166 | E4: chr17: 35104766-35104960 | 226 | 328 |
| 167 | E5: chr17: 35116768-35116920 | 227 | Identical Fusion Product as in NM_133264->NM_001005862 |
| 168 | E2: chr17: 35116768-35116920 | 228 | 329 |
| 169 | E21: chr20: 33541876-33542044 | 229 | 330 |
| 170 | E22: chr20: 33542451-33542586 | 230 | Identical Fusion Product as in NM_012408->NM_007186 |
| 171 | E21: chr20: 33541876-33542044 | 231 | Identical Fusion Product as in NM_012408->NM_007186 |
| 172 | E22: chr20: 33542451-33542586 | 232 | Identical Fusion Product as in NM_012408->NM_007186 |
| 173 | E21: chr20: 33541876-33542044 | 233 | 331 |
| 174 | E22: chr20: 33542451-33542586 | 234 | 332 |

### Fusion Genes Identified in MCF7 Cancer Cell Line

[0054] Fusion gene products in the MCF7 cell line had been previously described using a paired end sequencing protocol. The list of fusion transcripts identified in MCF7 cancer cell line using SnowShoes-FTD as described herein was compared to the list of transcripts described elsewhere (Maher et al., Proc. Natl. Acad. Sci. USA, 106(30):12353-8 (2009)). The SnowShoes-FTD identified and validated 5 novel fusion transcripts that were not reported by Maher et al.: ADAMTS19-SLC27A6, ATXN7L3-FAM171A2, GCN1L1-MSI1, MYH9-EIF3D, and RPS6KB1-DIAPH3. In addition, there were 5 fusion genes identified by Maher et al. that were not detected by SnowShoes-FTD: ARHGAP19-DRG1, BC017255-TMEM49, PAPOLA-AK7, AHCYL1-RAD51C, and FCHOL-MYO9B. It was found that (i) BC017255 was no longer in the RefSeq RNA database and (ii) the distance between PAPOLA-AK7 is 65 Kb which is smaller than the default setting of 100 Kb. In addition, no fusion junction spanning reads were observed to support this fusion. Therefore, this fusion transcript would only have been detected with a different distance threshold and by reducing the default for fusion spanning reads to 0. (iii) There are no junction spanning reads in the data set for AHCYL1-RAD51C although 10 fusion encompassing reads supporting the existence of this fusion transcript were found. (iv) There was only one fusion junction spanning read for FCHOL-MYO9B, and the default setting for SnowShoes-FTD was “at least two unique junction spanning reads.” On the other hand, no evidence was found in support of an ARHGAP19-DRG1 fusion, as the alignment file (SAM file) did not contain any read pairs that mapped to both of these genes. When RT-PCR was performed using the PCR primers provided by Maher et al. (FIG. 5), the results also supported the existence of the fusion products BC017255-TMEM49, PAPOLA-AK7, AHCYL1-RAD51C, and FCHOL-MYO9B, while no PCR product was observed for the ARHGAP19-DRG1 fusion. Thus, 4 out of 5 “known” fusion transcripts that were not identified by SnowShoes-FTD were explained by differences in the RefSeq database used for the analyses or by the choice of parameter settings for the various filtering steps. The ARHGAP19-DRG1 fusion transcript reported by Maher et al. did not appear to be expressed in the MCF7 cells that were obtained from ATCC and used in this study.

[0055] Edgren et al. (Genome Biol., 12(1):R6 (2011)) reported on detection of fusion transcripts in four breast cancer cell lines, including MCF7 in which three fusion transcripts were validated. The work described herein detected eight fusion transcripts in MCF, including two of the three reported by Edgren et al. (BCAS4_BCAS3 and ARFGEF2_SULF2).

### Pathway Analysis of Genes Involved in Fusion Transcripts in Breast Cancer Cell Lines

[0056] There were a total of 105 fusion partner genes from the 55 fusion candidates, among which 58 genes formed in-frame fusion transcripts of 30 chimeric RNAs. Pathway and regulatory network analyses of these 58 genes were performed using MetaCore (GeneGo Inc., San Diego, Calif.). There were two pathways that are enriched among these 58 genes: the non-genomic action of androgen receptor and ligand-independent activation of ESR1 and ESR2. Three GeneGo process networks were significantly enriched: androgen receptor signaling cross-talk, ESR1-nuclear pathway, and FGF/ERBB signaling. This observation suggests that fusion transcripts may have functional significance in signal transduction in breast cancer cells.

Structural Analysis of Fusion Transcripts Suggests a Preponderance of ‘Promoter Swap’ Mutations, One of which May Represent a Novel Mechanism for ERBB2 Overexpression

[0057] The analytical power of the SnowShoes-FTD pipeline lies in part in the very low false detection rate and in very large part in the downstream features that predict the structure of the hypothetical fusion transcripts and the amino acid sequence of the resultant translation products. Such analyses indicated that the nature of the fusion transcripts that were detected in breast cancer cells is strikingly non-random, as evidenced by the fact that 23 of the 60 confirmed chimeric transcripts result from fusion of exon 1 of the 5′/upstream partners to the 3′/downstream partners. The most probable cause of such chimeric RNAs is a genomic rearrangement that results in juxtaposition of a promoter that potentially alters the level of expression and/or the regulation of the downstream partner in response to changes in the cellular environment. In addition, all of the fusion transcripts that were reported and validated herein map precisely to exon/exon junctions between the upstream and downstream fusion partners, suggesting that such transcripts are processed. There were only five additional fusion transcripts in which the fusion junction points were in the middle of exons (detected with different parameter settings for SnowShoes-FTD). About half of the fusion events were in frame and therefore predicted to encode fusion proteins. The preponderance of such events in these samples suggests that some of the fusion transcripts may convey a growth advantage, such that transcript enrichment results from selection. For example, MDA-MB-468 cells express an ARID 1A_MAST2 fusion transcript (FIG. 4A) that might result from translocation without inversion of the ARID1A promoter (1p36.11) to the more centromeric MAST2 locus (1p34.1). Alternatively, this fusion transcript might result from interstitial deletion of those portions of chromosome 1 that intervene between exon 1 of ARID1A (coordinates 26896618) and exon 2 of MAST2 (coordinates 46062691). Juxtaposition of the ARID1A promoter would place control of MAST2, which is downstream of the RB1 pathway, as evidenced by the preponderance of E2F sites in the ARID1A promoter and by the observation that ARID1A is regulated in a cell cycle-dependent manner (Nagl et al., Embo J., 26(3):752-63 (2007)). Using SnowShoes-FTD, it was predicted that in-frame fusion between ARID1A exon 1 and MAST2 exon 3 will give rise to a chimeric transcript with a predicted open reading frame of 2118 amino acids. The N-terminal 378 amino acids of this hypothetical fusion protein were derived from ARID1A and appeared to contain no known or predicted functional domain. Conversely, the C-terminal 1740 amino acids were derived from MAST2 and contained the protein kinase, AGC kinase, and PDZ domains of the parental protein. It was likely that this fusion protein has serine/threonine kinase activity. Whether loss of the N-terminal 58 amino acids from MAST2, insertion of the 378 amino acid N-terminus of ARID1A, or aberrant expression of MAST2 driven from the ARID1A promoter conveyed novel oncogenic potential remains to be determined.

[0058] The level of exon expression of the fusion transcript was examined. As shown in FIG. 4A, exon 1 expression of MAST2 was significantly lower than the other exons (exon 2-29), which might be due to the fact the exon 1 was fused out. However, there were no obvious expression differences between the exons of the ARID1A gene. The most provocative chimeric transcript that was detected involves fusion of the WIPF2 and ERBB2 RNAs. Two isoforms of the fusion were predicted and validated. These chimeric transcripts were expressed in UACC812 cells, which were derived from a HER2+ tumor (Meltzer et al., Br. J. Cancer, 63(5):727-35 (1991)). The WIPF2 locus (also known as WIRE) is located at chr17q21.2 and is transcribed towards the telomere. ERBB2 is located at chr17q11.2, centromeric to WIPF2. Like WIPF2, ERBB2 is transcribed towards the telomere. It was therefore probable that this fusion transcript arose as a result of translocation without inversion of the WIPF2 promoter to give rise to two in-frame transcripts in which the 5′ untranslated region of WIPF2 is fused to one of several 5′ untranslated exons of ERBB2 (FIG. 4B). The genomic structure of this hypothetical translocation remains to be verified, but the net result of such an event would be to place ERBB2 expression under control of a promoter that appears, from analysis of potential transcription factor binding sites in the WIPF2 5′ flanking region, to be susceptible to regulation by NFκB, NOTCH, and MYC signaling. This hypothetical promoter swap may account, at least in part, for the observation that ERBB2 transcripts account for about 12,632 tags per million total tags, as determined from the mRNA-Seq data, which translates to about 1.3% of the total polyA+ mRNA pool in UACC812 cells. The observation that there was a dramatic increase in ERBB2 exon expression at the fusion junction (FIG. 4B) is consistent with this hypothesis.

SnowShoes-FTD Predicted Two WIPF2 ERBB2 Fusion Junctions which were Verified in UACC812 Cells

[0059] WIPF2 chromosomal coordinates 35629270 fused to ERBB2 coordinates 35104766 or 35116768. The latter coordinates fell within the coding sequence of one of the RefSeq variants of ERBB2 mRNA (exon 2 of NM_{—}004448) and would introduce a frame shift mutation in that variant (FIG. 4B). However, two of the three predicted fusion sequences (comprised of exon 1 of WIPF2 NM_{—}133264 fused to exon 4 or 5 of ERBB2 NM_{—}001005862) would produce transcripts that encode full length ERBB2 protein (FIG. 4B). The sequence of full length transcripts from mRNA-Seq data was not determined at this time. It might be necessary to clone and sequence longer cDNA fragments that correspond to the first few hundred nucleotides of the fusion transcript in order to determine which of the hypothetical transcripts are expressed. When the exon expression levels of ERBB2 were examined, exons 1-4 were found to be substantially less abundant than downstream exons, suggesting that the transcript with the first 4 exons of ERBB2 fused out might be the more plausible fusion product. These results may indicate that a novel mechanism accounts for ERBB2 overexpression in HER2+ breast cancer.

### Example 2

### Detection of Redundant Fusion Transcripts in Primary Breast Tumors

### Paired-End RNA-Seq Analysis

[0060] Total RNA was prepared from 8 each fresh frozen estrogen receptor positive (ER+), ERBB2 enriched (HER2+), and triple negative (TN) breast tumors. Tumors were macrodissected to remove normal tissue. RNA quality was determined using an Agilent Bioanalyzer (RIN>7.9 for all samples), and cDNA libraries were prepared and sequenced (50 nt paired-end) on the Illumina GAIIx, as described elsewhere (Sun et al., PLoS ONE, 6:e17490 (2011)) to a depth of 20-50 M end pairs per sample (Table 7). The quantity of the fusion transcripts were calculated as the number of fusion encompassing reads per million aligned reads. Normal tissue mRNA-Seq data (50-base paired-end, 73-80 million read pairs per sample) from the Body Map 2.0 project were obtained from ArrayExpress (http://www.ebi.ac.uk/arrayexpress, query ID: E-MTAB-513). Paired-end sequence data from non-transformed human mammary epithelial cells (Asmann et al. Nucleic Acids Res., 39(15):e100 (2011)) were re-analyzed as described herein.

TABLE 7
Alignment summaries for individual tumors.

| | | | | One | | | |
|---|---|---|---|---|---|---|---|
| | | Both | | End Mapped | One End | One End | |
| | | Ends | | to Junction, the | Mapped to | Mapped to | |
| | Total | Mapped | Both Ends | Other End | Genome, the | Junction, the | |
| Tumor | Number of | to Exon | Mapped to | Mapped to | Other End Not | Other End | |
| ID | Read Pairs | Junctions | Genome | Genome | Mapped | Not Mapped | Sample Description |
| s_25 | 19,633,880 | 782,526 | 11,349,512 | 2,298,248 | 1,098,701 | 162,327 | HER2+ Breast Tumor |
| s_26 | 19,510,963 | 742,955 | 11,691,267 | 2,660,440 | 830,003 | 134,309 | HER2+ Breast Tumor |
| s_27 | 19,965,809 | 862,416 | 11,681,914 | 3,022,891 | 958,518 | 167,122 | HER2+ Breast Tumor |
| s_28 | 19,326,720 | 729,475 | 11,350,258 | 2,709,067 | 942,473 | 146,291 | HER2+ Breast Tumor |
| s_29 | 19,287,844 | 668,668 | 10,136,081 | 2,644,347 | 1,427,405 | 181,342 | HER2+ Breast Tumor |
| s_30 | 19,872,605 | 806,772 | 11,013,118 | 2,943,293 | 1,426,803 | 249,954 | HER2+ Breast Tumor |
| s_31 | 17,399,880 | 662,680 | 9,975,682 | 2,409,195 | 811,389 | 122,519 | HER2+ Breast Tumor |
| s_32 | 19,167,067 | 804,355 | 10,062,209 | 2,874,016 | 1,040,725 | 179,568 | HER2+ Breast Tumor |
| s_33 | 52,989,065 | 1,442,285 | 32,211,986 | 6,370,244 | 2,926,974 | 384,138 | ER+ Breast Tumor |
| s_34 | 47,666,820 | 1,481,381 | 28,330,271 | 6,340,808 | 3,099,048 | 455,741 | ER+ Breast Tumor |
| s_35 | 49,814,344 | 1,598,163 | 27,010,487 | 6,074,822 | 5,687,392 | 859,744 | ER+ Breast Tumor |
| s_36 | 50,734,654 | 1,349,033 | 23,322,513 | 5,046,612 | 8,806,497 | 1,335,350 | ER+ Breast Tumor |
| s_37 | 52,954,073 | 1,887,348 | 27,674,967 | 6,846,678 | 5,605,759 | 977,738 | ER+ Breast Tumor |
| s_38 | 51,724,496 | 2,235,084 | 27,914,085 | 8,148,819 | 2,675,758 | 465,731 | ER+ Breast Tumor |
| s_39 | 51,548,133 | 1,833,333 | 28,399,341 | 6,920,007 | 2,742,863 | 435,097 | ER+ Breast Tumor |
| s_40 | 44,112,005 | 1,916,730 | 25,100,264 | 6,332,273 | 2,451,822 | 418,968 | ER+ Breast Tumor |
| s_41 | 21,550,821 | 1,060,261 | 11,731,299 | 4,208,639 | 749,366 | 152,413 | Normal Breast Primary |
| | | | | | | | Culture |
| s_42 | 21,353,151 | 1,094,923 | 11,523,049 | 3,743,587 | 943,898 | 157,786 | Normal Breast Primary |
| | | | | | | | Culture |
| s_43 | 20,924,924 | 1,045,589 | 11,120,605 | 4,111,792 | 771,947 | 152,238 | Normal Breast Primary |
| | | | | | | | Culture |
| s_44 | 22,510,790 | 1,149,387 | 12,209,115 | 4,544,155 | 678,941 | 143,978 | Normal Breast Primary |
| | | | | | | | Culture |
| s_45 | 21,057,269 | 958,317 | 11,470,882 | 3,815,264 | 735,812 | 139,739 | Normal Breast Primary |
| | | | | | | | Culture |
| s_46 | 24,033,748 | 1,146,880 | 13,264,678 | 4,594,952 | 887,587 | 169,999 | Normal Breast Primary |
| | | | | | | | Culture |
| s_47 | 21,682,601 | 1,083,301 | 11,919,091 | 3,769,336 | 907,219 | 178,754 | Normal Breast Primary |
| | | | | | | | Culture |
| s_48 | 20,257,198 | 945,339 | 11,137,380 | 3,802,035 | 754,667 | 143,117 | Normal Breast Primary |
| | | | | | | | Culture |
| s_49 | 27,742,773 | 1,194,950 | 14,219,774 | 3,643,071 | 1,802,090 | 281,820 | Triple Negative Breast |
| | | | | | | | Tumor |
| s_50 | 26,038,478 | 922,741 | 15,502,762 | 3,686,465 | 1,091,731 | 155,837 | Triple Negative Breast |
| | | | | | | | Tumor |
| s_51 | 25,538,716 | 1,110,680 | 13,090,688 | 4,133,936 | 1,939,284 | 357,700 | Triple Negative Breast |
| | | | | | | | Tumor |
| s_52 | 22,224,358 | 773,848 | 12,782,913 | 3,121,694 | 937,044 | 139,107 | Triple Negative Breast |
| | | | | | | | Tumor |
| s_53 | 21,271,234 | 1,123,178 | 10,145,277 | 4,547,699 | 1,580,560 | 343,052 | Triple Negative Breast |
| | | | | | | | Tumor |
| s_54 | 25,238,796 | 724,527 | 12,992,429 | 2,910,508 | 2,842,085 | 329,963 | Triple Negative Breast |
| | | | | | | | Tumor |
| s_55 | 22,588,795 | 733,892 | 12,319,173 | 3,006,438 | 1,913,594 | 263,909 | Triple Negative Breast |
| | | | | | | | Tumor |
| s_56 | 28,685,711 | 966,103 | 15,650,142 | 3,271,160 | 1,834,194 | 228,476 | Triple Negative Breast |
| | | | | | | | Tumor |
| s_25 | 100.00% | 3.99% | 57.81% | 11.71% | 5.60% | 0.83% | HER2+ Breast Tumor |
| s_26 | 100.00% | 3.81% | 59.92% | 13.64% | 4.25% | 0.69% | HER2+ Breast Tumor |
| s_27 | 100.00% | 4.32% | 58.51% | 15.14% | 4.80% | 0.84% | HER2+ Breast Tumor |
| s_28 | 100.00% | 3.77% | 58.73% | 14.02% | 4.88% | 0.76% | HER2+ Breast Tumor |
| s_29 | 100.00% | 3.47% | 52.55% | 13.71% | 7.40% | 0.94% | HER2+ Breast Tumor |
| s_30 | 100.00% | 4.06% | 55.42% | 14.81% | 7.18% | 1.26% | HER2+ Breast Tumor |
| s_31 | 100.00% | 3.81% | 57.33% | 13.85% | 4.66% | 0.70% | HER2+ Breast Tumor |
| s_32 | 100.00% | 4.20% | 52.50% | 14.99% | 5.43% | 0.94% | HER2+ Breast Tumor |
| s_33 | 100.00% | 2.72% | 60.79% | 12.02% | 5.52% | 0.72% | ER+ Breast Tumor |
| s_34 | 100.00% | 3.11% | 59.43% | 13.30% | 6.50% | 0.96% | ER+ Breast Tumor |
| s_35 | 100.00% | 3.21% | 54.22% | 12.19% | 11.42% | 1.73% | ER+ Breast Tumor |
| s_36 | 100.00% | 2.66% | 45.97% | 9.95% | 17.36% | 2.63% | ER+ Breast Tumor |
| s_37 | 100.00% | 3.56% | 52.26% | 12.93% | 10.59% | 1.85% | ER+ Breast Tumor |
| s_38 | 100.00% | 4.32% | 53.97% | 15.75% | 5.17% | 0.90% | ER+ Breast Tumor |
| s_39 | 100.00% | 3.56% | 55.09% | 13.42% | 5.32% | 0.84% | ER+ Breast Tumor |
| s_40 | 100.00% | 4.35% | 56.90% | 14.35% | 5.56% | 0.95% | ER+ Breast Tumor |
| s_41 | 100.00% | 4.92% | 54.44% | 19.53% | 3.48% | 0.71% | Normal Breast Primary |
| | | | | | | | Culture |
| s_42 | 100.00% | 5.13% | 53.96% | 17.53% | 4.42% | 0.74% | Normal Breast Primary |
| | | | | | | | Culture |
| s_43 | 100.00% | 5.00% | 53.15% | 19.65% | 3.69% | 0.73% | Normal Breast Primary |
| | | | | | | | Culture |
| s_44 | 100.00% | 5.11% | 54.24% | 20.19% | 3.02% | 0.64% | Normal Breast Primary |
| | | | | | | | Culture |
| s_45 | 100.00% | 4.55% | 54.47% | 18.12% | 3.49% | 0.66% | Normal Breast Primary |
| | | | | | | | Culture |
| s_46 | 100.00% | 4.77% | 55.19% | 19.12% | 3.69% | 0.71% | Normal Breast Primary |
| | | | | | | | Culture |
| s_47 | 100.00% | 5.00% | 54.97% | 17.38% | 4.18% | 0.82% | Normal Breast Primary |
| | | | | | | | Culture |
| s_48 | 100.00% | 4.67% | 54.98% | 18.77% | 3.73% | 0.71% | Normal Breast Primary |
| | | | | | | | Culture |
| s_49 | 100.00% | 4.31% | 51.26% | 13.13% | 6.50% | 1.02% | Triple Negative Breast |
| | | | | | | | Tumor |
| s_50 | 100.00% | 3.54% | 59.54% | 14.16% | 4.19% | 0.60% | Triple Negative Breast |
| | | | | | | | Tumor |
| s_51 | 100.00% | 4.35% | 51.26% | 16.19% | 7.59% | 1.40% | Triple Negative Breast |
| | | | | | | | Tumor |
| s_52 | 100.00% | 3.48% | 57.52% | 14.05% | 4.22% | 0.63% | Triple Negative Breast |
| | | | | | | | Tumor |
| s_53 | 100.00% | 5.28% | 47.69% | 21.38% | 7.43% | 1.61% | Triple Negative Breast |
| | | | | | | | Tumor |
| s_54 | 100.00% | 2.87% | 51.48% | 11.53% | 11.26% | 1.31% | Triple Negative Breast |
| | | | | | | | Tumor |
| s_55 | 100.00% | 3.25% | 54.54% | 13.31% | 8.47% | 1.17% | Triple Negative Breast |
| | | | | | | | Tumor |
| s_56 | 100.00% | 3.37% | 54.56% | 11.40% | 6.39% | 0.80% | Triple Negative Breast |
| | | | | | | | Tumor |

### Identification of Fusion Transcripts

[0061] End pairs were aligned to human genome build 36 using Burrows-Wheeler Aligner (BWA) (Li and Durbin, Bioinformatics, 25:1754-60 (2009)). The aligned SAM files were sorted according to read IDs using SAMtools (Li et al., Bioinformatics, 25:2078-9 (2009)). The fusion transcripts were identified using SnowShoes-FTD (Asmann et al. Nucleic Acids Res., 39(15):e100 (2011)) version 2.0, which has higher sensitivity without increasing false discovery rate, compared to version 1.0.

### Fusion Encompassing Versus Fusion Spanning Reads

[0062] Fusion encompassing reads (Maher et al., Proc. Natl. Acad. Sci. USA, 106(30):12353-8 (2009)) contained 50 nucleotides from each end which map to different fusion partners. Fusion spanning reads included one end that maps within one of the two fusion partners and a second end that spans the junction between the two different fusion partners. Sentinel fusion transcripts were defined as those detected in a single tumor with 3 or more unique, tiling fusion encompassing read pairs plus 2 or more unique, tiling fusion spanning reads. Moreover, alignment of these reads must allow unambiguous assignment of directionality (5′ to 3′) of the two fusion partners. The initial analysis of fusion transcripts in breast cancer cell lines indicated that sentinel transcripts are predicted with very high accuracy. See, Example 1. A select subset of sentinel transcripts from the breast tumors was validated.

### Private Versus Redundant Fusion Transcripts

[0063] A private fusion transcript was detected in only one tumor sample. All private transcripts, by definition, had sentinel properties. Redundant transcripts were detected in two or more tumors. A redundant transcript must exhibit sentinel properties in at least one tumor.

### Tumor-Specific Fusion Transcripts

[0064] Fusion transcripts in breast tumors were filtered to remove all candidates that were also detected in either one of the control datasets: the HMEC or Body Map data. This approach was based on the assumption that such candidates represent either annotation or alignment errors or arise from germ line rearrangement polymorphisms (Hillmer et al., Genome Res., 21:665-75 (2011)).

### Results

[0065] 131 sentinel fusion transcripts were detected in 24 tumors (Table 8). The majority of the fusion transcripts arose from interchromosomal fusions (104/131). Six fusion transcripts were expressed as multiple isoforms in tumors (labeled with a “+” in Table 8). The majority of the fusion transcripts were ‘private’, expressed in only one tumor sample. However, 45 sentinel transcripts were redundant, as evidenced by detection in two or more tumors (labeled with a “$” in Table 8). Redundancy was dependent upon depth of sequence. Therefore, some of the private transcripts could emerge as redundant if greater depth of sequence were obtained.

TABLE 8
Fusion transcripts in primary breast cancers.

| | | | | | | | | | | # titling Junction | |
|---|---|---|---|---|---|---|---|---|---|---|---|
| | | | | | Potential | | | | # unique Titling | Reads in | |
| | | Fusion pair | FUSION GENE | | Fusion | | | | Junction Reads in all | current | |
| Row # | Sample | Alphabetical | directional | Type | Mechanism | Fusion Strand | Total pairs | Exon Boundary Fusion | Samples | sample | SEQ ID NO: |
| 1*/$ | s_56 | AATK_USP32 | AATK->USP32 | intra- | D OR T | − | 0.23902 | YES | 4 | 3 | 453 |
| | | | | chr | | | | | | | |
| 2$ | s_55 | AATK_USP32 | AATK->USP32 | intra- | D OR T | − | 0.11663 | YES | 4 | 1 | 454 |
| | | | | chr | | | | | | | |
| 3* | s_26 | ABCA10_TP53I13 | TP53I13-> | intra- | I AND (D | + | 0.16049 | YES | 2 | 2 | 455 |
| | | | ABCA10 | chr | OR T) | | | | | | |
| 4*/$ | s_53 | ABCA2_FLNA | FLNA->ABCA2 | inter- | T | − | 0.14901 | NO | 2 | 2 | 456 |
| | | | | chr | | | | | | | |
| 5$ | s_36 | ABCA2_FLNA | | | | | 0.01437 | | | | |
| 6* | s_36 | ABCC5_EIF4G1 | EIF4G1-> | intra- | I AND T | + | 0.08623 | NO | 3 | 3 | 457 |
| | | | ABCC5 | chr | | | | | | | |
| 7* | s_29 | ACACA_CALR | CALR-> | inter- | I AND T | + | 0.10524 | NO | 3 | 3 | 458 |
| | | | ACACA | chr | | | | | | | |
| 8*/$ | s_55 | ACTB_APOL1 | APOL1->ACTB | inter- | I AND T | + | 0.08747 | NO | 4 | 4 | 459 |
| | | | | chr | | | | | | | |
| 9$ | s_49 | ACTB_APOL1 | | | | | 0.02488 | | | | |
| 10$ | s_54 | ACTB_APOL1 | | | | | 0.02745 | | | | |
| 11*/$/+ | s_56 | ACTB_C20orf112 | ACTB-> | inter- | T | − | 0.07171 | NO | 2 | 2 | 460 |
| | | | C20orf112 | chr | | | | | | | |
| 12*/$/+ | s_56 | ACTB_C20orf112 | ACTB-> | inter- | T | − | 0.07171 | NO | 2 | 2 | 461 |
| | | | >C20orf112 | chr | | | | | | | |
| 13$ | s_51 | ACTB_C20orf112 | | | | | 0.02566 | | | | |
| 14*/$ | s_54 | ACTB_H1F0 | H1F0->ACTB | inter- | I AND T | + | 0.08236 | NO | 3 | 3 | 462 |
| | | | | chr | | | | | | | |
| 15$ | s_25 | ACTB_H1F0 | | | | | 0.03320 | | | | |
| 16$ | s_30 | ACTB_H1F0 | | | | | 0.03205 | | | | |
| 17$ | s_35 | ACTB_H1F0 | | | | | 0.01317 | | | | |
| 18$ | s_38 | ACTB_H1F0 | | | | | 0.01254 | | | | |
| 19$ | s_51 | ACTB_H1F0 | | | | | 0.02566 | | | | |
| 20$ | s_53 | ACTB_H1F0 | | | | | 0.02980 | | | | |
| 21*/$ | s_34 | ACTB_NDUFS6 | NDUFS6-> | inter- | I AND T | + | 0.03955 | NO | 4 | 4 | 463 |
| | | | ACTB | chr | | | | | | | |
| 22$ | s_53 | ACTB_NDUFS6 | | | | | 0.08940 | | | | |
| 23*/$ | s_50 | ACTB_OGT | OGT->ACTB | inter- | I AND T | + | 0.07234 | NO | 7 | 7 | 464 |
| | | | | chr | | | | | | | |
| 24$ | s_29 | ACTB_OGT | | | | | 0.03508 | | | | |
| 25* | s_49 | ACTB_SLC34A2 | SLC34A2-> | inter- | I AND T | + | 0.09950 | NO | 5 | 5 | 465 |
| | | | ACTB | chr | | | | | | | |
| 26*/$ | s_53 | ACTG1_PPP1R12C | ACTG1-> | inter- | T | − | 0.17881 | NO | 3 | 3 | 466 |
| | | | PPP1R12C | chr | | | | | | | |
| 27$ | s_38 | ACTG1_PPP1R12C | | | | | 0.01254 | | | | |
| 28$ | s_55 | ACTG1_PPP1R12C | | | | | 0.02916 | | | | |
| 29$ | s_56 | ACTG1_PPP1R12C | | | | | 0.07171 | | | | |
| 30* | s_51 | ADCY9_C16orf5 | ADCY9-> | intra- | T | − | 0.23096 | YES | 3 | 3 | 467 |
| | | | C16orf5 | chr | | | | | | | |
| 31*/$ | s_39 | ADD3_FTL | FTL->ADD3 | inter- | T | + | 0.03872 | NO | 2 | 2 | 468 |
| | | | | chr | | | | | | | |
| 32$ | s_29 | ADD3_FTL | | | | | 0.03508 | | | | |
| 33*/+ | s_35 | AEBP1_THRA | AEBP1->THRA | inter- | T | + | 0.03952 | NO | 2 | 2 | 469 |
| | | | | chr | | | | | | | |
| 34+ | s_35 | AEBP1_THRA | AEBP1-THRA | inter- | T | Can Not | 0.03952 | NO | 2 | 2 | 470 |
| | | | | chr | | Determine | | | | | |
| 35* | s_33 | AMD1_IGFBP5 | IGFBP5-> | inter- | I AND T | − | 0.07198 | NO | 2 | 2 | 471 |
| | | | AMD1 | chr | | | | | | | |
| 36* | s_51 | ANKHD1_ITGAV | ITGAV-> | inter- | T | + | 0.66722 | YES | 9 | 9 | 472 |
| | | | ANKHD1 | chr | | | | | | | |
| 37* | s_30 | ANP32E_MYST4 | ANP32E-> | inter- | I AND T | − | 0.12819 | NO | 4 | 4 | 473 |
| | | | MYST4 | chr | | | | | | | |
| 38* | s_34 | APOOL_DCAF8 | APOOL-> | inter- | I AND T | + | 0.05273 | NO | 5 | 5 | 474 |
| | | | DCAF8 | chr | | | | | | | |
| 39* | s_34 | ARIH2_TMEM119 | TMEM119-> | inter- | I AND T | − | 0.05273 | NO | 13 | 13 | 475 |
| | | | ARIH2 | chr | | | | | | | |
| 40* | s_27 | ARL2_CAPN1 | CAPN1->ARL2 | intra- | T | + | 0.74395 | YES | 24 | 24 | 476 |
| | | | | chr | | | | | | | |
| 41*/$ | s_30 | ARL3_MTF2 | MTF2->ARL3 | inter- | I AND T | + | 0.48072 | YES | 34 | 15 | 477 |
| | | | | chr | | | | | | | |
| 42*/$ | s_52 | ARL3_MTF2 | MTF2->ARL3 | inter- | I AND T | + | 0.58084 | YES | 34 | 19 | 478 |
| | | | | chr | | | | | | | |
| 43* | s_33 | ASAP1_MALAT1 | ASAP1-> | inter- | I AND T | − | 0.03599 | NO | 3 | 3 | 479 |
| | | | MALAT1 | chr | | | | | | | |
| 44*/$ | s_40 | BASP1_COL1A1 | COL1A1-> | inter- | I AND T | − | 0.07187 | NO | 7 | 7 | 480 |
| | | | BASP1 | chr | | | | | | | |
| 45$ | s_33 | BASP1_COL1A1 | | | | | 0.01200 | | | | |
| 46$ | s_54 | BASP1_COL1A1 | | | | | 0.05490 | | | | |
| 47$ | s_55 | BASP1_COL1A1 | | | | | 0.02916 | | | | |
| 48*/$ | s_35 | BAT2L2_COL3A1 | BAT2L2-> | inter- | T | + | 0.05269 | NO | 14 | 14 | 481 |
| | | | COL3A1 | chr | | | | | | | |
| 49$ | s_31 | BAT2L2_COL3A1 | | | | | 0.03700 | | | | |
| 50$ | s_37 | BAT2L2_COL3A1 | | | | | 0.02519 | | | | |
| 51$ | s_39 | BAT2L2_COL3A1 | | | | | 0.01291 | | | | |
| 52$ | s_52 | BAT2L2_COL3A1 | | | | | 0.02904 | | | | |
| 53$ | s_54 | BAT2L2_COL3A1 | | | | | 0.02745 | | | | |
| 54* | s_54 | C2orf56_SAMD4B | C2orf56-> | inter- | T | + | 0.08236 | NO | 2 | 2 | 482 |
| | | | SAMD4B | chr | | | | | | | |
| 55* | s_31 | C8orf46_GPATCH8 | GPATCH8-> | inter- | I AND T | − | 0.36997 | YES | 2 | 2 | 483 |
| | | | C8orf46 | chr | | | | | | | |
| 56* | s_54 | CAT_PDHX | PDHX->CAT | intra- | T | + | 0.46669 | YES | 5 | 5 | 484 |
| | | | | chr | | | | | | | |
| 57*/+ | s_50 | CD24_GPAA1 | GPAA1->CD24 | inter- | I AND T | + | 0.07234 | NO | 3 | 3 | 485 |
| | | | | chr | | | | | | | |
| 58*/+ | s_50 | CD24_GPAA1 | GPAA1->CD24 | inter- | I AND T | + | 0.07234 | NO | 2 | 2 | 486 |
| | | | | chr | | | | | | | |
| 59*/$ | s_40 | CD68_NEAT1 | CD68->NEAT1 | inter- | T | + | 0.05750 | NO | 3 | 3 | 487 |
| | | | | chr | | | | | | | |
| 60$ | s_27 | CD68_NEAT1 | | | | | 0.03100 | | | | |
| 61$ | s_33 | CD68_NEAT1 | | | | | 0.01200 | | | | |
| 62$ | s_39 | CD68_NEAT1 | | | | | 0.01291 | | | | |
| 63*/$ | s_39 | CD68_PSAP | CD68->PSAP | inter- | I AND T | + | 0.05162 | NO | 9 | 8 | 488 |
| | | | | chr | | | | | | | |
| 64*/$ | s_39 | CD68_PSAP | CD68->PSAP | inter- | I AND T | + | 0.05162 | NO | 6 | 6 | 489 |
| | | | | chr | | | | | | | |
| 65$ | s_29 | CD68_PSAP | | | | | 0.24555 | | | | |
| 66$ | s_38 | CD68_PSAP | | | | | 0.01254 | | | | |
| 67$ | s_49 | CD68_PSAP | | | | | 0.12438 | | | | |
| 68$ | s_54 | CD68_PSAP | | | | | 0.05490 | | | | |
| 69*/$ | s_54 | CD74_MBD6 | CD74->MBD6 | inter- | I AND T | − | 0.13726 | NO | 19 | 19 | 490 |
| | | | | chr | | | | | | | |
| 70$ | s_56 | CD74_MBD6 | | | | | 0.04780 | | | | |
| 71* | s_53 | CDK4_UBA1 | CDK4->UBA1 | inter- | I AND T | − | 0.08940 | NO | 6 | 6 | 491 |
| | | | | chr | | | | | | | |
| 72* | s_54 | CIRBP_UGP2 | CIRBP->UGP2 | inter- | T | + | 0.10981 | NO | 2 | 2 | 492 |
| | | | | chr | | | | | | | |
| 73* | s_40 | COL14A1_DNAJA2 | DNAJA2-> | inter- | I AND T | − | 0.05750 | NO | 2 | 2 | 493 |
| | | | COL14A1 | chr | | | | | | | |
| 74* | s_35 | COL16A1_COL3A1 | COL3A1-> | inter- | I AND T | + | 0.03952 | NO | 2 | 2 | 494 |
| | | | COL16A1 | chr | | | | | | | |
| 75*/$ | s_37 | COL1A1_EPN1 | EPN1-> | inter- | I AND T | + | 0.03778 | NO | 7 | 7 | 495 |
| | | | COL1A1 | chr | | | | | | | |
| 76$ | s_28 | COL1A1_EPN1 | | | | | 0.03261 | | | | |
| 77$ | s_33 | COL1A1_EPN1 | | | | | 0.01200 | | | | |
| 78$ | s_35 | COL1A1_EPN1 | | | | | 0.01317 | | | | |
| 79$ | s_54 | COL1A1_EPN1 | | | | | 0.05490 | | | | |
| 80* | s_54 | COL1A1_FGD2 | COL1A1-> | inter- | I AND T | − | 0.08236 | NO | 2 | 2 | 496 |
| | | | FGD2 | chr | | | | | | | |
| 81*/$ | s_40 | COL1A1_FMNL3 | COL1A1-> | inter- | T | − | 0.04312 | NO | 3 | 3 | 497 |
| | | | FMNL3 | chr | | | | | | | |
| 82$ | s_35 | COL1A1_FMNL3 | | | | | 0.01317 | | | | |
| 83* | s_35 | COL1A1_GORASP2 | COL1A1-> | inter- | I AND T | − | 0.05269 | NO | 4 | 4 | 498 |
| | | | GORASP2 | chr | | | | | | | |
| 84* | s_40 | COL1A1_HEATR5A | HEATR5A-> | inter- | T | − | 0.05750 | NO | 2 | 2 | 499 |
| | | | COL1A1 | chr | | | | | | | |
| 85*/$ | s_35 | COL1A2_LAMP2 | COL1A2-> | inter- | I AND T | + | 0.03952 | NO | 2 | 2 | 500 |
| | | | LAMP2 | chr | | | | | | | |
| 86$ | s_37 | COL1A2_LAMP2 | | | | | 0.01259 | | | | |
| 87$ | s_54 | COL1A2_LAMP2 | | | | | 0.02745 | | | | |
| 88*/$ | s_40 | COL3A1_DCLK1 | DCLK1-> | inter- | I AND T | − | 0.05750 | NO | 4 | 4 | 501 |
| | | | COL3A1 | chr | | | | | | | |
| 89$ | s_35 | COL3A1_DCLK1 | | | | | 0.01317 | | | | |
| 90* | s_40 | COL3A1_POLD3 | POLD3-> | inter- | T | + | 0.05750 | NO | 2 | 2 | 502 |
| | | | COL3A1 | chr | | | | | | | |
| 91*/$ | s_40 | COL3A1_SPATS2L | SPATS2L-> | intra- | T | + | 0.05750 | NO | 11 | 11 | 503 |
| | | | COL3A1 | chr | | | | | | | |
| 92$ | s_38 | COL3A1_SPATS2L | | | | | 0.01254 | | | | |
| 93$ | s_49 | COL3A1_SPATS2L | | | | | 0.02488 | | | | |
| 94* | s_35 | COL3A1_ZNF43 | COL3A1-> | inter- | I AND T | + | 0.03952 | NO | 2 | 2 | 504 |
| | | | ZNF43 | chr | | | | | | | |
| 95* | s_52 | CPNE3_IFI27 | IFI27->CPNE3 | inter- | T | + | 0.08713 | NO | 7 | 7 | 505 |
| | | | | chr | | | | | | | |
| 96* | s_34 | CRNKL1_RHOBTB3 | RHOBTB3-> | inter- | I AND T | + | 0.05273 | NO | 2 | 2 | 506 |
| | | | CRNKL1 | chr | | | | | | | |
| 97* | s_53 | CTSD_EPHA2 | EPHA2->CTSD | inter- | T | − | 0.08940 | NO | 2 | 2 | 507 |
| | | | | chr | | | | | | | |
| 98*/$ | s_53 | CTSD_GNB2 | GNB2->CTSD | inter- | I AND T | + | 0.14901 | NO | 2 | 2 | 508 |
| | | | | chr | | | | | | | |
| 99$ | s_54 | CTSD_GNB2 | | | | | 0.02745 | | | | |
| 100* | s_53 | CTSD_LTBP4 | LTBP4->CTSD | inter- | I AND T | + | 0.14901 | NO | 4 | 4 | 509 |
| | | | | chr | | | | | | | |
| 101* | s_53 | CTSD_PACSIN3 | PACSIN3-> | intra- | D OR T | − | 0.08940 | NO | 2 | 2 | 510 |
| | | | CTSD | chr | | | | | | | |
| 102*/$ | s_53 | CTSD_PLXNA1 | PLXNA1-> | inter- | I AND T | + | 0.11920 | NO | 4 | 4 | 511 |
| | | | CTSD | chr | | | | | | | |
| 103$ | s_38 | CTSD_PLXNA1 | | | | | 0.01254 | | | | |
| 104* | s_53 | CTSD_PRKAR1B | CTSD-> | inter- | T | − | 0.14901 | NO | 18 | 18 | 512 |
| | | | PRKAR1B | chr | | | | | | | |
| 105* | s_53 | CTSD_TMEM109 | TMEM109-> | intra- | I AND T | + | 0.14901 | NO | 4 | 4 | 513 |
| | | | CTSD | chr | | | | | | | |
| 106* | s_26 | CTSS_GOLPH3L | GOLPH3L-> | intra- | T | − | 0.80247 | YES | 5 | 5 | 514 |
| | | | CTSS | chr | | | | | | | |
| 107* | s_33 | CTTN_NCRNA00201 | CTTN-> | inter- | I AND T | + | 0.03599 | NO | 3 | 3 | 515 |
| | | | NCRNA00201 | chr | | | | | | | |
| 108* | s_29 | CWC25_ROBO2 | CWC25-> | inter- | I AND T | − | 1.75396 | YES | 12 | 12 | 516 |
| | | | ROBO2 | chr | | | | | | | |
| 109* | s_39 | CYB561_YWHAG | YWHAG-> | inter- | T | − | 0.03872 | NO | 2 | 2 | 517 |
| | | | CYB561 | chr | | | | | | | |
| 110*/$ | s_40 | CYB5R3_TXNIP | CYB5R3-> | inter- | I AND T | − | 0.04312 | NO | 2 | 2 | 518 |
| | | | TXNIP | chr | | | | | | | |
| 111$ | s_35 | CYB5R3_TXNIP | | | | | 0.01317 | | | | |
| 112*/$ | s_40 | DCN_VPS35 | VPS35->DCN | inter- | T | − | 0.05750 | NO | 6 | 6 | 519 |
| | | | | chr | | | | | | | |
| 113$ | s_28 | DCN_VPS35 | | | | | 0.03261 | | | | |
| 114*/+ | s_29 | DIDO1_REPS1 | DIDO1-> | inter- | T | − | 1.19269 | YES | 19 | 19 | 520 |
| | | | REPS1 | chr | | | | | | | |
| 115*/+ | s_29 | DIDO1_REPS1 | DIDO1-> | inter- | T | − | 1.19269 | YES | 2 | 2 | 521 |
| | | | REPS1 | chr | | | | | | | |
| 116*/$ | s_50 | DNM2_PIN1 | DNM2->PIN1 | intra- | T | + | 0.07234 | YES | 3 | 3 | 522 |
| | | | | chr | | | | | | | |
| 117$ | s_38 | DNM2_PIN1 | | | | | 0.01254 | | | | |
| 118*/$ | s_34 | EIF4G2_RAB8A | RAB8A-> | inter- | I AND T | + | 0.03955 | NO | 4 | 4 | 523 |
| | | | EIF4G2 | chr | | | | | | | |
| 119$ | s_52 | EIF4G2_RAB8A | | | | | 0.05808 | | | | |
| 120*/$ | s_38 | ELAC1_SMAD4 | ELAC1-> | intra- | D OR T | + | 0.03762 | YES | 2 | 2 | 524 |
| | | | SMAD4 | chr | | | | | | | |
| 121$ | s_27 | ELAC1_SMAD4 | | | | | 0.03100 | | | | |
| 122$ | s_29 | ELAC1_SMAD4 | | | | | 0.03508 | | | | |
| 123$ | s_33 | ELAC1_SMAD4 | | | | | 0.01200 | | | | |
| 124$ | s_35 | ELAC1_SMAD4 | | | | | 0.01317 | | | | |
| 125$ | s_37 | ELAC1_SMAD4 | | | | | 0.03778 | | | | |
| 126$ | s_39 | ELAC1_SMAD4 | | | | | 0.01291 | | | | |
| 127$ | s_40 | ELAC1_SMAD4 | | | | | 0.02875 | | | | |
| 128*/$ | s_33 | ELF3_SLC39A6 | ELF3-> | inter- | I AND T | + | 0.03599 | NO | 2 | 2 | 525 |
| | | | SLC39A6 | chr | | | | | | | |
| 129$ | s_35 | ELF3_SLC39A6 | | | | | 0.01317 | | | | |
| 130* | s_56 | ELN_NCOR2 | NCOR2->ELN | inter- | I AND T | − | 0.07171 | NO | 2 | 2 | 526 |
| | | | | chr | | | | | | | |
| 131* | s_51 | EMP2_KRT81 | KRT81->EMP2 | inter- | T | − | 0.10265 | NO | 3 | 3 | 527 |
| | | | | chr | | | | | | | |
| 132* | s_27 | FAM3B_GLI3 | GLI3->FAM3B | inter- | I AND T | − | 0.65096 | YES | 4 | 4 | 528 |
| | | | | chr | | | | | | | |
| 133* | s_53 | FLNA_SBF1 | SBF1->FLNA | inter- | T | − | 0.20861 | NO | 12 | 12 | 529 |
| | | | | chr | | | | | | | |
| 134* | s_51 | GAPDH_KRT13 | GAPDH-> | inter- | I AND T | + | 0.30795 | NO | 2 | 2 | 530 |
| | | | KRT13 | chr | | | | | | | |
| 135* | s_52 | GAPDH_MRPS18B | GAPDH-> | inter- | T | + | 0.11617 | NO | 4 | 4 | 531 |
| | | | MRPS18B | chr | | | | | | | |
| 136*/$ | s_56 | GATA3_RHOB | RHOB-> | inter- | T | + | 0.21512 | NO | 12 | 12 | 532 |
| | | | GATA3 | chr | | | | | | | |
| 137$ | s_33 | GATA3_RHOB | | | | | 0.01200 | | | | |
| 138$ | s_55 | GATA3_RHOB | | | | | 0.05831 | | | | |
| 139*/+ | s_50 | GEMIN7_SLC39A14 | GEMIN7-> | inter- | T | + | 0.67516 | YES | 5 | 5 | 533 |
| | | | SLC39A14 | chr | | | | | | | |
| 140*/+ | s_50 | GEMIN7_SLC39A14 | GEMIN7-> | inter- | T | + | 0.67516 | YES | 2 | 2 | 534 |
| | | | SLC39A14 | chr | | | | | | | |
| 141* | s_55 | GNB1_TRH | GNB1->TRH | inter- | I AND T | − | 0.11663 | NO | 2 | 2 | 535 |
| | | | | chr | | | | | | | |
| 142* | s_56 | GNB4_PTMA | PTMA->GNB4 | inter- | I AND T | + | 0.07171 | NO | 12 | 12 | 536 |
| | | | | chr | | | | | | | |
| 143* | s_32 | GPR128_TFG | TFG->GPR128 | intra- | T | + | 0.80135 | YES | 9 | 9 | 537 |
| | | | | chr | | | | | | | |
| 144* | s_56 | HDLBP_NTN1 | NTN1->HDLBP | inter- | I AND T | + | 0.07171 | NO | 2 | 2 | 538 |
| | | | | chr | | | | | | | |
| 145*/$ | s_54 | HLA-E_TSPAN14 | TSPAN14-> | inter- | T | + | 0.08236 | NO | 4 | 1 | 539 |
| | | | HLA-E | chr | | | | | | | |
| 146*/$ | s_56 | HLA-E_TSPAN14 | TSPAN14-> | inter- | T | + | 0.07171 | NO | 4 | 3 | 540 |
| | | | HLA-E | chr | | | | | | | |
| 147* | s_36 | HMGN3_PAQR8 | HMGN3-> | intra- | I AND (D | − | 0.11498 | YES | 3 | 3 | 541 |
| | | | PAQR8 | chr | OR T) | | | | | | |
| 148* | s_30 | HNRNPH1_VAPA | HNRNPH1-> | inter- | I AND T | − | 0.12819 | NO | 2 | 2 | 542 |
| | | | VAPA | chr | | | | | | | |
| 149* | s_34 | HNRNPU_TES | TES-> | inter- | I AND T | + | 0.03955 | NO | 3 | 3 | 543 |
| | | | HNRNPU | chr | | | | | | | |
| 150* | s_33 | HSP90AB1_PCGF2 | HSP90AB1-> | inter- | I AND T | + | 0.03599 | NO | 2 | 2 | 544 |
| | | | PCGF2 | chr | | | | | | | |
| 151*/$ | s_38 | IGF2_MALAT1 | MALAT1-> | intra- | I AND T | + | 0.03762 | NO | 4 | 1 | 545 |
| | | | IGF2 | chr | | | | | | | |
| 152$ | s_28 | IGF2_MALAT1 | | | | | 0.03261 | | | | |
| 153$ | s_29 | IGF2_MALAT1 | | | | | 0.03508 | | | | |
| 154$ | s_34 | IGF2_MALAT1 | IGF2-MALAT1 | intra- | I AND (D | Can Not | 0.10546 | NO | 4 | 3 | 546 |
| | | | | chr | OR T) | Determine | | | | | |
| 155* | s_33 | IGFBP5_RAB3IP | RAB3IP-> | inter- | I AND T | + | 0.03599 | NO | 7 | 7 | 547 |
| | | | IGFBP5 | chr | | | | | | | |
| 156* | s_40 | IGFBP7_MAF | MAF->IGFBP7 | inter- | T | − | 0.04312 | NO | 2 | 2 | 548 |
| | | | | chr | | | | | | | |
| 157*/$ | s_36 | IGLL5_LOC96610 | LOC96610-> | intra- | D OR T | + | 0.43117 | NO | 51 | 1 | 549 |
| | | | IGLL5 | chr | | | | | | | |
| 158*/$ | s_49 | IGLL5_LOC96610 | LOC96610-> | intra- | D OR T | + | 6.99014 | NO | 51 | 50 | 550 |
| | | | IGLL5 | chr | | | | | | | |
| 159$ | s_26 | IGLL5_LOC96610 | | | | | 0.70618 | | | | |
| 160$ | s_27 | IGLL5_LOC96610 | | | | | 0.27898 | | | | |
| 161$ | s_28 | IGLL5_LOC96610 | | | | | 0.32609 | | | | |
| 162$ | s_29 | IGLL5_LOC96610 | | | | | 0.59635 | | | | |
| 163$ | s_31 | IGLL5_LOC96610 | | | | | 2.18284 | | | | |
| 164$ | s_32 | IGLL5_LOC96610 | | | | | 0.41810 | | | | |
| 165$ | s_35 | IGLL5_LOC96610 | | | | | 0.55326 | | | | |
| 166$ | s_37 | IGLL5_LOC96610 | | | | | 0.23929 | | | | |
| 167$ | s_38 | IGLL5_LOC96610 | | | | | 0.96567 | | | | |
| 168$ | s_40 | IGLL5_LOC96610 | | | | | 4.93033 | | | | |
| 169$ | s_50 | IGLL5_LOC96610 | | | | | 7.81259 | | | | |
| 170$ | s_51 | IGLL5_LOC96610 | | | | | 0.64156 | | | | |
| 171$ | s_54 | IGLL5_LOC96610 | | | | | 3.15700 | | | | |
| 172$ | s_55 | IGLL5_LOC96610 | | | | | 0.05831 | | | | |
| 173$ | s_56 | IGLL5_LOC96610 | | | | | 0.23902 | | | | |
| 174* | s_49 | IGLL5_SFTPC | SFTPC->IGLL5 | inter- | T | + | 0.07463 | NO | 2 | 2 | 551 |
| | | | | chr | | | | | | | |
| 175* | s_55 | IRX3_USF2 | USF2->IRX3 | inter- | I AND T | + | 0.08747 | NO | 2 | 2 | 552 |
| | | | | chr | | | | | | | |
| 176* | s_53 | ITGA3_KHK | ITGA3->KHK | inter- | T | + | 0.08940 | NO | 3 | 3 | 553 |
| | | | | chr | | | | | | | |
| 177* | s_26 | JOSD1_RPS19BP1 | JOSD1-> | intra- | T | − | 0.57778 | YES | 4 | 4 | 554 |
| | | | RPS19BP1 | chr | | | | | | | |
| 178*/$ | s_38 | KCTD1_LOC728606 | LOC728606-> | intra- | D OR T | − | 0.13795 | YES | 6 | 2 | 555 |
| | | | KCTD1 | chr | | | | | | | |
| 179*/$ | s_55 | KCTD1_LOC728606 | LOC728606-> | intra- | D OR T | − | 0.46652 | YES | 6 | 4 | 556 |
| | | | KCTD1 | chr | | | | | | | |
| 180$ | s_26 | KCTD1_LOC728606 | | | | | 0.06420 | | | | |
| 181$ | s_28 | KCTD1_LOC728606 | | | | | 0.03261 | | | | |
| 182$ | s_33 | KCTD1_LOC728606 | | | | | 0.03599 | | | | |
| 183$ | s_34 | KCTD1_LOC728606 | | | | | 0.26364 | | | | |
| 184$ | s_39 | KCTD1_LOC728606 | | | | | 0.01291 | | | | |
| 185$ | s_56 | KCTD1_LOC728606 | | | | | 0.54975 | | | | |
| 186* | s_31 | KCTD3_TXNDC16 | KCTD3-> | inter- | I AND T | + | 0.66595 | YES | 4 | 4 | 557 |
| | | | TXNDC16 | chr | | | | | | | |
| 187* | s_34 | KIAA1217_SERPINA1 | SERPINA1-> | inter- | I AND T | − | 0.05273 | NO | 3 | 3 | 558 |
| | | | KIAA1217 | chr | | | | | | | |
| 188*/$ | s_51 | KRT18_PLEC | KRT18->PLEC | inter- | I AND T | + | 0.10265 | NO | 2 | 2 | 559 |
| | | | | chr | | | | | | | |
| 189$ | s_53 | KRT18_PLEC | | | | | 0.11920 | | | | |
| 190* | s_51 | KRT4_RPL8 | RPL8->KRT4 | inter- | T | − | 0.07699 | NO | 2 | 2 | 560 |
| | | | | chr | | | | | | | |
| 191* | s_26 | LAMB3_RALGPS2 | RALGPS2-> | intra- | I AND (D | + | 0.25679 | YES | 6 | 6 | 561 |
| | | | LAMB3 | chr | OR T) | | | | | | |
| 192*/$ | s_54 | LGMN_NAP1L1 | LGMN-> | inter- | T | − | 0.10981 | YES | 2 | 2 | 562 |
| | | | NAP1L1 | chr | | | | | | | |
| 193$ | s_29 | LGMN_NAP1L1 | | | | | 0.03508 | | | | |
| 194* | s_33 | LRIG1_SLC39A6 | SLC39A6-> | inter- | T | − | 0.04798 | NO | 3 | 3 | 563 |
| | | | LRIG1 | chr | | | | | | | |
| 195*/$ | s_33 | MALAT1_PTP4A2 | PTP4A2-> | inter- | I AND T | − | 0.04798 | NO | 2 | 2 | 564 |
| | | | MALAT1 | chr | | | | | | | |
| 196$ | s_51 | MALAT1_PTP4A2 | | | | | 0.05132 | | | | |
| 197$ | s_55 | MALAT1_PTP4A2 | | | | | 0.02916 | | | | |
| 198*/$ | s_33 | MALAT1_TAX1BP1 | TAX1BP1-> | inter- | T | + | 0.04798 | NO | 2 | 2 | 565 |
| | | | | MALAT1 | chr | | | | | | |
| 199$ | s_39 | MALAT1_TAX1BP1 | | | | | 0.02581 | | | | |
| 200* | s_33 | MAPK1IP1L_XPO1 | MAPK1IP1L-> | inter- | I AND T | + | 0.03599 | NO | 2 | 2 | 566 |
| | | | XPO1 | chr | | | | | | | |
| 201*/$ | s_34 | MGP_NCRNA00188 | MGP-> | inter- | I AND T | − | 0.05273 | NO | 3 | 3 | 567 |
| | | | NCRNA00188 | chr | | | | | | | |
| 202$ | s_37 | MGP_NCRNA00188 | | | | | 0.01259 | | | | |
| 203$ | s_38 | MGP_NCRNA00188 | | | | | 0.01254 | | | | |
| 204* | s_33 | MGP_REPS2 | MGP->REPS2 | inter- | I AND T | − | 0.03599 | NO | 2 | 2 | 568 |
| | | | | chr | | | | | | | |
| 205* | s_50 | MKKS_PCNX | PCNX->MKKS | inter- | I AND T | + | 0.55460 | YES | 4 | 4 | 569 |
| | | | | chr | | | | | | | |
| 206* | s_53 | MRPL4_SLC16A3 | SLC16A3-> | inter- | T | + | 0.08940 | NO | 30 | 30 | 570 |
| | | | MRPL4 | chr | | | | | | | |
| 207* | s_40 | MRPL52_USP22 | MRPL52-> | inter- | I AND T | + | 0.04312 | NO | 3 | 3 | 571 |
| | | | USP22 | chr | | | | | | | |
| 208*/$ | s_29 | MUCL1_RPL23 | RPL23-> | inter- | I AND T | − | 0.10524 | NO | 4 | 4 | 572 |
| | | | MUCL1 | chr | | | | | | | |
| 209$ | s_27 | MUCL1_RPL23 | | | | | 0.06200 | | | | |
| 210$ | s_38 | MUCL1_RPL23 | | | | | 0.02508 | | | | |
| 211$ | s_51 | MUCL1_RPL23 | | | | | 0.02566 | | | | |
| 212* | s_54 | NAV2_WDFY1 | NAV2-> | inter- | I AND T | + | 0.10981 | NO | 3 | 3 | 573 |
| | | | WDFY1 | chr | | | | | | | |
| 213* | s_49 | NPLOC4_PDE6G | NPLOC4-> | intra- | T | − | 1.29355 | YES | 10 | 10 | 574 |
| | | | PDE6G | chr | | | | | | | |
| 214* | s_31 | OLA1_ORMDL3 | OLA1-> | inter- | T | − | 0.55496 | YES | 2 | 2 | 575 |
| | | | ORMDL3 | chr | | | | | | | |
| 215* | s_36 | PAQR5_THSD4 | THSD4-> | intra- | T | + | 0.21558 | YES | 3 | 3 | 576 |
| | | | PAQR5 | chr | | | | | | | |
| 216* | s_55 | PDIA3_YWHAG | YWHAG-> | inter- | I AND T | − | 0.08747 | NO | 4 | 4 | 577 |
| | | | PDIA3 | chr | | | | | | | |
| 217* | s_56 | PIKFYVE_TMEM119 | PIKFYVE-> | inter- | I AND T | + | 0.07171 | NO | 7 | 7 | 578 |
| | | | TMEM119 | chr | | | | | | | |
| 218* | s_53 | PKM2_SEMA4C | SEMA4C-> | inter- | T | − | 0.08940 | NO | 4 | 4 | 579 |
| | | | PKM2 | chr | | | | | | | |
| 219* | s_53 | PLEC_PLEKHM2 | PLEC-> | inter- | I AND T | − | 0.08940 | NO | 2 | 2 | 580 |
| | | | PLEKHM2 | chr | | | | | | | |
| 220* | s_53 | PLEC_RPS15 | RPS15->PLEC | inter- | I AND T | + | 0.20861 | NO | 4 | 4 | 581 |
| | | | | chr | | | | | | | |
| 221* | s_40 | POSTN_TM9SF3 | POSTN-> | inter- | T | − | 0.04312 | NO | 3 | 3 | 582 |
| | | | TM9SF3 | chr | | | | | | | |
| 222* | s_40 | POSTN_TRIM33 | POSTN-> | inter- | T | − | 0.04312 | NO | 2 | 2 | 583 |
| | | | TRIM33 | chr | | | | | | | |
| 223* | s_49 | PROM1_TAPT1 | PROM1-> | intra- | T | − | 0.24876 | YES | 2 | 2 | 584 |
| | | | TAPT1 | chr | | | | | | | |
| 224* | s_31 | RBM6_SLC38A3 | RBM6-> | intra- | D OR T | + | 0.14799 | YES | 2 | 2 | 585 |
| | | | SLC38A3 | chr | | | | | | | |
| 225* | s_29 | RNASE1_TEP1 | TEP1-> | intra- | T | − | 0.10524 | YES | 2 | 2 | 586 |
| | | | RNASE1 | chr | | | | | | | |
| 226*/$ | s_34 | RNF11_STC2 | STC2->RNF11 | inter- | I AND T | − | 0.05273 | NO | 2 | 2 | 587 |
| | | | | chr | | | | | | | |
| 227$ | s_37 | RNF11_STC2 | | | | | 0.02519 | | | | |
| 228*/$ | s_51 | RPL19_RPS16 | RPL19-> | inter- | I AND T | + | 0.17964 | NO | 2 | 2 | 589 |
| | | | RPS16 | chr | | | | | | | |
| 229$ | s_31 | RPL19_RPS16 | | | | | 0.03700 | | | | |
| 230$ | s_52 | RPL19_RPS16 | | | | | 0.05808 | | | | |
| 231*/ | s_51 | RPS16_TMSB10 | TMSB10-> | inter- | I AND T | + | 0.59023 | NO | 4 | 4 | 590 |
| | | | RPS16 | chr | | | | | | | |
| 232$ | s_29 | RPS16_TMSB10 | | | | | 0.03508 | | | | |
| 233$ | s_32 | RPS16_TMSB10 | | | | | 0.03484 | | | | |
| 234$ | s_53 | RPS16_TMSB10 | | | | | 0.05960 | | | | |
| 235* | s_33 | SFI1_YPEL1 | SFI1->YPEL1 | intra- | I AND T | + | 0.05998 | YES | 2 | 2 | 591 |
| | | | | chr | | | | | | | |
| 236* | s_55 | SLC9A3R1_TNRC18 | TNRC18-> | inter- | I AND T | − | 0.08747 | NO | 2 | 2 | 592 |
| | | | SLC9A3R1 | chr | | | | | | | |
| 237*/$ | s_51 | SOCS5_TTC7A | TTC7A-> | intra- | T | + | 0.23096 | YES | 5 | 5 | 593 |
| | | | SOCS5 | chr | | | | | | | |
| 238$ | s_40 | SOCS5_TTC7A | | | | | 0.02875 | | | | |
| 239$ | s_53 | SOCS5_TTC7A | | | | | 0.05960 | | | | |
| 240*/$/+ | s_35 | SPARC_TRPS1 | SPARC-> | inter- | T | − | 0.05269 | NO | 10 | 10 | 594 |
| | | | TRPS1 | chr | | | | | | | |
| 241*/$/+ | s_35 | SPARC_TRPS1 | SPARC-> | inter- | T | − | 0.05269 | NO | 4 | 4 | 595 |
| | | | TRPS1 | chr | | | | | | | |
| 242$ | s_27 | SPARC_TRPS1 | | | | | 0.03100 | | | | |
| 243$ | s_33 | SPARC_TRPS1 | | | | | 0.01200 | | | | |
| 244$ | s_39 | SPARC_TRPS1 | | | | | 0.01291 | | | | |
| 245* | s_36 | SRPK1_UBR2 | UBR2->SRPK1 | intra- | I AND T | + | 1.32225 | YES | 8 | 8 | 596 |
| | | | | chr | | | | | | | |
| 246*/$ | s_52 | YWHAZ_ZBTB33 | YWHAZ-> | inter- | I AND T | − | 0.11617 | NO | 2 | 2 | 597 |
| | | | ZBTB33 | chr | | | | | | | |
| 247$ | s_54 | YWHAZ_ZBTB33 | | | | | 0.02745 | | | | |

| Row # | Exon1 | Exon2 | Sample ID |
|---|---|---|---|
| 1 | E14:chr17:AATK:NM_001080395:76754332:76754467:− | E33:chr17:USP32:NM_032582:55777623:55777751:− | Triple Negative Breast |
| | | | Tumor |
| 2 | E14:chr17:AATK:NM_001080395:76754332:76754467:− | E33:chr17:USP32:NM_032582:55777623:55777751:− | Triple Negative Breast |
| | | | Tumor |
| 3 | E17:chr17:ABCA10:NM_080282:64683141:64683249:− | E6:chr17:TP53I13:NM_138349:24923285:24923841:+ | HER2+ Breast Tumor |
| 4 | E1:chr9:ABCA2:NM_212533:139021506:139022237:− | E3:chrX:FLNA:NM_001110556:153231210:153231429:− | Triple Negative Breast |
| | | | Tumor |
| 5 | | | ER+ Breast Tumor |
| 6 | E1:chr3:ABCC5:NM_005688:185120417:185121883:− | E25:chr3:EIF4G1:NM_182917:185528311:185528484:+ | ER+ Breast Tumor |
| 7 | E1:chr17:ACACA:NM_198839:32516039:32518487:− | E9:chr19:CALR:NM_004343:12915526:12916304:+ | HER2+ Breast Tumor |
| 8 | E1:chr7:ACTB:NM_001101:5533304:5534048:− | E6:chr22:APOL1:NM_001136540:34991142:34993522:+ | Triple Negative Breast |
| | | | Tumor |
| 9 | | | Triple Negative Breast |
| | | | Tumor |
| 10 | | | Triple Negative Breast |
| | | | Tumor |
| 11 | E1:chr7:ACTB:NM_001101:5533304:5534048:− | E1:chr20:C20orf112:NM_080616:30494522:30499280:− | Triple Negative Breast |
| | | | Tumor |
| 12 | E1:chr7:ACTB:NM_001101:5533304:5534048:− | E1:chr20:C20orf112:NM_080616:30494522:30499280:− | Triple Negative Breast |
| | | | Tumor |
| 13 | | | Triple Negative Breast |
| | | | Tumor |
| 14 | E3:chr7:ACTB:NM_001101:5534437:5534876:− | E1:chr22:H1F0:NM_005318:36531059:36533389:+ | Triple Negative Breast |
| | | | Tumor |
| 15 | | | HER2+ Breast Tumor |
| 16 | | | HER2+ Breast Tumor |
| 17 | | | ER+ Breast Tumor |
| 18 | | | ER+ Breast Tumor |
| 19 | | | Triple Negative Breast |
| | | | Tumor |
| 20 | | | Triple Negative Breast |
| | | | Tumor |
| 21 | E1:chr7:ACTB:NM_001101:5533304:5534048:− | E4:chr5:NDUFS6:NM_004553:1868964:1869163:+ | ER+ Breast Tumor |
| 22 | | | Triple Negative Breast |
| | | | Tumor |
| 23 | E1:chr7:ACTB:NM_001101:5533304:5534048:− | E22:chrX:OGT:NM_181672:70710194:70712472:+ | Triple Negative Breast |
| | | | Tumor |
| 24 | | | HER2+ Breast Tumor |
| 25 | E3:chr7:ACTB:NM_001101:5534437:5534876:− | E13:chr4:SLC34A2:NM_006424:25286854:25289466:+ | Triple Negative Breast |
| | | | Tumor |
| 26 | E1:chr17:ACTG1:NM_001614:77091593:77092454:− | E1:chr19:PPP1R12C:NM_017607:60294092:60294738:− | Triple Negative Breast |
| | | | Tumor |
| 27 | | | ER+ Breast Tumor |
| 28 | | | Triple Negative Breast |
| | | | Tumor |
| 29 | | | Triple Negative Breast |
| | | | Tumor |
| 30 | E10:chr16:ADCY9:NM_001116:4103751:4105487:− | E5:chr16:C16orf5:NM_013399:4504576:4504666:− | Triple Negative Breast |
| | | | Tumor |
| 31 | E14:chr10:ADD3:NM_001121:111883073:111885313:+ | E4:chr19:FTL:NM_000146:54161651:54161948:+ | ER+ Breast Tumor |
| 32 | | | HER2+ Breast Tumor |
| 33 | E18:chr7:AEBP1:NM_001129:44118681:44119033:+ | E1:chr17:THRA:NM_001190918:35472593:35472871:+ | ER+ Breast Tumor |
| 34 | E1:chr7:AEBP1:NM_001129:44110484:44111042:+ | E1:chr17:THRA:NM_001190918:35472593:35472871:+ | ER+ Breast Tumor |
| 35 | E1:chr6:AMD1:NM_001634:111302679:111303111:+ | E1:chr2:IGFBP5:NM_000599:217245072:217249850:− | ER+ Breast Tumor |
| 36 | E25:chr5:ANKHD1:NM_017747:139883834:139884009:+ | E15:chr2:ITGAV:NM_001145000:187229218:187229373:+ | Triple Negative Breast |
| | | | Tumor |
| 37 | E1:chr1:ANP32E:NM_030920:148457341:148459687:− | E18:chr10:MYST4:NM_012330:76458252:76462645:+ | HER2+ Breast Tumor |
| 38 | E9:chrX:APOOL:NM_198450:84229251:84234980:+ | E2:chr1:DCAF8:NR_028106:158480373:158480448:− | ER+ Breast Tumor |
| 39 | E3:chr3:ARIH2:NM_006321:48939898:48940250:+ | E1:chr12:TMEM119:NM_181724:107507750:107510302:− | ER+ Breast Tumor |
| 40 | E5:chr11:ARL2:NM_001667:64545768:64546232:+ | E7:chr11:CAPN1:NM_005186:64711261:64711345:+ | HER2+ Breast Tumor |
| 41 | E5:chr10:ARL3:NM_004311:104455092:104455236:− | E1:chr1:MTF2:NM_001164391:93317379:93317676:+ | HER2+ Breast Tumor |
| 42 | E5:chr10:ARL3:NM_004311:104455092:104455236:− | E1:chr1:MTF2:NM_001164391:93317379:93317676:+ | Triple Negative Breast |
| | | | Tumor |
| 43 | E1:chr8:ASAP1:NM_018482:131133534:131136233:− | E1:chr11:MALAT1:NR_002819:65021808:65030513:+ | ER+ Breast Tumor |
| 44 | E2:chr5:BASP1:NM_006317:17328316:17329943:+ | E1:chr17:COL1A1:NM_000088:45616455:45618008:− | ER+ Breast Tumor |
| 45 | | | ER+ Breast Tumor |
| 46 | | | Triple Negative Breast |
| | | | Tumor |
| 47 | | | Triple Negative Breast |
| | | | Tumor |
| 48 | E34:chr1:BAT2L2:NM_015172:169827348:169829273:+ | E48:chr2:COL3A1:NM_000090:189581894:189582192:+ | ER+ Breast Tumor |
| 49 | | | HER2+ Breast Tumor |
| 50 | | | ER+ Breast Tumor |
| 51 | | | ER+ Breast Tumor |
| 52 | | | Triple Negative Breast |
| | | | Tumor |
| 53 | | | Triple Negative Breast |
| | | | Tumor |
| 54 | E8:chr2:C2orf56:NM_001083946:37328781:37329807:+ | E5:chr19:SAMD4B:NM_018028:44539168:44539569:+ | Triple Negative Breast |
| | | | Tumor |
| 55 | E2:chr8:C8orf46:NM_152765:67571225:67571281:+ | E6:chr17:GPATCH8:NM_001002909:39897365:39897438:− | HER2+ Breast Tumor |
| 56 | E10:chr11:CAT:NM_001752:34442227:34442358:+ | E2:chr11:PDHX:NM_001166158:34909526:34909607:+ | Triple Negative Breast |
| | | | Tumor |
| 57 | E1:chrY:CD24:NM_013230:19611913:19614093:− | E4:chr8:GPAA1:NM_003801:145210604:145210752:+ | Triple Negative Breast |
| | | | Tumor |
| 58 | E1:chrY:CD24:NM_013230:19611913:19614093:− | E4:chr8:GPAA1:NM_003801:145210604:145210752:+ | Triple Negative Breast |
| | | | Tumor |
| 59 | E6:chr17:CD68:NM_001040059:7425419:7426153:+ | E1:chr11:NEAT1:NR_028272:64946844:64950577:+ | ER+ Breast Tumor |
| 60 | | | HER2+ Breast Tumor |
| 61 | | | ER+ Breast Tumor |
| 62 | | | ER+ Breast Tumor |
| 63 | E6:chr17:CD68:NM_001040059:7425419:7426153:+ | E5:chr10:PSAP:NM_001042466:73249476:73249663:− | ER+ Breast Tumor |
| 64 | E6:chr17:CD68:NM_001040059:7425419:7426153:+ | E5:chr10:PSAP:NM_001042466:73249476:73249663:− | ER+ Breast Tumor |
| 65 | | | HER2+ Breast Tumor |
| 66 | | | ER+ Breast Tumor |
| 67 | | | Triple Negative Breast |
| | | | Tumor |
| 68 | | | Triple Negative Breast |
| | | | Tumor |
| 69 | E1:chr5:CD74:NM_001025158:149761392:149762006:− | E7:chr12:MBD6:NM_052897:56206615:56207277:+ | Triple Negative Breast |
| | | | Tumor |
| 70 | | | Triple Negative Breast |
| | | | Tumor |
| 71 | E1:chr12:CDK4:NM_000075:56428269:56428667:− | E1:chrX:UBA1:NM_003334:46938144:46938367:+ | Triple Negative Breast |
| | | | Tumor |
| 72 | E7:chr19:CIRBP:NM_001280:1223425:1224171:+ | E1:chr2:UGP2:NM_006759:63922517:63922842:+ | Triple Negative Breast |
| | | | Tumor |
| 73 | E48:chr8:COL14A1:NM_021110:121452571:121453454:+ | E1:chr16:DNAJA2:NM_005880:45546774:45548633:− | ER+ Breast Tumor |
| 74 | E19:chr1:COL16A1:NM_001856:31904224:31904269:− | E5:chr2:COL3A1:NM_000090:189560029:189560110:+ | ER+ Breast Tumor |
| 75 | E7:chr17:COL1A1:NM_000088:45620235:45620343:− | E11:chr19:EPN1:NM_001130071:60898325:60898945:+ | ER+ Breast Tumor |
| 76 | | | HER2+ Breast Tumor |
| 77 | | | ER+ Breast Tumor |
| 78 | | | ER+ Breast Tumor |
| 79 | | | Triple Negative Breast |
| | | | Tumor |
| 80 | E3:chr17:COL1A1:NM_000088:45618676:45618867:− | E5:chr6:FGD2:NM_173558:37089362:37089519:+ | Triple Negative Breast |
| | | | Tumor |
| 81 | E1:chr17:COL1A1:NM_000088:45616455:45618008:− | E1:chr12:FMNL3:NM_175736:48317990:48325953:− | ER+ Breast Tumor |
| 82 | | | ER+ Breast Tumor |
| 83 | E2:chr17:COL1A1:NM_000088:45618137:45618380:− | E3:chr2:GORASP2:NM_015530:171514294:171514498:+ | ER+ Breast Tumor |
| 84 | E51:chr17:COL1A1:NM_000088:45633770:45633999:− | E1:chr14:HEATR5A:NM_015473:30830744:30832569:− | ER+ Breast Tumor |
| 85 | E52:chr7:COL1A2:NM_000089:93897494:93898480:+ | E1:chrX:LAMP2:NM_013995:119454376:119457176:− | ER+ Breast Tumor |
| 86 | | | ER+ Breast Tumor |
| 87 | | | Triple Negative Breast |
| | | | Tumor |
| 88 | E48:chr2:COL3A1:NM_000090:189581894:189582192:+ | E1:chr13:DCLK1:NM_004734:35241122:35246836:− | ER+ Breast Tumor |
| 89 | | | ER+ Breast Tumor |
| 90 | E51:chr2:COL3A1:NM_000090:189584598:189585717:+ | E12:chr11:POLD3:NM_006591:74029256:74031413:+ | ER+ Breast Tumor |
| 91 | E51:chr2:COL3A1:NM_000090:189584598:189585717:+ | E13:chr2:SPATS2L:NM_001100423:201050603:201055231:+ | ER+ Breast Tumor |
| 92 | | | ER+ Breast Tumor |
| 93 | | | Triple Negative Breast |
| | | | Tumor |
| 94 | E51:chr2:COL3A1:NM_000090:189584598:189585717:+ | E1:chr19:ZNF43:NM_003423:21779591:21784449:− | ER+ Breast Tumor |
| 95 | E17:chr8:CPNE3:NM_003909:87639631:87642842:+ | E5:chr14:IFI27:NM_005532:93652531:93652786:+ | Triple Negative Breast |
| | | | Tumor |
| 96 | E12:chr20:CRNKL1:NM_016652:19977983:19978075:− | E12:chr5:RHOBTB3:NM_014899:95154518:95157827:+ | ER+ Breast Tumor |
| 97 | E1:chr11:CTSD:NM_001909:1730560:1731476:− | E1:chr1:EPHA2:NM_004431:16323419:16324402:− | Triple Negative Breast |
| | | | Tumor |
| 98 | E5:chr11:CTSD:NM_001909:1735129:1735362:− | E10:chr7:GNB2:NM_005273:100114253:100114727:+ | Triple Negative Breast |
| | | | Tumor |
| 99 | | | Triple Negative Breast |
| | | | Tumor |
| 100 | E4:chr11:CTSD:NM_001909:1732711:1732834:− | E30:chr19:LTBP4:NM_001042545:45827140:45827565:+ | Triple Negative Breast |
| | | | Tumor |
| 101 | E1:chr11:CTSD:NM_001909:1730560:1731476:− | E1:chr11:PACSIN3:NM_001184974:47155649:47156173:− | Triple Negative Breast |
| | | | Tumor |
| 102 | E1:chr11:CTSD:NM_001909:1730560:1731476:− | E31:chr3:PLXNA1:NM_032242:128235454:128238925:+ | Triple Negative Breast |
| | | | Tumor |
| 103 | | | ER+ Breast Tumor |
| 104 | E4:chr11:CTSD:NM_001909:1732711:1732834:− | E1:chr7:PRKAR1B:NM_002735:555359:556765:− | Triple Negative Breast |
| | | | Tumor |
| 105 | E9:chr11:CTSD:NM_001909:1741597:1741798:− | E4:chr11:TMEM109:NM_024092:60445821:60447489:+ | Triple Negative Breast |
| | | | Tumor |
| 106 | E1:chr1:CTSS:NM_004079:148969175:148972245:− | E2:chr1:GOLPH3L:NM_018178:148900913:148901028:− | HER2+ Breast Tumor |
| 107 | E18:chr11:CTTN:NM_005231:69958779:69960338:+ | E1:chr1:NCRNA00201:NR_026778:243070563:243075269:− | ER+ Breast Tumor |
| 108 | E9:chr17:CWC25:NM_017748:34230679:34230852:− | E6:chr3:ROBO2:NM_001128929:77678178:77678303:+ | HER2+ Breast Tumor |
| 109 | E1:chr17:CYB561:NM_001017917:58863396:58865687:− | E1:chr7:YWHAG:NM_012479:75794043:75797486:− | ER+ Breast Tumor |
| 110 | E1:chr22:CYB5R3:NM_001129819:41343790:41345895:− | E8:chr1:TXNIP:NM_006472:144152539:144153985:+ | ER+ Breast Tumor |
| 111 | | | ER+ Breast Tumor |
| 112 | E6:chr12:DCN:NM_001920:90082512:90082625:− | E1:chr16:VPS35:NM_018206:45251089:45252064:− | ER+ Breast Tumor |
| 113 | | | HER2+ Breast Tumor |
| 114 | E5:chr20:DIDO1:NM_022105:61016006:61016203:− | E11:chr6:REPS1:NM_031922:139289230:139289311:− | HER2+ Breast Tumor |
| 115 | E5:chr20:DIDO1:NM_022105:61016006:61016203:− | E10:chr6:REPS1:NM_001128617:139283866:139283954:− | HER2+ Breast Tumor |
| 116 | E11:chr19:DNM2:NM_004945:10770161:10770248:+ | E2:chr19:PIN1:NM_006221:9810111:9810324:+ | Triple Negative Breast |
| | | | Tumor |
| 117 | | | ER+ Breast Tumor |
| 118 | E22:chr11:EIF4G2:NM_001418:10786827:10787158:− | E8:chr19:RAB8A:NM_005370:16104021:16105445:+ | ER+ Breast Tumor |
| 119 | | | Triple Negative Breast |
| | | | Tumor |
| 120 | E2:chr18:ELAC1:NM_018696:46754764:46754929:+ | E2:chr18:SMAD4:NM_005359:46827287:46827663:+ | ER+ Breast Tumor |
| 121 | | | HER2+ Breast Tumor |
| 122 | | | HER2+ Breast Tumor |
| 123 | | | ER+ Breast Tumor |
| 124 | | | ER+ Breast Tumor |
| 125 | | | ER+ Breast Tumor |
| 126 | | | ER+ Breast Tumor |
| 127 | | | ER+ Breast Tumor |
| 128 | E9:chr1:ELF3:NM_004433:200250959:200252938:+ | E4:chr18:SLC39A6:NM_001099406:31950634:31950740:− | ER+ Breast Tumor |
| 129 | | | ER+ Breast Tumor |
| 130 | E28:chr7:ELN:NM_000501:73115575:73115635:+ | E11:chr12:NCOR2:NM_006312:123390504:123390703:− | Triple Negative Breast |
| | | | Tumor |
| 131 | E1:chr16:EMP2:NM_001424:10529780:10534450:− | E1:chr12:KRT81:NM_002281:50965963:50966544:− | Triple Negative Breast |
| | | | Tumor |
| 132 | E7:chr21:FAM3B:NM_058186:41642388:41642521:+ | E14:chr7:GLI3:NM_000168:42229253:42229419:− | HER2+ Breast Tumor |
| 133 | E1:chrX:FLNA:NM_001110556:153230093:153230598:− | E1:chr22:SBF1:NM_002972:49230298:49232535:− | Triple Negative Breast |
| | | | Tumor |
| 134 | E9:chr12:GAPDH:NM_002046:6517527:6517797:+ | E7:chr17:KRT13:NM_002274:36914833:36915391:− | Triple Negative Breast |
| | | | Tumor |
| 135 | E9:chr12:GAPDH:NM_002046:6517527:6517797:+ | E7:chr6:MRPS18B:NM_014046:30701257:30702153:+ | Triple Negative Breast |
| | | | Tumor |
| 136 | E1:chr10:GATA3:NM_002051:8136672:8136860:+ | E1:chr2:RHOB:NM_004040:20510315:20512682:+ | Triple Negative Breast |
| | | | Tumor |
| 137 | | | ER+ Breast Tumor |
| 138 | | | Triple Negative Breast |
| | | | Tumor |
| 139 | E2:chr19:GEMIN7:NM_001007270:50275004:50275127:+ | E2:chr8:SLC39A14:NM_001135154:22318153:22318438:+ | Triple Negative Breast |
| | | | Tumor |
| 140 | E1:chr19:GEMIN7:NM_001007270:50274357:50274377:+ | E2:chr8:SLC39A14:NM_001135154:22318153:22318438:+ | Triple Negative Breast |
| | | | Tumor |
| 141 | E1:chr1:GNB1:NM_002074:1706588:1708352:− | E3:chr3:TRH:NM_007117:131178231:131179466:+ | Triple Negative Breast |
| | | | Tumor |
| 142 | E1:chr3:GNB4:NM_021629:180596569:180601801:− | E5:chr2:PTMA:NM_001099285:232285757:232286494:+ | Triple Negative Breast |
| | | | Tumor |
| 143 | E2:chr3:GPR128:NM_032787:101831131:101831245:+ | E3:chr3:TFG:NM_001007565:101921508:101921592:+ | HER2+ Breast Tumor |
| 144 | E10:chr2:HDLBP:NM_203346:241827689:241827908:− | E7:chr17:NTN1:NM_004822:9083681:9088042:+ | Triple Negative Breast |
| | | | Tumor |
| 145 | E8:chr6:HLA-E:NM_005516:30568504:30569960:+ | E6:chr10:TSPAN14:NM_001128309:82267640:82272371:+ | Triple Negative Breast |
| | | | Tumor |
| 146 | E8:chr6:HLA-E:NM_005516:30568504:30569960:+ | E6:chr10:TSPAN14:NM_001128309:82267640:82272371:+ | Triple Negative Breast |
| | | | Tumor |
| 147 | E6:chr6:HMGN3:NM_138730:80000981:80001174:− | E2:chr6:PAQR8:NM_133367:52375918:52380534:+ | ER+ Breast Tumor |
| 148 | E6:chr5:HNRNPH1:NM_005520:178977120:178977256:− | E7:chr18:VAPA:NM_003574:9944049:9950018:+ | HER2+ Breast Tumor |
| 149 | E1:chr1:HNRNPU:NM_031844:243080224:243084428:− | E7:chr7:TES:NM_152829:115684583:115686073:+ | ER+ Breast Tumor |
| 150 | E11:chr6:HSP90AB1:NM_007355:44328759:44329093:+ | E1:chr17:PCGF2:NM_007144:34143675:34145379:− | ER+ Breast Tumor |
| 151 | E1:chr11:IGF2:NM_000612:2106922:2111029:− | E1:chr11:MALAT1:NR_002819:65021808:65030513:+ | ER+ Breast Tumor |
| 152 | | | HER2+ Breast Tumor |
| 153 | | | HER2+ Breast Tumor |
| 154 | E1:chr11:IGF2:NM_000612:2106922:2111029:− | E1:chr11:MALAT1:NR_002819:65021808:65030513:+ | ER+ Breast Tumor |
| 155 | E1:chr2:IGFBP5:NM_000599:217245072:217249850:− | E9:chr12:RAB3IP:NM_001024647:68495410:68503251:+ | ER+ Breast Tumor |
| 156 | E5:chr4:IGFBP7:NM_001553:57670799:57671296:− | E1:chr16:MAF:NM_001031804:78185246:78192123:− | ER+ Breast Tumor |
| 157 | E2:chr22:IGLL5:NM_001178126:21565879:21565998:+ | E11:chr22:LOC96610:NR_027293:21007018:21007324:+ | ER+ Breast Tumor |
| 158 | E2:chr22:IGLL5:NM_001178126:21565879:21565998:+ | E11:chr22:LOC96610:NR_027293:21007018:21007324:+ | Triple Negative Breast |
| | | | Tumor |
| 159 | | | HER2+ Breast Tumor |
| 160 | | | HER2+ Breast Tumor |
| 161 | | | HER2+ Breast Tumor |
| 162 | | | HER2+ Breast Tumor |
| 163 | | | HER2+ Breast Tumor |
| 164 | | | HER2+ Breast Tumor |
| 165 | | | ER+ Breast Tumor |
| 166 | | | ER+ Breast Tumor |
| 167 | | | ER+ Breast Tumor |
| 168 | | | ER+ Breast Tumor |
| 169 | | | Triple Negative Breast |
| | | | Tumor |
| 170 | | | Triple Negative Breast |
| | | | Tumor |
| 171 | | | Triple Negative Breast |
| | | | Tumor |
| 172 | | | Triple Negative Breast |
| | | | Tumor |
| 173 | | | Triple Negative Breast |
| | | | Tumor |
| 174 | E2:chr22:IGLL5:NR_033661:21567554:21568011:+ | E2:chr8:SFTPC:NM_001172357:22076031:22076190:+ | Triple Negative Breast |
| | | | Tumor |
| 175 | E4:chr16:IRX3:NM_024336:52877196:52877879:− | E4:chr19:USF2:NM_003367:40452545:40452746:+ | Triple Negative Breast |
| | | | Tumor |
| 176 | E25:chr17:ITGA3:NM_005501:45521472:45522848:+ | E1:chr2:KHK:NM_000221:27163114:27163723:+ | Triple Negative Breast |
| | | | Tumor |
| 177 | E4:chr22:JOSD1:NM_014876:37425753:37426405:− | E3:chr22:RPS19BP1:NM_194326:38258345:38258474:− | HER2+ Breast Tumor |
| 178 | E4:chr18:KCTD1:NM_001142730:22335033:22335212:− | E2:chr18:LOC728606:NR_024259:22537353:22537600:− | ER+ Breast Tumor |
| 179 | E4:chr18:KCTD1:NM_001142730:22335033:22335212:− | E2:chr18:LOC728606:NR_024259:22537353:22537600:− | Triple Negative Breast |
| | | | Tumor |
| 180 | | | HER2+ Breast Tumor |
| 181 | | | HER2+ Breast Tumor |
| 182 | | | ER+ Breast Tumor |
| 183 | | | ER+ Breast Tumor |
| 184 | | | ER+ Breast Tumor |
| 185 | | | Triple Negative Breast |
| | | | Tumor |
| 186 | E8:chr1:KCTD3:NM_016121:213819874:213819965:+ | E5:chr14:TXNDC16:NM_020784:51993557:51993642:− | HER2+ Breast Tumor |
| 187 | E1:chr10:KIAA1217:NM_019590:24537725:24538198:+ | E1:chr14:SERPINA1:NM_001002236:93912836:93914730:− | ER+ Breast Tumor |
| 188 | E7:chr12:KRT18:NM_199187:51632169:51632393:+ | E2:chr8:PLEC:NM_000445:145068659:145072040:− | Triple Negative Breast |
| | | | Tumor |
| 189 | | | Triple Negative Breast |
| | | | Tumor |
| 190 | E8:chr12:KRT4:NM_002272:51491813:51492028:− | E2:chr8:RPL8:NM_000973:145986543:145986659:− | Triple Negative Breast |
| | | | Tumor |
| 191 | E10:chr1:LAMB3:NM_001017402:207865615:207865994:− | E16:chr1:RALGPS2:NM_152663:177129676:177129782:+ | HER2+ Breast Tumor |
| 192 | E14:chr14:LGMN:NM_001008530:92277159:92277277:− | E5:chr12:NAP1L1:NM_139207:74730577:74730700:− | Triple Negative Breast |
| | | | Tumor |
| 193 | | | HER2+ Breast Tumor |
| 194 | E19:chr3:LRIG1:NM_015541:66633303:66633535:− | E9:chr18:SLC39A6:NM_012319:31960179:31960977:− | ER+ Breast Tumor |
| 195 | E1:chr11:MALAT1:NR_002819:65021808:65030513:+ | E1:chr1:PTP4A2:NM_080391:32146379:32147148:− | ER+ Breast Tumor |
| 196 | | | Triple Negative Breast |
| | | | Tumor |
| 197 | | | Triple Negative Breast |
| | | | Tumor |
| 198 | E1:chr11:MALAT1:NR_002819:65021808:65030513:+ | E17:chr7:TAX1BP1:NM_001079864:27834771:27835911:+ | ER+ Breast Tumor |
| 199 | | | ER+ Breast Tumor |
| 200 | E4:chr14:MAPK1IP1L:NM_144578:54601086:54606665:+ | E24:chr2:XPO1:NM_003400:61614410:61614542:− | ER+ Breast Tumor |
| 201 | E1:chr12:MGP:NM_001190839:14925381:14926481:− | E4:chr17:NCRNA00188:NR_027159:16285406:16286063:+ | ER+ Breast Tumor |
| 202 | | | ER+ Breast Tumor |
| 203 | | | ER+ Breast Tumor |
| 204 | E1:chr12:MGP:NM_001190839:14925381:14926481:− | E18:chrX:REPS2:NM_004726:17075456:17081324:+ | ER+ Breast Tumor |
| 205 | E4:chr20:MKKS:NM_170784:10341177:10342579:− | E7:chr14:PCNX:NM_014982:70525036:70525169:+ | Triple Negative Breast |
| | | | Tumor |
| 206 | E8:chr19:MRPL4:NM_146388:10230284:10231736:+ | E4:chr17:SLC16A3:NM_001042423:77788302:77789058:+ | Triple Negative Breast |
| | | | Tumor |
| 207 | E4:chr14:MRPL52:NM_181307:22373220:22374086:+ | E1:chr17:USP22:NM_015276:20843497:20846978:− | ER+ Breast Tumor |
| 208 | E3:chr12:MUCL1:NM_058173:53536820:53536943:+ | E1:chr17:RPL23:NM_000978:34259846:34259993:− | HER2+ Breast Tumor |
| 209 | | | HER2+ Breast Tumor |
| 210 | | | ER+ Breast Tumor |
| 211 | | | Triple Negative Breast |
| | | | Tumor |
| 212 | E38:chr11:NAV2:NM_145117:20096254:20099723:+ | E1:chr2:WDFY1:NM_020830:224448308:224451691:− | Triple Negative Breast |
| | | | Tumor |
| 213 | E6:chr17:NPLOC4:NM_017921:77166406:77166567:− | E2:chr17:PDE6G:NR_026872:77229079:77229120:− | Triple Negative Breast |
| | | | Tumor |
| 214 | E8:chr2:OLA1:NM_001011708:174796006:174796134:− | E3:chr17:ORMDL3:NM_139280:35333808:35334004:− | HER2+ Breast Tumor |
| 215 | E4:chr15:PAQR5:NM_001104554:67459275:67459403:+ | E6:chr15:THSD4:NM_024817:69491079:69491216:+ | ER+ Breast Tumor |
| 216 | E1:chr15:PDIA3:NM_005313:41825881:41826196:+ | E1:chr7:YWHAG:NM_012479:75794043:75797486:− | Triple Negative Breast |
| | | | Tumor |
| 217 | E42:chr2:PIKFYVE:NM_015040:208928158:208931720:+ | E1:chr12:TMEM119:NM_181724:107507750:107510302:− | Triple Negative Breast |
| | | | Tumor |
| 218 | E6:chr15:PKM2:NM_182470:70288015:70288286:− | E1:chr2:SEMA4C:NM_017789:96889199:96890919:− | Triple Negative Breast |
| | | | Tumor |
| 219 | E2:chr8:PLEC:NM_000445:145068659:145072040:− | E1:chr1:PLEKHM2:NM_015164:15883413:15883700:+ | Triple Negative Breast |
| | | | Tumor |
| 220 | E1:chr8:PLEC:NM_000445:145061308:145068551:− | E3:chr19:RPS15:NM_001018:1391017:1391252:+ | Triple Negative Breast |
| | | | Tumor |
| 221 | E1:chr13:POSTN:NM_006475:37034719:37035507:− | E1:chr10:TM9SF3:NM_020123:98267856:98272077:− | ER+ Breast Tumor |
| 222 | E1:chr13:POSTN:NM_006475:37034719:37035507:− | E1:chr1:TRIM33:NM_015906:114736921:114742005:− | ER+ Breast Tumor |
| 223 | E15:chr4:PROM1:NM_001145849:15617258:15617411:− | E2:chr4:TAPT1:NM_153365:15777353:15777514:− | Triple Negative Breast |
| | | | Tumor |
| 224 | E1:chr3:RBM6:NM_005777:49952480:49952662:+ | E2:chr3:SLC38A3:NM_006841:50226585:50226737:+ | HER2+ Breast Tumor |
| 225 | E1:chr14:RNASE1:NM_198235:20339354:20340092:− | E38:chr14:TEP1:NM_007110:19925903:19926062:− | HER2+ Breast Tumor |
| 226 | E1:chr1:RNF11:NM_014372:51474532:51475139:+ | E1:chr5:STC2:NM_003714:172674331:172677858:− | ER+ Breast Tumor |
| 227 | | | ER+ Breast Tumor |
| 228 | E2:chr17:RPL19:NM_000981:34610991:34611098:+ | E4:chr19:RPS16:NM_001020:44618086:44618188:− | Triple Negative Breast |
| | | | Tumor |
| 229 | | | HER2+ Breast Tumor |
| 230 | | | Triple Negative Breast |
| | | | Tumor |
| 231 | E4:chr19:RPS16:NM_001020:44618086:44618188:− | E3:chr2:TMSB10:NM_021103:84987023:84987310:+ | Triple Negative Breast |
| | | | Tumor |
| 232 | | | HER2+ Breast Tumor |
| 233 | | | HER2+ Breast Tumor |
| 234 | | | Triple Negative Breast |
| | | | Tumor |
| 235 | E5:chr22:SFI1:NM_001007467:30272846:30272957:+ | E4:chr22:YPEL1:NM_013313:20394916:20395197:− | ER+ Breast Tumor |
| 236 | E1:chr17:SLC9A3R1:NM_004252:70256357:70257021:+ | E2:chr7:TNRC18:NM_001080495:5315031:5315106:− | Triple Negative Breast |
| | | | Tumor |
| 237 | E2:chr2:SOCS5:NM_014011:46839161:46843431:+ | E1:chr2:TTC7A:NM_020458:47021816:47022368:+ | Triple Negative Breast |
| | | | Tumor |
| 238 | | | ER+ Breast Tumor |
| 239 | | | Triple Negative Breast |
| | | | Tumor |
| 240 | E1:chr5:SPARC:NM_003118:151021201:151023353:− | E7:chr8:TRPS1:NM_014112:116749945:116750402:− | ER+ Breast Tumor |
| 241 | E5:chr5:SPARC:NM_003118:151029417:151029538:− | E7:chr8:TRPS1:NM_014112:116749945:116750402:− | ER+ Breast Tumor |
| 242 | | | HER2+ Breast Tumor |
| 243 | | | ER+ Breast Tumor |
| 244 | | | ER+ Breast Tumor |
| 245 | E3:chr6:SRPK1:NM_003137:35918289:35918359:− | E1:chr6:UBR2:NM_001184801:42639737:42640113:+ | ER+ Breast Tumor |
| 246 | E1:chr8:YWHAZ:NM_001135700:101999980:102002156:− | E3:chrX:ZBTB33:NM_001184742:119271296:119276279:+ | Triple Negative Breast |
| | | | Tumor |
| 247 | | | Triple Negative Breast |
| | | | Tumor |

In the “Row #” column for Table 8, sentinel transcripts are identified with an * symbol; redundant transcripts are identified with a $ symbol; and transcripts that are expressed as multiple isoforms are identified with a + symbol.

### Tumor Subtype Distribution of Fusion Transcripts

[0066] Every tumor expressed at least one redundant fusion transcript, with a range of 1-13 redundant transcripts/tumor (Table 9). Among the redundant transcripts, seven were uniquely expressed in ER+ tumors and eight in TN tumors (labeled with oval symbols in FIG. 6), but no redundant transcript was exclusively expressed in HER2+ tumors. Private transcripts were detected at a range of 0-12/tumor (Table 9). ER+ and TN tumors expressed similar numbers of fusion transcripts, whereas HER2+ tumors expressed significantly fewer fusions (Table 9). However, a few HER2+ tumors expressed levels of fusions that were comparable to those observed in ER+ or TN tumors (see, e.g., HER2+ tumor s_{—}29 in Table 8). It is possible that the expression of large numbers of fusion transcripts is indicative of a subset of HER2+ tumors that have unusually high genomic instability, with implications for therapeutic response. Fusion transcripts represented a heretofore underappreciated class of genomic features that may have considerable potential as biomarkers or therapeutic targets in breast cancer.

TABLE 9
Distribution of fusion transcripts among tumors subtypes. Tumor subtype-
specific incidence was abstracted from Table 8. Statistical analysis was performed by
ANOVA.

| | | | Number of | | | Number of | Subtype | Fusions |
|---|---|---|---|---|---|---|---|---|
| | | | Genes in | | Range | Genes in | Specific | with |
| Tumor | Private | Range Private | Private | Redundant | Redundant. | Redundant | Redundant | Multiple |
| Subtype | Fusions | Fusions/Tumor | Fusions | Fusions | Fusions/Tumor | Fusions | Fusions | Isoforms |
| All | 86 | 0 to 12 | 149 | 45 | 1 to 13 | 76 | — | 6 |
| Tumors | | | | | | | | |
| HER2 | 17⁽¹⁾ | 0 to 5 | 34 | 19⁽²⁾ | 1 to 9 | 33 | 0 | 1 |
| Tumors | | | | | | | | |
| ER+ | 30 | 0 to 9 | 51 | 32 | 2 to 12 | 55 | 7 | 2 |
| Tumors | | | | | | | | |
| TN | 39 | 2 to 12 | 68 | 32 | 3 to 13 | 53 | 8 | 3 |
| Tumors | | | | | | | | |

⁽¹⁾p = 0.25 re. ER+, p = 0.036 re. TN
⁽²⁾p = 0.006 re. ER+, p = 0.02 re. TN

### Chromosomal Distribution of Fusion Transcript Partners

[0067] The chromosomal mapping distribution of the sentinel fusions was clearly non-random (FIG. 7A). A disproportionately large number of fusion transcript partners were located on chromosomes 1, 2, 17, and 19 (FIG. 7B), whereas relatively few fusion transcript partners are located on chromosomes 4, 9, 13, 15, 20, and 21. It was difficult, because of the relatively small numbers, to make any rigorous conclusions with respect to tumor-subtype-specific distribution of fusion transcripts. However, chromosome 19 appeared to be a ‘hot spot’ for TN tumors. Circos plots of ER+ specific and TN specific redundant fusion gene partners (FIG. 7A) indicated that there is a subtype-specific fusion transcript geography, suggesting a functional link between breast tumor subtype and formation of fusion transcripts. The observation that HER2+ tumors, as a group, express significantly fewer fusion transcripts was consistent with this hypothesis.

[0068] A number of distinct clusters emerged when the fusion partner genes were mapped to genomic loci (FIG. 8). Two major clusters were observed on chromosome 17, mapping to 17q21-q23, and 17q25. Both of these regions are well-known to undergo copy number variation in breast cancer. All of the chromosome 19 fusion partners in TN tumors mapped to clusters located in the vicinity of 19p13 or 19q13. One large cluster of genes at 11q13.1-q13.4 was restricted to ER+ tumors (arrow in FIG. 8 labeled with two asterisks), a small cluster of genes at 1q21.2-q21.3 was restricted to HER2+ tumors (arrow in FIG. 8 labeled with one asterisk), and genes that clustered at 8q24.3, 12q13.13, and 17q25.1-q25.3 were restricted to TN tumors (arrows in FIG. 8 labeled with three asterisks).

[0069] Limited data from genomic analysis of both breast cancer cell lines (Edgren et al., Genome Biol., 12:R6 (2011)) and tumors (Inaki et al., Genome Res., 21:676-87 (2011); and Stephens et al., Nature, 462:1005-10 (2009)) indicate that genomic rearrangement is the primary mechanism whereby most fusion transcripts are generated. Furthermore, review of the array comparative genomic hybridization (aCGH) data on breast cancer revealed that many of the fusion partners that were identified map to regions that are known to undergo copy number gain or loss in breast tumors. This correlation was evident when one considers chromosome 17, which contained 33 genes that contributed to fusion transcripts. Among these genes, six mapped to a cluster at 17q12, 5 to 17q21, and 6 to 17q25. All three of these loci are known to undergo copy number variation in breast cancer (Stephens et al., Nature, 462:1005-10 (2009); Adelaide et al., Cancer Res., 67:11565-75 (2007); Andre et al., Clin. Cancer Res., 15:441-51 (2009); and Bae et al., World J. Surg. Oncol., 8:32 (2010)). The distribution of fusion partners on chromosome 19 was even more striking. All of the genes map to either 19p12-p13 or 19q13. Both aCGH and genome wide association data indicated that these two regions are important in breast cancer, particularly the triple negative subtype (Antoniou et al., Nat. Genet., 42:885-92 (2010); and Yang et al., Genes Chromosomes Cancer, 41:250-6 (2004)). Based on these considerations, most of the fusion transcripts appeared to arise due to chromosomal rearrangements and therefore marked areas of local chromosomal instability.

### Structure and Potential Functional Significance of Predicted Fusion Transcript Products

[0070] SnowShoes_FTD assembled the predicted nucleotide sequences of the candidate fusion transcripts and translated that sequence into the predicted amino acid sequences of the putative fusion proteins (Table 10). Fusion transcripts in breast cancer cell lines fall into several broad categories based on the location with the transcription unit wherein the fusion occurs. A small number of fusions occurred in 5′ UTR regions (FIG. 6), placing the coding sequence of the 3′ fusion partner under the control of the promoter from the 5′ fusion partner. A ‘promoter swap’ event of this sort was associated with ERBB2 overexpression in a breast cancer cell line derived from a HER2+ tumor.

TABLE 10
Predicted nucleotide sequence of candidate fusion transcripts and predicted amino acid sequence of translations products.

| # | FUSION | Transcripts | In frame | Junction Point Mutations | Boundary Exon 5′ Gene |
|---|---|---|---|---|---|
| 1 | KCTD3->TXNDC16 | NM_016121->NM_001160047 | | | E8: chr1: 213819874-213819965 |
| 2 | KCTD3->TXNDC16 | NM_016121->NM_020784 | | | E8: chr1: 213819874-213819965 |
| 3 | ITGB4->ACTB | NM_000213->NM_001101 | | | E153: chr17: 71261440-71261650 |
| 4 | ITGB4->ACTB | NM_000213->NM_001101 | | | E153: chr17: 71261440-71261650 |
| 5 | PDHX->CAT | NM_003477->NM_001752 | YES | | E2: chr11: 34909526-34909607 |
| 6 | PDHX->CAT | NM_001135024->NM_001752 | YES | | E2: chr11: 34909526-34909607 |
| 7 | PDHX->CAT | NM_001166158->NM_001752 | YES | | E2: chr11: 34909526-34909607 |
| 8 | EPN1->COL1A1 | NM_013333->NM_000088 | | | E20: chr19: 60898325-60898945 |
| 9 | EPN1->COL1A1 | NM_001130072->NM_000088 | | | E22: chr19: 60898325-60898945 |
| 10 | EPN1->COL1A1 | NM_001130071->NM_000088 | | | E22: chr19: 60898325-60898945 |
| 11 | CWC25->ROBO2 | NM_017748->NM_002942 | | | E2: chr17: 34230679-34230852 |
| 12 | CWC25->ROBO2 | NM_017748->NM_001128929 | YES | AGC->AAC(S->N) | E2: chr17: 34230679-34230852 |
| 13 | LTBP4->CTSD | NM_003573->NM_001909 | YES | | E33: chr19: 45827140-45827565 |
| 14 | LTBP4->CTSD | NM_001042544->NM_001909 | YES | | E33: chr19: 45827140-45827565 |
| 15 | LTBP4->CTSD | NM_001042545->NM_001909 | YES | | E30: chr19: 45827140-45827565 |
| 16 | MIR1204->PVT1 | NR_031609->NR_003367 | YES | | E1: chr8: 128877389-128877456 |
| 17 | MIR1204->PVT1 | NR_031609->NR_003367 | YES | | E1: chr8: 128877389-128877456 |
| 18 | MIR1204->PVT1 | NR_031609->NR_003367 | YES | | E1: chr8: 128877389-128877456 |
| 19 | MIR1204->PVT1 | NR_031609->NR_003367 | YES | | E1: chr8: 128877389-128877456 |
| 20 | MIR1204->PVT1 | NR_031609->NR_003367 | YES | | E1: chr8: 128877389-128877456 |
| 21 | MIR1204->PVT1 | NR_031609->NR_003367 | YES | | E1: chr8: 128877389-128877456 |
| 22 | MIR1204->PVT1 | NR_031609->NR_003367 | YES | | E1: chr8: 128877389-128877456 |
| 23 | MIR1204->PVT1 | NR_031609->NR_003367 | YES | | E1: chr8: 128877389-128877456 |
| 24 | PTMA->SDC4 | NM_001099285->NM_002999 | YES | | E40: chr2: 232285757-232286494 |
| 25 | PTMA->SDC4 | NM_002823->NM_002999 | YES | | E40: chr2: 232285757-232286494 |
| 26 | SERINC2->KRT5 | NM_178865->NM_000424 | | | E7: chr1: 31674411-31674502 |
| 27 | NPLOC4->PDE6G | NM_017921->NM_002602 | | | E12: chr17: 77166406-77166567 |
| 28 | NPLOC4->PDE6G | NM_017921->NR_026872 | (part of | | E12: chr17: 77166406-77166567 |
| | | | NPLOC4) | | |
| 29 | SFN->CTSD | NM_006142->NM_001909 | YES | | E2: chr1: 27062219-27063534 |
| 30 | KRT7->KRT14 | NM_005556->NM_000526 | YES | | E54: chr12: 50928641-50928976 |
| 31 | FKBP1A->SDCBP2 | NM_000801->NM_080489 | YES | | E2: chr20: 1321477-1321525 |
| 32 | FKBP1A->SDCBP2 | NM_054014->NM_080489 | | | E2: chr20: 1321477-1321525 |
| 33 | FKBP1A->SDCBP2 | NM_000801->NM_080489 | | | E2: chr20: 1321477-1321525 |
| 34 | FKBP1A->SDCBP2 | NM_054014->NM_080489 | | | E2: chr20: 1321477-1321525 |
| 35 | GLI3->FAM3B | NM_000168->NM_206964 | | | E2: chr7: 42229253-42229419 |
| 36 | GLI3->FAM3B | NM_000168->NM_058186 | | | E2: chr7: 42229253-42229419 |
| 37 | KRT7->ACTB | NM_005556->NM_001101 | YES | | E52: chr12: 50925462-50925683 |
| 38 | ILF3->KRT5 | NM_012218->NM_000424 | YES | | E38: chr19: 10659021-10659384 |
| 39 | ILF3->KRT5 | NM_017620->NM_000424 | YES | | E38: chr19: 10659021-10659384 |
| 40 | SLC39A6->LRIG1 | NM_012319->NM_015541 | | | E2: chr18: 31960179-31960977 |
| 41 | COL1A1->FMNL3 | NM_000088->NM_175736 | YES | | E51: chr17: 45616455-45618008 |
| 42 | COL1A1->FMNL3 | NM_000088->NM_198900 | YES | | E51: chr17: 45616455-45618008 |
| 43 | COL1A2->MAZ | NM_000089->NM_002383 | | | E620: chr7: 93894435-93894543 |
| 44 | COL1A2->MAZ | NM_000089->NM_001042539 | | | E620: chr7: 93894435-93894543 |
| 45 | PTRF->TAPBP | NM_012232->NM_003190 | YES | | E2: chr17: 37807994-37810932 |
| 46 | PTRF->TAPBP | NM_012232->NM_172209 | YES | | E2: chr17: 37807994-37810932 |
| 47 | LOC96610->IGLL5 | NR_027293->NM_001178126 | NOT Evaluated | | E11: chr22: 21007018-21007324 |
| 48 | LOC96610->IGLL5 | NR_027293->NM_001178126 | NOT Evaluated | | E11: chr22: 21007018-21007324 |
| 49 | VPS35->DCN | NM_018206->NM_133506 | YES | | E17: chr16: 45251089-45252064 |
| 50 | VPS35->DCN | NM_018206->NM_133503 | YES | | E17: chr16: 45251089-45252064 |
| 51 | VPS35->DCN | NM_018206->NM_001920 | YES | | E17: chr16: 45251089-45252064 |
| 52 | VPS35->DCN | NM_018206->NM_133506 | YES | | E17: chr16: 45251089-45252064 |
| 53 | VPS35->DCN | NM_018206->NM_133503 | YES | | E17: chr16: 45251089-45252064 |
| 54 | VPS35->DCN | NM_018206->NM_001920 | YES | | E17: chr16: 45251089-45252064 |
| 55 | GAPDH->KRT13 | NM_002046->NM_153490 | YES | | E108: chr12: 6517527-6517797 |
| 56 | GAPDH->KRT13 | NM_002046->NM_002274 | YES | | E108: chr12: 6517527-6517797 |
| 57 | SPATS2L->COL3A1 | NM_015535->NM_000090 | YES | | E13: chr2: 201050603-201055231 |
| 57 | SPATS2L->COL3A1 | NM_001100422->NM_000090 | YES | | E13: chr2: 201050603-201055231 |
| 59 | SPATS2L->COL3A1 | NM_001100424->NM_000090 | YES | | E12: chr2: 201050603-201055231 |
| 60 | SPATS2L->COL3A1 | NM_001100423->NM_000090 | YES | | E13: chr2: 201050603-201055231 |
| 61 | YWHAG->CYB561 | NM_012479->NM_001017917 | YES | | E2: chr7: 75794043-75797486 |
| 62 | YWHAG->CYB561 | NM_012479->NM_001017916 | YES | | E2: chr7: 75794043-75797486 |
| 63 | YWHAG->CYB561 | NM_012479->NM_001915 | YES | | E2: chr7: 75794043-75797486 |
| 64 | LASP1->ACTN1 | NM_006148->NM_001102 | YES | | E7: chr17: 34328383-34331548 |
| 65 | LASP1->ACTN1 | NM_006148->NM_001130004 | YES | | E7: chr17: 34328383-34331548 |
| 66 | LASP1->ACTN1 | NM_006148->NM_001130005 | YES | | E7: chr17: 34328383-34331548 |
| 67 | ANP32E->MYST4 | NM_030920->NM_012330 | YES | | E7: chr1: 148457341-148459687 |
| 68 | ANP32E->MYST4 | NM_001136478->NM_012330 | YES | | E6: chr1: 148457341-148459687 |
| 69 | ANP32E->MYST4 | NM_001136479->NM_012330 | YES | | E7: chr1: 148457341-148459687 |
| 70 | COL1A1->BASP1 | NM_000088->NM_006317 | YES | | E51: chr17: 45616455-45618008 |
| 71 | COL1A1->MBD6 | NM_000088->NM_052897 | YES | | E51: chr17: 45616455-45618008 |
| 72 | TSPAN14->HLA-E | NM_030927->NM_005516 | YES | | E9: chr10: 82267640-82272371 |
| 73 | TSPAN14->HLA-E | NM_001128309->NM_005516 | YES | | E6: chr10: 82267640-82272371 |
| 74 | TSPAN14->HLA-E | NM_030927->NM_005516 | YES | | E9: chr10: 82267640-82272371 |
| 75 | TSPAN14->HLA-E | NM_001128309->NM_005516 | YES | | E6: chr10: 82267640-82272371 |
| 76 | COL1A1->PLEC | NM_000088->NM_201383 | | | E44: chr17: 45620455-45620509 |
| 77 | COL1A1->PLEC | NM_000088->NM_201384 | (part of | | E44: chr17: 45620455-45620509 |
| | | | COL1A1) | | |
| 78 | COL1A1->PLEC | NM_000088->NM_000445 | (part of | | E44: chr17: 45620455-45620509 |
| | | | COL1A1) | | |
| 79 | COL1A1->PLEC | NM_000088->NM_201381 | | | E44: chr17: 45620455-45620509 |
| 80 | COL1A1->PLEC | NM_000088->NM_201382 | | | E44: chr17: 45620455-45620509 |
| 81 | COL1A1->PLEC | NM_000088->NM_201380 | | | E44: chr17: 45620455-45620509 |
| 82 | COL1A1->PLEC | NM_000088->NM_201378 | | | E44: chr17: 45620455-45620509 |
| 83 | COL1A1->PLEC | NM_000088->NM_201379 | | | E44: chr17: 45620455-45620509 |
| 84 | COL1A1->PLEC | NM_000088->NM_201383 | | | E44: chr17: 45620455-45620509 |
| 85 | COL1A1->PLEC | NM_000088->NM_201384 | | | E44: chr17: 45620455-45620509 |
| 86 | COL1A1->PLEC | NM_000088->NM_000445 | | | E44: chr17: 45620455-45620509 |
| 87 | MMP14->ACTB | NM_004995->NM_001101 | | | E7: chr14: 22383419-22383558 |
| 88 | KRT5->HNRNPA2B1 | NM_000424->NM_002137 | YES | | E9: chr12: 51194625-51195291 |
| 89 | KRT5->HNRNPA2B1 | NM_000424->NM_031243 | YES | | E9: chr12: 51194625-51195291 |
| 90 | FN1->YWHAG | NM_002026->NM_012479 | (part of FN1) | | E37: chr2: 215948181-215948361 |
| 91 | FN1->YWHAG | NM_212482->NM_012479 | (part of FN1) | | E38: chr2: 215948181-215948361 |
| 92 | FN1->YWHAG | NM_212474->NM_012479 | (part of FN1) | | E36: chr2: 215948181-215948361 |
| 93 | FN1->YWHAG | NM_212476->NM_012479 | (part of FN1) | | E36: chr2: 215948181-215948361 |
| 94 | FN1->YWHAG | NM_212478->NM_012479 | (part of FN1) | | E37: chr2: 215948181-215948361 |
| 95 | ATN1->KRT14 | NM_001940->NM_000526 | YES | TTT->CCT(F->P) | E17: chr12: 6917904-6918601 |
| 96 | ATN1->KRT14 | NM_001007026->NM_000526 | YES | TTT->CCT(F->P) | E17: chr12: 6917904-6918601 |
| 97 | ALDOA->KRT5 | NM_184043->NM_000424 | NOT Evaluated | | E29: chr16: 29986055-29986188 |
| 98 | ALDOA->KRT5 | NM_184041->NM_000424 | NOT Evaluated | | E29: chr16: 29986055-29986188 |
| 99 | ALDOA->KRT5 | NM_001127617->NM_000424 | NOT Evaluated | | E29: chr16: 29986055-29986188 |
| 100 | ALDOA->KRT5 | NM_000034->NM_000424 | NOT Evaluated | | E49: chr16: 29986055-29986188 |
| 101 | CD74->MBD6 | NM_001025158->NM_052897 | YES | | E6: chr5: 149761392-149762006 |
| 102 | CALR->ZFP36L1 | NM_004343->NM_004926 | YES | | E72: chr19: 12915526-12916304 |
| 103 | ZFP36L1->CALR | NM_004926->NM_004343 | YES | | E2: chr14: 68324127-68326962 |
| 104 | CALR->ZFP36L1 | NM_004343->NM_004926 | YES | | E72: chr19: 12915526-12916304 |
| 105 | SAMD4B->COL1A1 | NM_018028->NM_000088 | | | E39: chr19: 44558129-44558369 |
| 106 | SAMD4B->COL1A1 | NM_018028->NM_000088 | | | E39: chr19: 44558129-44558369 |
| 107 | COL4A2->COL1A1 | NM_001846->NM_000088 | | | E79: chr13: 109930567-109930738 |
| 108 | COL4A2->COL1A1 | NM_001846->NM_000088 | YES | GAG->AAG(E->K) | E91: chr13: 109953730-109953829 |
| 109 | RPS15->PLEC | NM_001018->NM_201381 | YES | ATG->GAG(M->E) | E3: chr19: 1391017-1391252 |
| 110 | RPS15->PLEC | NM_001018->NM_201382 | YES | ATG->GAG(M->E) | E3: chr19: 1391017-1391252 |
| 111 | RPS15->PLEC | NM_001018->NM_201380 | YES | ATG->GAG(M->E) | E3: chr19: 1391017-1391252 |
| 112 | RPS15->PLEC | NM_001018->NM_201378 | YES | ATG->GAG(M->E) | E3: chr19: 1391017-1391252 |
| 113 | RPS15->PLEC | NM_001018->NM_201379 | YES | ATG->GAG(M->E) | E3: chr19: 1391017-1391252 |
| 114 | RPS15->PLEC | NM_001018->NM_201383 | YES | ATG->GAG(M->E) | E3: chr19: 1391017-1391252 |
| 115 | RPS15->PLEC | NM_001018->NM_201384 | YES | ATG->GAG(M->E) | E3: chr19: 1391017-1391252 |
| 116 | RPS15->PLEC | NM_001018->NM_000445 | YES | ATG->GAG(M->E) | E3: chr19: 1391017-1391252 |
| 117 | EPHA2->CTSD | NM_004431->NM_001909 | YES | | E17: chr1: 16323419-16324402 |
| 118 | IFI27->CPNE3 | NM_001130080->NM_003909 | YES | | E5: chr14: 93652531-93652786 |
| 119 | IFI27->CPNE3 | NM_005532->NM_003909 | YES | | E5: chr14: 93652531-93652786 |
| 120 | SLC16A3->MRPL4 | NM_004207->NM_146388 | | | E4: chr17: 77788302-77789058 |
| 121 | SLC16A3->MRPL4 | NM_001042422->NM_146388 | | | E4: chr17: 77788302-77789058 |
| 122 | SLC16A3->MRPL4 | NM_001042423->NM_146388 | | | E4: chr17: 77788302-77789058 |
| 123 | KRT18->PLEC | NM_199187->NM_201381 | YES | CTG->GTG(L->V) | E7: chr12: 51632169-51632393 |
| 124 | KRT18->PLEC | NM_199187->NM_201382 | YES | CTG->GTG(L->V) | E7: chr12: 51632169-51632393 |
| 125 | KRT18->PLEC | NM_199187->NM_201380 | YES | CTG->GTG(L->V) | E7: chr12: 51632169-51632393 |
| 126 | KRT18->PLEC | NM_199187->NM_201378 | YES | CTG->GTG(L->V) | E7: chr12: 51632169-51632393 |
| 127 | KRT18->PLEC | NM_199187->NM_201379 | YES | CTG->GTG(L->V) | E7: chr12: 51632169-51632393 |
| 128 | KRT18->PLEC | NM_199187->NM_201383 | YES | CTG->GTG(L->V) | E7: chr12: 51632169-51632393 |
| 129 | KRT18->PLEC | NM_199187->NM_201384 | YES | CTG->GTG(L->V) | E7: chr12: 51632169-51632393 |
| 130 | KRT18->PLEC | NM_199187->NM_000445 | YES | CTG->GTG(L->V) | E7: chr12: 51632169-51632393 |
| 131 | KRT18->PLEC | NM_000224->NM_201381 | YES | CTG->GTG(L->V) | E6: chr12: 51632169-51632393 |
| 132 | KRT18->PLEC | NM_000224->NM_201382 | YES | CTG->GTG(L->V) | E6: chr12: 51632169-51632393 |
| 133 | KRT18->PLEC | NM_000224->NM_201380 | YES | CTG->GTG(L->V) | E6: chr12: 51632169-51632393 |
| 134 | KRT18->PLEC | NM_000224->NM_201378 | YES | CTG->GTG(L->V) | E6: chr12: 51632169-51632393 |
| 135 | KRT18->PLEC | NM_000224->NM_201379 | YES | CTG->GTG(L->V) | E6: chr12: 51632169-51632393 |
| 136 | KRT18->PLEC | NM_000224->NM_201383 | YES | CTG->GTG(L->V) | E6: chr12: 51632169-51632393 |
| 137 | KRT18->PLEC | NM_000224->NM_201384 | YES | CTG->GTG(L->V) | E6: chr12: 51632169-51632393 |
| 138 | KRT18->PLEC | NM_000224->NM_000445 | YES | CTG->GTG(L->V) | E6: chr12: 51632169-51632393 |
| 139 | C2orf56->SAMD4B | NM_144736->NM_018028 | YES | | E10: chr2: 37328781-37329807 |
| 140 | C2orf56->SAMD4B | NM_001083946->NM_018028 | YES | | E8: chr2: 37328781-37329807 |
| 141 | POSTN->TRIM33 | NM_001135935->NM_015906 | YES | | E21: chr13: 37034719-37035507 |
| 142 | POSTN->TRIM33 | NM_001135935->NM_033020 | YES | | E21: chr13: 37034719-37035507 |
| 143 | POSTN->TRIM33 | NM_006475->NM_015906 | YES | | E23: chr13: 37034719-37035507 |
| 144 | POSTN->TRIM33 | NM_006475->NM_033020 | YES | | E23: chr13: 37034719-37035507 |
| 145 | POSTN->TRIM33 | NM_001135934->NM_015906 | YES | | E21: chr13: 37034719-37035507 |
| 146 | POSTN->TRIM33 | NM_001135934->NM_033020 | YES | | E21: chr13: 37034719-37035507 |
| 147 | POSTN->TRIM33 | NM_001135936->NM_015906 | YES | | E20: chr13: 37034719-37035507 |
| 148 | POSTN->TRIM33 | NM_001135936->NM_033020 | YES | | E20: chr13: 37034719-37035507 |
| 149 | GPAA1->CD24 | NM_003801->NM_013230 | | | E4: chr8: 145210604-145210752 |
| 150 | GPAA1->CD24 | NM_003801->NM_013230 | YES | CTG->GTG(L->V) | E4: chr8: 145210604-145210752 |
| 151 | DNM2->PIN1 | NM_004945->NM_006221 | | | E11: chr19: 10770161-10770248 |
| 152 | DNM2->PIN1 | NM_001190716->NM_006221 | | | E11: chr19: 10770161-10770248 |
| 153 | DNM2->PIN1 | NM_001005360->NM_006221 | | | E11: chr19: 10770161-10770248 |
| 154 | DNM2->PIN1 | NM_001005361->NM_006221 | | | E11: chr19: 10770161-10770248 |
| 155 | DNM2->PIN1 | NM_001005362->NM_006221 | YES | CTG->GTG(L->V) | E11: chr19: 10770161-10770248 |
| 156 | KRT5->KRT14 | NM_000424->NM_000526 | YES | | E9: chr12: 51194625-51195291 |
| 157 | COL3A1->COL1A1 | NM_000090->NM_000088 | | | E609: chr2: 189581894-189582192 |
| 158 | COL18A1->SPARC | NM_130444->NM_003118 | | | E35: chr21: 45749475-45749620 |
| 159 | COL18A1->SPARC | NM_130445->NM_003118 | | | E36: chr21: 45749475-45749620 |
| 160 | COL18A1->SPARC | NM_030582->NM_003118 | | | E35: chr21: 45749475-45749620 |
| 161 | SPARC->COL18A1 | NM_003118->NM_130444 | YES | | E2: chr5: 151035885-151035955 |
| 162 | SPARC->COL18A1 | NM_003118->NM_130445 | YES | | E2: chr5: 151035885-151035955 |
| 163 | SPARC->COL18A1 | NM_003118->NM_030582 | YES | | E2: chr5: 151035885-151035955 |
| 164 | COL18A1->SPARC | NM_130444->NM_003118 | | | E35: chr21: 45749475-45749620 |
| 165 | COL18A1->SPARC | NM_130445->NM_003118 | | | E36: chr21: 45749475-45749620 |
| 166 | COL18A1->SPARC | NM_030582->NM_003118 | | | E35: chr21: 45749475-45749620 |
| 167 | COL18A1->SPARC | NM_130444->NM_003118 | | | E35: chr21: 45749475-45749620 |
| 168 | COL18A1->SPARC | NM_130445->NM_003118 | | | E36: chr21: 45749475-45749620 |
| 169 | COL18A1->SPARC | NM_030582->NM_003118 | | | E35: chr21: 45749475-45749620 |
| 170 | IGFBP5->AMD1 | NM_000599->NM_001634 | YES | | E4: chr2: 217245072-217249850 |
| 171 | CPSF6->COL1A1 | NM_007007->NM_000088 | | | E5: chr12: 67937778-67937952 |
| 172 | CPSF6->COL1A1 | NM_007007->NM_000088 | | | E5: chr12: 67937778-67937952 |
| 173 | PRPF40A->RPL14 | NM_017892->NM_003973 | | | E10: chr2: 153241164-153241539 |
| 174 | PRPF40A->RPL14 | NM_017892->NM_001034996 | | | E10: chr2: 153241164-153241539 |
| 175 | RALGPS2->LAMB3 | NM_152663->NM_001017402 | | | E16: chr1: 177129676-177129782 |
| 176 | RALGPS2->LAMB3 | NM_152663->NM_001127641 | | | E16: chr1: 177129676-177129782 |
| 177 | RALGPS2->LAMB3 | NM_152663->NM_000228 | | | E16: chr1: 177129676-177129782 |
| 178 | COL1A1->FGD2 | NM_000088->NM_173558 | | | E49: chr17: 45618676-45618867 |
| 179 | CTTN->NCRNA00201 | NM_005231->NR_026778 | YES | | E36: chr11: 69958779-69960338 |
| 180 | FBLIM1->F3 | NM_017556->NM_001178096 | YES | | E9: chr1: 15983629-15985671 |
| 181 | FBLIM1->F3 | NM_017556->NM_001993 | YES | | E9: chr1: 15983629-15985671 |
| 182 | FBLIM1->F3 | NM_001024216-> | YES | | E5: chr1: 15983629-15985671 |
| | | NM_001178096 | | | |
| 183 | FBLIM1->F3 | NM_001024216->NM_001993 | YES | | E5: chr1: 15983629-15985671 |
| 184 | GAPDH->MRPS18B | NM_002046->NM_014046 | YES | | E108: chr12: 6517527-6517797 |
| 185 | HSP90AB1->PCGF2 | NM_007355->NM_007144 | YES | | E71: chr6: 44328759-44329093 |
| 186 | RPS2->HRAS | NM_002952->NM_001130442 | YES | | E2: chr16: 1954450-1954630 |
| 187 | RPS2->HRAS | NM_002952->NM_005343 | | | E2: chr16: 1954450-1954630 |
| 188 | RPS2->HRAS | NM_002952->NM_176795 | | | E2: chr16: 1954450-1954630 |
| 189 | RNF213->KRT5 | NM_020914->NM_000424 | YES | | E138: chr17: 75981739-75984680 |
| 190 | PRINS->KIAA1217 | NR_023388->NM_001098500 | NOT Evaluated | | E2: chr10: 24584056-24584981 |
| 191 | PRINS->KIAA1217 | NR_023388->NM_001098501 | NOT Evaluated | | E2: chr10: 24584056-24584981 |
| 192 | PRINS->KIAA1217 | NR_023388->NM_019590 | NOT Evaluated | | E2: chr10: 24584056-24584981 |
| 193 | KRT14->NOTCH2 | NM_000526->NM_024408 | | | E6: chr17: 36993012-36993233 |
| 194 | UBR2->SRPK1 | NM_001184801->NR_034069 | (part of UBR2) | | E1: chr6: 42639737-42640113 |
| 195 | UBR2->SRPK1 | NM_001184801->NM_003137 | YES | | E1: chr6: 42639737-42640113 |
| 196 | UBR2->SRPK1 | NM_015255->NR_034069 | (part of UBR2) | | E1: chr6: 42639737-42640113 |
| 197 | UBR2->SRPK1 | NM_015255->NM_003137 | YES | | E1: chr6: 42639737-42640113 |
| 198 | GEMIN7->SLC39A14 | NM_001007270->NM_015359 | YES | | E1: chr19: 50274357-50274377 |
| 199 | GEMIN7->5LC39A14 | NM_001007270->NM_001128431 | YES | | E1: chr19: 50274357-50274377 |
| 200 | GEMIN7->5LC39A14 | NM_001007270->NM_001135154 | YES | | E1: chr19: 50274357-50274377 |
| 201 | GEMIN7->5LC39A14 | NM_001007270->NM_001135153 | YES | | E1: chr19: 50274357-50274377 |
| 202 | GEMIN7->SLC39A14 | NM_024707->NM_015359 | YES | | E1: chr19: 50274357-50274377 |
| 203 | GEMIN7->SLC39A14 | NM_024707->NM_001128431 | YES | | E1: chr19: 50274357-50274377 |
| 204 | GEMIN7->SLC39A14 | NM_024707->NM_001135154 | YES | | E1: chr19: 50274357-50274377 |
| 205 | GEMIN7->SLC39A14 | NM_024707->NM_001135153 | YES | | E1: chr19: 50274357-50274377 |
| 206 | GEMIN7->5LC39A14 | NM_001007270->NM_015359 | YES | | E2: chr19: 50275004-50275127 |
| 207 | GEMIN7->5LC39A14 | NM_001007270->NM_001128431 | YES | | E2: chr19: 50275004-50275127 |
| 208 | GEMIN7->5LC39A14 | NM_001007270->NM_001135154 | YES | | E2: chr19: 50275004-50275127 |
| 209 | GEMIN7->5LC39A14 | NM_001007270->NM_001135153 | YES | | E2: chr19: 50275004-50275127 |
| 210 | GEMIN7->5LC39A14 | NM_024707->NM_015359 | YES | | E2: chr19: 50275004-50275127 |
| 211 | GEMIN7->5LC39A14 | NM_024707->NM_001128431 | YES | | E2: chr19: 50275004-50275127 |
| 212 | GEMIN7->5LC39A14 | NM_024707->NM_001135154 | YES | | E2: chr19: 50275004-50275127 |
| 213 | GEMIN7->5LC39A14 | NM_024707->NM_001135153 | YES | | E2: chr19: 50275004-50275127 |
| 214 | IRF2BP2->ACTB | NM_182972->NM_001101 | YES | | E2: chr1: 232806637-232810221 |
| 215 | IRF2BP2->ACTB | NM_001077397->NM_001101 | YES | | E2: chr1: 232806637-232810221 |
| 216 | TMSB10->RPS16 | NM_021103->NM_001020 | YES | GGC->ACC(G->T) | E6: chr2: 84987023-84987310 |
| 217 | LOC728606->KCTD1 | NR_024259->NM_001142730 | YES | | E1: chr18: 22537353-22537600 |
| 218 | LOC728606->KCTD1 | NR_024259->NM_001136205 | YES | | E1: chr18: 22537353-22537600 |
| 219 | LOC728606->KCTD1 | NR_024259->NM_198991 | YES | | E1: chr18: 22537353-22537600 |
| 220 | LOC728606->KCTD1 | NR_024259->NM_001142730 | YES | | E1: chr18: 22537353-22537600 |
| 221 | LOC728606->KCTD1 | NR_024259->NM_001136205 | YES | | E1: chr18: 22537353-22537600 |
| 222 | LOC728606->KCTD1 | NR_024259->NM_198991 | YES | | E1: chr18: 22537353-22537600 |
| 223 | PALLD->KRT5 | NM_001166110->NM_000424 | YES | | E2: chr4: 170035448-170036120 |
| 224 | PALLD->KRT5 | NM_001166110->NM_000424 | YES | | E2: chr4: 170035448-170036120 |
| 225 | AEBP1->THRA | NM_001129->NM_199334 | | | E39: chr7: 44118681-44119033 |
| 226 | AEBP1->THRA | NM_001129->NM_003250 | | | E39: chr7: 44118681-44119033 |
| 227 | AEBP1->THRA | NM_001129->NM_001190918 | | | E39: chr7: 44118681-44119033 |
| 228 | FLNA->ABCA2 | NM_001110556->NM_001606 | (part of FLNA) | | E46: chrX: 153231210-153231429 |
| 229 | FLNA->ABCA2 | NM_001110556->NM_212533 | (part of FLNA) | | E46: chrX: 153231210-153231429 |
| 230 | FLNA->ABCA2 | NM_001456->NM_001606 | (part of FLNA) | | E45: chrX: 153231210-153231429 |
| 231 | FLNA->ABCA2 | NM_001456->NM_212533 | (part of FLNA) | | E45: chrX: 153231210-153231429 |
| 232 | FTL->ADD3 | NM_000146->NM_019903 | YES | | E8: chr19: 54161651-54161948 |
| 233 | FTL->ADD3 | NM_000146->NM_016824 | YES | | E8: chr19: 54161651-54161948 |
| 234 | FTL->ADD3 | NM_000146->NM_001121 | YES | | E8: chr19: 54161651-54161948 |
| 235 | CYB5R3->TXNIP | NM_001171660->NM_006472 | YES | | E9: chr22: 41343790-41345895 |
| 236 | CYB5R3->TXNIP | NM_001171661->NM_006472 | YES | | E10: chr22: 41343790-41345895 |
| 237 | CYB5R3->TXNIP | NM_007326->NM_006472 | YES | | E9: chr22: 41343790-41345895 |
| 238 | CYB5R3->TXNIP | NM_001129819->NM_006472 | YES | | E9: chr22: 41343790-41345895 |
| 239 | CYB5R3->TXNIP | NM_000398->NM_006472 | YES | | E9: chr22: 41343790-41345895 |
| 240 | FTH1->TNFAIP2 | NM_002032->NM_006291 | NOT Evaluated | | E1: chr11: 61491359-61491708 |
| 241 | MRPL52->U5P22 | NM_178336->NM_015276 | YES | | E5: chr14: 22373220-22374086 |
| 242 | MRPL52->U5P22 | NM_180982->NM_015276 | YES | | E5: chr14: 22373220-22374086 |
| 243 | MRPL52->U5P22 | NM_181306->NM_015276 | YES | | E5: chr14: 22373220-22374086 |
| 244 | MRPL52->U5P22 | NM_181305->NM_015276 | YES | | E4: chr14: 22373220-22374086 |
| 245 | MRPL52->U5P22 | NM_181304->NM_015276 | YES | | E5: chr14: 22373220-22374086 |
| 246 | MRPL52->U5P22 | NM_181307->NM_015276 | YES | | E4: chr14: 22373220-22374086 |
| 247 | PLXNA1->CTSD | NM_032242->NM_001909 | YES | | E31: chr3: 128235454-128238925 |
| 248 | COL3A1->COL16A1 | NM_000090->NM_001856 | YES | | E566: chr2: 189560029-189560110 |
| 249 | SLC9A3R1- | NM_004252->NR_024445 | YES | | E18: chr17: 70276201-70277093 |
| | >LOC100128003 | | | | |
| 250 | KRT6A->PIK3R2 | M_005554->NM_005027 | | | E9: chr12: 51167224-51168006 |
| 251 | SBF1->FLNA | NM_002972->NM_001110556 | YES | | E41: chr22: 49230298-49232535 |
| 252 | SBF1->FLNA | NM_002972->NM_001456 | YES | | E41: chr22: 49230298-49232535 |
| 253 | CAV1->MMP2 | NM_001753->NM_004530 | YES | | E3: chr7: 115986235-115988474 |
| 254 | CAV1->MMP2 | NM_001753->NM_001127891 | YES | | E3: chr7: 115986235-115988474 |
| 255 | CAV1->MMP2 | NM_001172895->NM_004530 | YES | | E3: chr7: 115986235-115988474 |
| 256 | CAV1->MMP2 | NM_001172895->NM_001127891 | YES | | E3: chr7: 115986235-115988474 |
| 257 | CAV1->MMP2 | NM_001172896->NM_004530 | YES | | E2: chr7: 115986235-115988474 |
| 258 | CAV1->MMP2 | NM_001172896->NM_001127891 | YES | | E2: chr7: 115986235-115988474 |
| 259 | CAV1->MMP2 | NM_001172897->NM_004530 | YES | | E3: chr7: 115986235-115988474 |
| 260 | CAV1->MMP2 | NM_001172897->NM_001127891 | YES | | E3: chr7: 115986235-115988474 |
| 261 | CTSD->HOMER3 | NM_001909->NM_001145722 | YES | | E9: chr11: 1730560-1731476 |
| 262 | COL1A2->YAP1 | NM_000089->NM_001195044 | | | E624: chr7: 93897494-93898480 |
| 263 | COL1A2->YAP1 | NM_000089->NM_001130145 | | | E624: chr7: 93897494-93898480 |
| 264 | COL1A2->YAP1 | NM_000089->NM_006106 | | | E624: chr7: 93897494-93898480 |
| 265 | COL1A2->YAP1 | NM_000089->NM_001195045 | | | E624: chr7: 93897494-93898480 |
| 266 | TTC7A->SOCS5 | NM_020458->NM_014011 | YES | INSERTION: GATTTTATAATC(DFII) | E1: chr2: 47021816-47022368 |
| 267 | TTC7A->SOCS5 | NM_020458->NM_144949 | YES | INSERTION: GATTTTATAATC(DFII) | E1: chr2: 47021816-47022368 |
| 268 | USF2->IRX3 | NM_003367->NM_024336 | YES | | E14: chr19: 40452545-40452746 |
| 269 | RPL23->MUCL1 | NM_000978->NM_058173 | | | E5: chr17: 34259846-34259993 |
| 270 | SRRM2->SPARC | NM_016333->NM_003118 | YES | | E60: chr16: 2760859-2761414 |
| 271 | SRRM2->SPARC | NM_016333->NM_003118 | YES | | E60: chr16: 2760859-2761414 |
| 272 | DNAJA2->COL14A1 | NM_005880->NM_021110 | YES | | E9: chr16: 45546774-45548633 |
| 273 | KRT81->ACTB | NM_002281->NM_001101 | YES | | E9: chr12: 50965963-50966544 |
| 274 | FTH1->KCTD12 | NM_002032->NM_138444 | YES | | E1: chr11: 61491359-61491708 |
| 275 | COL1A1->TBC1D9B | NM_000088->NM_198868 | YES | | E50: chr17: 45618137-45618380 |
| 276 | COL1A1->TBC1D9B | NM_000088->NM_015043 | YES | | E50: chr17: 45618137-45618380 |
| 277 | RPL19->RPS16 | NM_000981->NM_001020 | YES | | E2: chr17: 34610991-34611098 |
| 278 | MTF2->ARL3 | NM_007358->NM_004311 | | | E1: chr1: 93317379-93317676 |
| 279 | MTF2->ARL3 | NM_001164393->NM_004311 | NOT Evaluated | | E1: chr1: 93317379-93317676 |
| 280 | MTF2->ARL3 | NM_001164392->NM_004311 | | | E1: chr1: 93317379-93317676 |
| 281 | MTF2->ARL3 | NM_001164391->NM_004311 | NOT Evaluated | | E1: chr1: 93317379-93317676 |
| 282 | MTF2->ARL3 | NM_007358->NM_004311 | | | E1: chr1: 93317379-93317676 |
| 283 | MTF2->ARL3 | NM_001164393->NM_004311 | NOT Evaluated | | E1: chr1: 93317379-93317676 |
| 284 | MTF2->ARL3 | NM_001164392->NM_004311 | | | E1: chr1: 93317379-93317676 |
| 285 | MTF2->ARL3 | NM_001164391->NM_004311 | NOT Evaluated | | E1: chr1: 93317379-93317676 |
| 286 | SFTPC->IGLL5 | NM_003018->NR_033661 | | | E2: chr8: 22076031-22076190 |
| 287 | SFTPC->IGLL5 | NM_003018->NM_001178126 | | | E2: chr8: 22076031-22076190 |
| 288 | SFTPC->IGLL5 | NM_001172410->NR_033661 | | | E2: chr8: 22076031-22076190 |
| 289 | SFTPC->IGLL5 | NM_001172410-> | | | E2: chr8: 22076031-22076190 |
| | | NM_001178126 | | | |
| 290 | SFTPC->IGLL5 | NM_001172357->NR_033661 | | | E2: chr8: 22076031-22076190 |
| 291 | SFTPC->IGLL5 | NM_001172357-> | | | E2: chr8: 22076031-22076190 |
| | | NM_001178126 | | | |
| 292 | C6orf147->KHDC1 | NR_027005->NM_030568 | YES | | E3: chr6: 74058441-74058484 |
| 293 | PRR4->TAS2R20 | NM_001098538->NM_176889 | (part of PRR4) | | E2: chr12: 11090885-11091054 |
| 294 | PRR4->TAS2R20 | NM_001098538->NM_176889 | (part of PRR4) | | E2: chr12: 11090885-11091054 |
| 295 | PRR4->TAS2R20 | NM_001098538->NM_176889 | (part of PRR4) | | E2: chr12: 11090885-11091054 |
| 296 | PRR4->TAS2R20 | NM_001098538->NM_176889 | (part of PRR4) | | E2: chr12: 11090885-11091054 |
| 297 | ACTN4->ACTB | NM_004924->NM_001101 | YES | | E21: chr19: 43911753-43913010 |
| 298 | ACTN4->ACTB | NM_004924->NM_001101 | YES | | E21: chr19: 43911753-43913010 |
| 299 | ACTN4->ACTB | NM_004924->NM_001101 | YES | | E21: chr19: 43911753-43913010 |
| 300 | ACTN4->ACTB | NM_004924->NM_001101 | YES | | E21: chr19: 43911753-43913010 |
| 301 | ACTN4->ACTB | NM_004924->NM_001101 | YES | | E21: chr19: 43911753-43913010 |
| 302 | MGP->NCRNA00188 | NM_000900->NR_027163 | YES | | E4: chr12: 14925381-14926481 |
| 303 | MGP->NCRNA00188 | NM_000900->NR_027162 | YES | | E4: chr12: 14925381-14926481 |
| 304 | MGP->NCRNA00188 | NM_000900->NR_027165 | YES | | E4: chr12: 14925381-14926481 |
| 305 | MGP->NCRNA00188 | NM_000900->NR_027164 | YES | | E4: chr12: 14925381-14926481 |
| 306 | MGP->NCRNA00188 | NM_000900->NR_027170 | YES | | E4: chr12: 14925381-14926481 |
| 307 | MGP->NCRNA00188 | NM_000900->NR_027160 | YES | | E4: chr12: 14925381-14926481 |
| 308 | MGP->NCRNA00188 | NM_000900->NR_027159 | YES | | E4: chr12: 14925381-14926481 |
| 309 | MGP->NCRNA00188 | NM_000900->NR_027158 | YES | | E4: chr12: 14925381-14926481 |
| 310 | MGP->NCRNA00188 | NM_000900->NR_027169 | YES | | E4: chr12: 14925381-14926481 |
| 311 | MGP->NCRNA00188 | NM_000900->NR_027168 | YES | | E4: chr12: 14925381-14926481 |
| 312 | MGP->NCRNA00188 | NM_000900->NR_027167 | YES | | E4: chr12: 14925381-14926481 |
| 313 | MGP->NCRNA00188 | NM_000900->NR_027161 | YES | | E4: chr12: 14925381-14926481 |
| 314 | MGP->NCRNA00188 | NM_000900->NR_027667 | YES | | E4: chr12: 14925381-14926481 |
| 315 | MGP->NCRNA00188 | NM_000900->NR_027166 | YES | | E4: chr12: 14925381-14926481 |
| 316 | MGP->NCRNA00188 | NM_001190839->NR_027163 | YES | | E5: chr12: 14925381-14926481 |
| 317 | MGP->NCRNA00188 | NM_001190839->NR_027162 | YES | | E5: chr12: 14925381-14926481 |
| 318 | MGP->NCRNA00188 | NM_001190839->NR_027165 | YES | | E5: chr12: 14925381-14926481 |
| 319 | MGP->NCRNA00188 | NM_001190839->NR_027164 | YES | | E5: chr12: 14925381-14926481 |
| 320 | MGP->NCRNA00188 | NM_001190839->NR_027170 | YES | | E5: chr12: 14925381-14926481 |
| 321 | MGP->NCRNA00188 | NM_001190839->NR_027160 | YES | | E5: chr12: 14925381-14926481 |
| 322 | MGP->NCRNA00188 | NM_001190839->NR_027159 | YES | | E5: chr12: 14925381-14926481 |
| 323 | MGP->NCRNA00188 | NM_001190839->NR_027158 | YES | | E5: chr12: 14925381-14926481 |
| 324 | MGP->NCRNA00188 | NM_001190839->NR_027169 | YES | | E5: chr12: 14925381-14926481 |
| 325 | MGP->NCRNA00188 | NM_001190839->NR_027168 | YES | | E5: chr12: 14925381-14926481 |
| 326 | MGP->NCRNA00188 | NM_001190839->NR_027167 | YES | | E5: chr12: 14925381-14926481 |
| 327 | MGP->NCRNA00188 | NM_001190839->NR_027161 | YES | | E5: chr12: 14925381-14926481 |
| 328 | MGP->NCRNA00188 | NM_001190839->NR_027667 | YES | | E5: chr12: 14925381-14926481 |
| 329 | MGP->NCRNA00188 | NM_001190839->NR_027166 | YES | | E5: chr12: 14925381-14926481 |
| 330 | PALLD->CBR4 | NM_016081->NM_032783 | YES | | E21: chr4: 170083938-170086183 |
| 331 | PALLD->CBR4 | NM_016081->NM_032783 | YES | | E21: chr4: 170083938-170086183 |
| 332 | NDUFS6->ACTB | NM_004553->NM_001101 | (part of | | E4: chr5: 1868964-1869163 |
| | | | NDUFS6) | | |
| 333 | COL1A2->ACTG1 | NM_000089->NM_001614 | | | E613: chr7: 93891583-93891691 |
| 334 | GNB2->CTSD | NM_005273->NM_001909 | YES | | E10: chr7: 100114253-100114727 |
| 335 | DIDO1->REPS1 | NM_033081->NM_031922 | NOT Evaluated | | E2: chr20: 61016006-61016203 |
| 336 | DIDO1->REPS1 | NM_033081->NM_001128617 | NOT Evaluated | | E2: chr20: 61016006-61016203 |
| 337 | DIDO1->REPS1 | NM_001193369->NM_031922 | NOT Evaluated | | E2: chr20: 61016006-61016203 |
| 338 | DIDO1->REPS1 | NM_001193369->NM_001128617 | NOT Evaluated | | E2: chr20: 61016006-61016203 |
| 339 | DIDO1->REPS1 | NM_001193370->NM_031922 | NOT Evaluated | | E2: chr20: 61016006-61016203 |
| 340 | DIDO1->REPS1 | NM_001193370->NM_001128617 | NOT Evaluated | | E2: chr20: 61016006-61016203 |
| 341 | DIDO1->REPS1 | NM_080797->NM_031922 | NOT Evaluated | | E2: chr20: 61016006-61016203 |
| 342 | DIDO1->REPS1 | NM_080797->NM_001128617 | NOT Evaluated | | E2: chr20: 61016006-61016203 |
| 343 | DIDO1->REPS1 | NM_080796->NM_031922 | NOT Evaluated | | E2: chr20: 61016006-61016203 |
| 344 | DIDO1->REPS1 | NM_080796->NM_001128617 | NOT Evaluated | | E2: chr20: 61016006-61016203 |
| 345 | DIDO1->REPS1 | NM_022105->NM_031922 | NOT Evaluated | | E2: chr20: 61016006-61016203 |
| 346 | DIDO1->REPS1 | NM_022105->NM_001128617 | NOT Evaluated | | E2: chr20: 61016006-61016203 |
| 347 | DIDO1->REPS1 | NM_033081->NM_031922 | NOT Evaluated | | E2: chr20: 61016006-61016203 |
| 348 | DIDO1->REPS1 | NM_033081->NM_001128617 | NOT Evaluated | | E2: chr20: 61016006-61016203 |
| 349 | DIDO1->REPS1 | NM_001193369->NM_031922 | NOT Evaluated | | E2: chr20: 61016006-61016203 |
| 350 | DIDO1->REPS1 | NM_001193369->NM_001128617 | NOT Evaluated | | E2: chr20: 61016006-61016203 |
| 351 | DIDO1->REPS1 | NM_001193370->NM_031922 | NOT Evaluated | | E2: chr20: 61016006-61016203 |
| 352 | DIDO1->REPS1 | NM_001193370->NM_001128617 | NOT Evaluated | | E2: chr20: 61016006-61016203 |
| 353 | DIDO1->REPS1 | NM_080797->NM_031922 | NOT Evaluated | | E2: chr20: 61016006-61016203 |
| 354 | DIDO1->REPS1 | NM_080797->NM_001128617 | NOT Evaluated | | E2: chr20: 61016006-61016203 |
| 355 | DIDO1->REPS1 | NM_080796->NM_031922 | NOT Evaluated | | E2: chr20: 61016006-61016203 |
| 356 | DIDO1->REPS1 | NM_080796->NM_001128617 | NOT Evaluated | | E2: chr20: 61016006-61016203 |
| 357 | DIDO1->REPS1 | NM_022105->NM_031922 | NOT Evaluated | | E2: chr20: 61016006-61016203 |
| 358 | DIDO1->REPS1 | NM_022105->NM_001128617 | NOT Evaluated | | E2: chr20: 61016006-61016203 |
| 359 | MALAT1->IGF2 | NR_002819->NM_001007139 | NOT Evaluated | | E9: chr11: 65021808-65030513 |
| 360 | MALAT1->IGF2 | NR_002819->NM_001127598 | NOT Evaluated | | E9: chr11: 65021808-65030513 |
| 361 | MALAT1->IGF2 | NR_002819->NM_000612 | NOT Evaluated | | E9: chr11: 65021808-65030513 |
| 362 | CALD1->COL1A1 | NM_033157->NM_000088 | YES | | E8: chr7: 134282798-134283060 |
| 363 | CALD1->COL1A1 | NM_033138->NM_000088 | YES | | E8: chr7: 134282798-134283060 |
| 364 | CALD1->COL1A1 | NM_004342->NM_000088 | YES | | E7: chr7: 134282798-134283060 |
| 365 | CALD1->COL1A1 | NM_033140->NM_000088 | YES | | E5: chr7: 134282798-134283060 |
| 366 | CALD1->COL1A1 | NM_033139->NM_000088 | YES | | E6: chr7: 134282798-134283060 |
| 367 | MYH9->KRT6B | NM_002473->NM_005555 | | | E39: chr22: 35010394-35010503 |
| 368 | APOOL->DCAF8 | NM_198450->NM_015726 | YES | | E9: chrX: 84229251-84234980 |
| 369 | APOOL->DCAF8 | NM_198450->NR_028104 | YES | | E9: chrX: 84229251-84234980 |
| 370 | APOOL->DCAF8 | NM_198450->NR_028103 | YES | | E9: chrX: 84229251-84234980 |
| 371 | APOOL->DCAF8 | NM_198450->NR_028105 | YES | | E9: chrX: 84229251-84234980 |
| 372 | APOOL->DCAF8 | NM_198450->NR_028106 | YES | | E9: chrX: 84229251-84234980 |
| 373 | PACSIN3->CTSD | NM_016223->NM_001909 | YES | | E11: chr11: 47155649-47156173 |
| 374 | PACSIN3->CTSD | NM_001184975->NM_001909 | YES | | E11: chr11: 47155649-47156173 |
| 375 | PACSIN3->CTSD | NM_001184974->NM_001909 | YES | | E11: chr11: 47155649-47156173 |
| 376 | SOX4->KRT5 | NM_003107->NM_000424 | YES | | E2: chr6: 21701950-21706828 |
| 377 | HEATR5A->COL1A1 | NM_015473->NM_000088 | YES | | E30: chr14: 30830744-30832569 |
| 378 | TFG->GPR128 | NM_001007565->NM_032787 | YES | | E3: chr3: 101921508-101921592 |
| 379 | TFG->GPR128 | NM_006070->NM_032787 | YES | | E3: chr3: 101921508-101921592 |
| 380 | TFG->GPR128 | NM_001195479->NM_032787 | YES | | E3: chr3: 101921508-101921592 |
| 381 | TFG->GPR128 | NM_001195478->NM_032787 | YES | | E3: chr3: 101921508-101921592 |
| 382 | METTL10->FAM53B | NM_212554->NM_014661 | YES | | E7: chr10: 126437395-126439062 |
| 383 | METTL10->FAM53B | NM_212554->NM_014661 | YES | | E7: chr10: 126437395-126439062 |
| 384 | METTL10->FAM53B | NM_212554->NM_014661 | YES | | E7: chr10: 126437395-126439062 |
| 385 | NUFIP2->KRT5 | NM_020772->NM_000424 | YES | | E4: chr17: 24606979-24615735 |
| 386 | NUFIP2->KRT5 | NM_020772->NM_000424 | YES | | E4: chr17: 24606979-24615735 |
| 387 | CIRBP->UGP2 | NM_001280->NM_006759 | YES | | E7: chr19: 1223425-1224171 |
| 388 | JOSD1->RPS19BP1 | NM_014876->NM_194326 | | | E1: chr22: 37425753-37426405 |
| 389 | COL1A2->TSIX | NM_000089->NR_003255 | YES | | E624: chr7: 93897494-93898480 |
| 390 | C9orf86->PPP1R14B | NM_024718->NM_138689 | YES | INSERTION: CAGGCCCCGGCGGCCGCC(QAPAAA) | E15: chr9: 138854594-138855460 |
| 391 | C9orf86->PPP1R14B | NM_001173988->NM_138689 | YES | INSERTION: CAGGCCCCGGCGGCCGCC(QAPAAA) | E15: chr9: 138854594-138855460 |
| 392 | AATK->USP32 | NM_001080395->NM_032582 | YES | | E1: chr17: 76754332-76754467 |
| 393 | AATK->USP32 | NM_001080395->NM_032582 | YES | | E1: chr17: 76754332-76754467 |
| 394 | DAB2IP->KRT5 | NM_138709->NM_000424 | | | E10: chr9: 123574706-123575595 |
| 395 | DAB2IP->KRT5 | NM_032552->NM_000424 | | | E12: chr9: 123574706-123575595 |
| 396 | ADCY9->C16orf5 | NM_001116->NM_013399 | | INSERTION: GCCCTGCCTGTTCCCTGTCCATCCAG | E2: chr16: 4103751-4105487 |
| | | | | GCCAGCAGCTGAAGGAGCCTCACCTGCCTCCCTT | |
| | | | | CTCTGAGTAGCACGGATTTGAGGAGAAGCAGCGA | |
| | | | | AG(ALPVPCPSRPAAEGASPASLL*VARI*GEAAK) | |
| 397 | RAB3IP->IGFBP5 | NM_175625->NM_000599 | YES | | E10: chr12: 68495410-68503251 |
| 398 | RAB3IP->IGFBP5 | NM_175624->NM_000599 | YES | | E10: chr12: 68495410-68503251 |
| 399 | RAB3IP->IGFBP5 | NM_022456->NM_000599 | YES | | E11: chr12: 68495410-68503251 |
| 400 | RAB3IP->IGFBP5 | NM_175623->NM_000599 | YES | | E11: chr12: 68495410-68503251 |
| 401 | RAB3IP->IGFBP5 | NM_001024647->NM_000599 | YES | | E9: chr12: 68495410-68503251 |
| 402 | RAB3IP->IGFBP5 | NM_175625->NM_000599 | YES | | E10: chr12: 68495410-68503251 |
| 403 | RAB3IP->IGFBP5 | NM_175624->NM_000599 | YES | | E10: chr12: 68495410-68503251 |
| 404 | RAB3IP->IGFBP5 | NM_022456->NM_000599 | YES | | E1: chr12: 68495410-68503251 |
| 405 | RAB3IP->IGFBP5 | NM_175623->NM_000599 | YES | | E11: chr12: 68495410-68503251 |
| 406 | RAB3IP->IGFBP5 | NM_001024647->NM_000599 | YES | | E9: chr12: 68495410-68503251 |
| 407 | MALAT1->DST | NR_002819->NM_001723 | NOT Evaluated | | E9: chr11: 65021808-65030513 |
| 408 | HOOK3->FNTA | NM_032410->NM_002027 | YES | TGG->CTG(W->L) | E17: chr8: 42976406-42976441 |
| 409 | HOOK3->FNTA | NM_032410->NR_033698 | | | E17: chr8: 42976406-42976441 |
| 410 | KRT81->EMP2 | NM_002281->NM_001424 | YES | | E9: chr12: 50965963-50966544 |
| 411 | TPD52->MRPS28 | NM_001025253->NM_014018 | YES | | E7: chr8: 81117409-81117458 |
| 412 | TPD52->MRPS28 | NM_005079->NM_014018 | YES | | E5: chr8: 81117409-81117458 |
| 413 | TPD52->MRPS28 | NM_001025252->NM_014018 | YES | | E5: chr8: 81117409-81117458 |
| 414 | CTSD->PRKAR1B | NM_001909->NM_001164758 | YES | CTC->GTC(L->V) | E6: chr11: 1732711-1732834 |
| 415 | CTSD->PRKAR1B | NM_001909->NM_001164761 | YES | CTC->GTC(L->V) | E6: chr11: 1732711-1732834 |
| 416 | CTSD->PRKAR1B | NM_001909->NM_001164762 | YES | CTC->GTC(L->V) | E6: chr11: 1732711-1732834 |
| 417 | CTSD->PRKAR1B | NM_001909->NM_001164759 | YES | CTC->GTC(L->V) | E6: chr11: 1732711-1732834 |
| 418 | CTSD->PRKAR1B | NM_001909->NM_001164760 | YES | CTC->GTC(L->V) | E6: chr11: 1732711-1732834 |
| 419 | CTSD->PRKAR1B | NM_001909->NM_002735 | YES | CTC->GTC(L->V) | E6: chr11: 1732711-1732834 |
| 420 | ASAP1->MALAT1 | NM_018482->NR_002819 | YES | | E29: chr8: 131133534-131136233 |
| 421 | SRRM2->HSP90AB1 | NM_016333->NM_007355 | YES | AAA->TAA(K->*) | E57: chr16: 2758998-2759286 |
| 422 | PROM1->TAPT1 | NM_006017->NM_153365 | YES | GGG->GTG(G->V) | E12: chr4: 15617258-15617411 |
| 423 | PROM1->TAPT1 | NM_001145850->NM_153365 | YES | GGG->GTG(G->V) | E12: chr4: 15617258-15617411 |
| 424 | PROM1->TAPT1 | NM_001145849->NM_153365 | YES | GGG->GTG(G->V) | E12: chr4: 15617258-15617411 |
| 425 | PROM1->TAPT1 | NM_001145847->NM_153365 | YES | GGG->GTG(G->V) | E12: chr4: 15617258-15617411 |
| 426 | PROM1->TAPT1 | NM_001145852->NM_153365 | YES | GGG->GTG(G->V) | E11: chr4: 15617258-15617411 |
| 427 | PROM1->TAPT1 | NM_001145851->NM_153365 | YES | GGG->GTG(G->V) | E11: chr4: 15617258-15617411 |
| 428 | PROM1->TAPT1 | NM_001145848->NM_153365 | YES | GGG->GTG(G->V) | E12: chr4: 15617258-15617411 |
| 429 | RCC2->MARCKS | NM_018715->NM_002356 | | | E2: chr1: 17637312-17637605 |
| 430 | RPL8->KRT4 | NM_033301->NM_002272 | YES | ACC->GCC(T->A) | E5: chr8: 145986543-145986659 |
| 431 | RPL8->KRT4 | NM_000973->NM_002272 | YES | ACC->GCC(T->A) | E5: chr8: 145986543-145986659 |
| 432 | CD68->NEAT1 | NM_001251->NR_028272 | YES | | E12: chr17: 7425419-7426153 |
| 433 | CD68->NEAT1 | NM_001040059->NR_028272 | YES | | E12: chr17: 7425419-7426153 |
| 434 | PLEKHO2-> | NM_025201->NM_182703 | YES | | E5: chr15: 62940728-62940827 |
| | ANKDD1A | | | | |
| 435 | PLEKHO2->ANKDD1A | NM_001195059->NM_182703 | YES | | E4: chr15: 62940728-62940827 |
| 436 | PLEKHO2->ANKDD1A | NM_025201->NM_182703 | YES | | E5: chr15: 62940728-62940827 |
| 437 | PLEKHO2->ANKDD1A | NM_001195059->NM_182703 | YES | | E4: chr15: 62940728-62940827 |
| 438 | PCNX->MKKS | NM_014982->NM_018848 | | | E7: chr14: 70525036-70525169 |
| 439 | PCNX->MKKS | NM_014982->NM_170784 | | | E7: chr14: 70525036-70525169 |
| 440 | SPARC->TRPS1 | NM_003118->NM_014112 | | | E6: chr5: 151029417-151029538 |
| 441 | SPARC->TRPS1 | NM_003118->NM_014112 | YES | | E10: chr5: 151021201-151023353 |
| 442 | FLNA->UBXN6 | NM_001110556->NM_025241 | YES | | E48: chrX: 153230093-153230598 |
| 443 | FLNA->UBXN6 | NM_001456->NM_025241 | YES | | E47: chrX: 153230093-153230598 |
| 444 | WDR82->CNN2 | NM_025222->NM_201277 | YES | | E9: chr3: 52263477-52266575 |
| 445 | WDR82->CNN2 | NM_025222->NM_004368 | YES | | E9: chr3: 52263477-52266575 |
| 446 | WDR82->CNN2 | NM_025222->NM_201277 | YES | | E9: chr3: 52263477-52266575 |
| 447 | WDR82->CNN2 | NM_025222->NM_004368 | YES | | E9: chr3: 52263477-52266575 |
| 448 | TMEM119->ARIH2 | NM_181724->NM_006321 | YES | | E2: chr12: 107507750-107510302 |
| 449 | GNB1->TRH | NM_002074->NM_007117 | YES | | E12: chr1: 1706588-1708352 |
| 450 | ELF3->SLC39A6 | NM_001114309->NM_012319 | YES | | E9: chr1: 200250959-200252938 |
| 451 | ELF3->SLC39A6 | NM_001114309-> | YES | | E9: chr1: 200250959-200252938 |
| | | NM_001099406 | | | |
| 452 | ELF3->SLC39A6 | NM_004433->NM_012319 | YES | | E9: chr1: 200250959-200252938 |
| 453 | ELF3->SLC39A6 | NM_004433->NM_001099406 | YES | | E9: chr1: 200250959-200252938 |
| 454 | KRT7->KRT17 | NM_005556->NM_000422 | YES | INSERTION: CTCCTCTCCAGCCCTTCTCCTGTGTGCCTGC | E53: chr12: 50928227-50928262 |
| | | | | CTCCTGCCGCCGCCACC(LLSSPSPVCLPPAAAT) | |
| 455 | GAPDH->ILF3 | NM_002046->NM_153464 | | | E107: chr12: 6517010-6517423 |
| 456 | GAPDH->ILF3 | NM_002046->NM_012218 | | | E107: chr12: 6517010-6517423 |
| 457 | GAPDH->ILF3 | NM_002046->NM_017620 | | | E107: chr12: 6517010-6517423 |
| 458 | GAPDH->ILF3 | NM_002046->NM_004516 | | | E107: chr12: 6517010-6517423 |
| 459 | GAPDH->ILF3 | NM_002046->NM_001137673 | | | E107: chr12: 6517010-6517423 |
| 460 | BAT2L2->COL3A1 | NM_015172->NM_000090 | YES | | E34: chr1: 169827348-169829273 |
| 461 | CAPN1->ARL2 | NM_005186->NM_001667 | YES | | E7: chr11: 64711261-64711345 |
| 462 | IGLL5->B2M | NR_033661->NM_004048 | NA | | E6: chr22: 21567554-21568011 |
| 463 | IGLL5->B2M | NM_001178126->NM_004048 | YES | | E12: chr22: 21567554-21568011 |
| 464 | ENO1->ACTG1 | NM_001428->NM_001614 | YES | | E10: chr1: 8845880-8845989 |
| 465 | COL1A1->KLK6 | NM_000088->NM_002774 | YES | INSERTION: GGCGGACAAAGCCCGATTGTTCCTGGGCCC | E50: chr17: 45618137-45618380 |
| | | | | TTTCCCCATCGCGCCTGGGCCTGCTCCCCAGCCCGGGG | |
| | | | | CAGGGGCGGGGGCCAGTGTGGTGACACACGCTGTAGC | |
| | | | | TGTCTCCCCGGCTGGCTGGCTCGCTCTCTCCTGGGGAC | |
| | | | | ACAGAGGTCGGCAGGCAGCACACAGAGGGACCTACGG | |
| | | | | GCAGCTGTTCCTTCCCCCGACTCAAGAATCCCCGGAGC | |
| | | | | CCGGAGGCCTGCAGCAGGAGCGGCC(GGQSPIVPGPFP | |
| | | | | HRAWACSPARGRGGGQCGDTRCSCLPGWLARSLLGTQR | |
| | | | | SAGSTQRDLRAAVPSPDSRIPGARRPAAGAA) | |
| 466 | RAB8A->EIF4G2 | NM_005370->NM_001042559 | YES | | E8: chr19: 16104021-16105445 |
| 467 | RAB8A->EIF4G2 | NM_005370->NM_001418 | YES | | E8: chr19: 16104021-16105445 |
| 468 | LMNA->FTL | NM_170708->NM_000146 | YES | INSERTION: TATCTGGGACCTGCCAGCA | E11: chr1: 154375494-154376502 |
| | | | | CCGTTTTTGTGGTTAGCTCCTTCTTGCC | |
| | | | | AACCAAC(YLGPASTVFVVSSFLPTN) | |
| 469 | LMNA->FTL | NM_170707->NM_000146 | YES | INSERTION: TATCTGGGACCTGCCAGCA | E12: chr1: 154375494-154376502 |
| | | | | CCGTTTTTGTGGTTAGCTCCTTCTTGCC | |
| | | | | AACCAAC(YLGPASTVFVVSSFLPTN) | |
| 470 | COL1A2->LAMP2 | NM_000089->NM_013995 | YES | | E624: chr7: 93897494-93898480 |
| 471 | ALDOA->RPS16 | NM_184043->NM_001020 | | | E34: chr16: 29988320-29988495 |
| 472 | ALDOA->RPS16 | NM_184041->NM_001020 | | | E34: chr16: 29988320-29988495 |
| 473 | ALDOA->RPS16 | NM_001127617->NM_001020 | | | E34: chr16: 29988320-29988495 |
| 474 | ALDOA->RPS16 | NM_000034->NM_001020 | | | E54: chr16: 29988320-29988495 |
| 475 | ALDOA->RPS16 | NM_184043->NM_001020 | | | E34: chr16: 29988320-29988495 |
| 476 | ALDOA->RPS16 | NM_184041->NM_001020 | | | E34: chr16: 29988320-29988495 |
| 477 | ALDOA->RPS16 | NM_001127617->NM_001020 | | | E34: chr16: 29988320-29988495 |
| 478 | ALDOA->RPS16 | NM_000034->NM_001020 | | | E54: chr16: 29988320-29988495 |
| 479 | ELAC1->SMAD4 | NM_018696->NM_005359 | | | E2: chr18: 46754764-46754929 |
| 480 | RPS5->ACTB | NM_001009->NM_001101 | YES | | E12: chr19: 63597860-63597983 |
| 481 | CALR->ACACA | NM_004343->NM_198838 | (part of CALR) | | E72: chr19: 12915526-12916304 |
| 482 | CALR->ACACA | NM_004343->NM_198837 | (part of CALR) | | E72: chr19: 12915526-12916304 |
| 483 | CALR->ACACA | NM_004343->NM_198836 | (part of CALR) | | E72: chr19: 12915526-12916304 |
| 484 | CALR->ACACA | NM_004343->NM_198839 | (part of CALR) | | E72: chr19: 12915526-12916304 |
| 485 | CALR->ACACA | NM_004343->NM_198834 | (part of CALR) | | E72: chr19: 12915526-12916304 |
| 486 | HNRNPH1->VAPA | NM_005520->NM_194434 | YES | GTC->ATC(V->I) | E9: chr5: 178977120-178977256 |
| 487 | HNRNPH1->VAPA | NM_005520->NM_003574 | YES | GTC->ATC(V->I) | E9: chr5: 178977120-178977256 |
| 488 | SLC34A2->ACTB | NM_006424->NM_001101 | YES | GAG->AGG(E->R) | E13: chr4: 25286854-25289466 |
| 489 | FAM129B->PXN | NM_022833->NM_025157 | | | E14: chr9: 129307438-129309531 |
| 490 | FAM129B->PXN | NM_022833->NM_002859 | | | E14: chr9: 129307438-129309531 |
| 491 | FAM129B->PXN | NM_022833->NM_001080855 | | | E14: chr9: 129307438-129309531 |
| 492 | FAM129B->PXN | NM_001035534->NM_025157 | | | E14: chr9: 129307438-129309531 |
| 493 | FAM129B->PXN | NM_001035534->NM_002859 | | | E14: chr9: 129307438-129309531 |
| 494 | FAM129B->PXN | NM_001035534->NM_001080855 | | | E14: chr9: 129307438-129309531 |
| 495 | OLA1->ORMDL3 | NM_013341->NM_139280 | | | E4: chr2: 174796006-174796134 |
| 496 | OLA1->ORMDL3 | NM_001011708->NM_139280 | YES | | E3: chr2: 174796006-174796134 |
| 497 | OGT->ACTB | NM_181673->NM_001101 | YES | | E22: chrX: 70710194-70712472 |
| 498 | OGT->ACTB | NM_181672->NM_001101 | YES | | E22: chrX: 70710194-70712472 |
| 499 | OGT->ACTB | NM_181673->NM_001101 | YES | | E22: chrX: 70710194-70712472 |
| 500 | OGT->ACTB | NM_181672->NM_001101 | YES | | E22: chrX: 70710194-70712472 |
| 501 | COL3A1->ZNF43 | NM_000090->NM_003423 | YES | | E612: chr2: 189584598-189585717 |
| 502 | TEP1->RNASE1 | NM_007110->NM_198235 | YES | INSERTION: GGGCTTTTCTGGGAAA | E18: chr14: 19925903-19926062 |
| | | | | GTGAGGCCACC(GLFWESEAT) | |
| 503 | TEP1->RNASE1 | NM_007110->NM_198234 | YES | INSERTION: GGGCTTTTCTGGGAAA | E18: chr14: 19925903-19926062 |
| | | | | GTGAGGCCACC(GLFWESEAT) | |
| 504 | TEP1->RNASE1 | NM_007110->NM_198232 | YES | INSERTION: GGGCTTTTCTGGGAAA | E18: chr14: 19925903-19926062 |
| | | | | GTGAGGCCACC(GLFWESEAT) | |
| 505 | TEP1->RNASE1 | NM_007110->NM_002933 | YES | INSERTION: GGGCTTTTCTGGGAAA | E18: chr14: 19925903-19926062 |
| | | | | GTGAGGCCACC(GLFWESEAT) | |
| 506 | GAPDH->ACTG1 | NM_002046->NM_001614 | YES | | E108: chr12: 6517527-6517797 |
| 507 | RPL14->GLS | NM_003973->NM_014905 | | | E54: chr3: 40478433-40478863 |
| 508 | RPL14->GLS | NM_001034996->NM_014905 | | | E54: chr3: 40478433-40478863 |
| 509 | TAX1BP1->MALAT1 | NM_001079864->NR_002819 | YES | | E34: chr7: 27834771-27835911 |
| 510 | TAX1BP1->MALAT1 | NM_006024->NR_002819 | YES | | E34: chr7: 27834771-27835911 |
| 511 | SERPINA1->KIAA1217 | NM_001002235->NM_001098501 | YES | | E5: chr14: 93912836-93914730 |
| 512 | SERPINA1->KIAA1217 | NM_001002235->NM_019590 | YES | | E5: chr14: 93912836-93914730 |
| 513 | SERPINA1->KIAA1217 | NM_001127705->NM_001098501 | YES | | E7: chr14: 93912836-93914730 |
| 514 | SERPINA1->KIAA1217 | NM_001127705->NM_019590 | YES | | E7: chr14: 93912836-93914730 |
| 515 | SERPINA1->KIAA1217 | NM_001002236->NM_001098501 | YES | | E7: chr14: 93912836-93914730 |
| 516 | SERPINA1->KIAA1217 | NM_001002236->NM_019590 | YES | | E7: chr14: 93912836-93914730 |
| 517 | SERPINA1->KIAA1217 | NM_001127707->NM_001098501 | YES | | E6: chr14: 93912836-93914730 |
| 518 | SERPINA1->KIAA1217 | NM_001127707->NM_019590 | YES | | E6: chr14: 93912836-93914730 |
| 519 | SERPINA1->KIAA1217 | NM_001127706->NM_001098501 | YES | | E6: chr14: 93912836-93914730 |
| 520 | SERPINA1->KIAA1217 | NM_001127706->NM_019590 | YES | | E6: chr14: 93912836-93914730 |
| 521 | SERPINA1->KIAA1217 | NM_001127702->NM_001098501 | YES | | E6: chr14: 93912836-93914730 |
| 522 | SERPINA1->KIAA1217 | NM_001127702->NM_019590 | YES | | E6: chr14: 93912836-93914730 |
| 523 | SERPINA1->KIAA1217 | NM_001127701->NM_001098501 | YES | | E7: chr14: 93912836-93914730 |
| 524 | SERPINA1->KIAA1217 | NM_001127701->NM_019590 | YES | | E7: chr14: 93912836-93914730 |
| 525 | SERPINA1->KIAA1217 | NM_001127700->NM_001098501 | YES | | E5: chr14: 93912836-93914730 |
| 526 | SERPINA1->KIAA1217 | NM_001127700->NM_019590 | YES | | E5: chr14: 93912836-93914730 |
| 527 | SERPINA1->KIAA1217 | NM_001127703->NM_001098501 | YES | | E7: chr14: 93912836-93914730 |
| 528 | SERPINA1->KIAA1217 | NM_001127703->NM_019590 | YES | E7: chr14: 93912836-93914730 | |
| 529 | SERPINA1->KIAA1217 | NM_001127704->NM_001098501 | YES | E7: chr14: 93912836-93914730 | |
| 530 | SERPINA1->KIAA1217 | NM_001127704->NM_019590 | YES | E7: chr14: 93912836-93914730 | |
| 531 | SERPINA1->KIAA1217 | NM_000295->NM_001098501 | YES | E5: chr14: 93912836-93914730 | |
| 532 | SERPINA1->KIAA1217 | NM_000295->NM_019590 | YES | E5: chr14: 93912836-93914730 | |
| 533 | HMGN3->PAQR8 | NM_004242->N M 133367 | YES | INSERTION: GTTGCATACCCTGTCCTGAGGGCGCGG | E1: chr6: 80000981-80001174 |
| | | | | CACGGAGTGCATGCGGGCCGCTGC(VAYPVLRARHG | |
| | | | | VHAGRC) | |
| 534 | HMGN3->PAQR8 | NM_138730->NM_133367 | YES | INSERTION: GTTGCATACCCTGTCCTGAGGGCGCGG | E1: chr6: 80000981-80001174 |
| | | | | CACGGAGTGCATGCGGGCCGCTGC(VAYPVLRARHG | |
| | | | | VHAGRC) | |
| 535 | RPL14->EP400 | NM_003973->NM_015409 | | | E54: chr3: 40478433-40478863 |
| 536 | RPL14->EP400 | NM_001034996->NM_015409 | | | E54: chr3: 40478433-40478863 |
| 537 | GPATCH8->C8orf46 | NM_001002909->NM_152765 | YES | | E3: chr17: 39897365-39897438 |
| 538 | GPATCH8->C8orf46 | NR_036474->NM_152765 | YES | | E4: chr17: 39897365-39897438 |
| 539 | PTRF->COL1A1 | NM_012232->NM_000088 | YES | | E2: chr17: 37807994-37810932 |
| 540 | CDK4->UBA1 | NM_000075->NM_003334 | YES | | E8: chr12: 56428269-56428667 |
| 541 | GAPDH->IRAK1 | NM_002046->NM_001569 | YES | | E108: chr12: 6517527-6517797 |
| 542 | GAPDH->IRAK1 | NM_002046->NM_001025243 | YES | | E108: chr12: 6517527-6517797 |
| 543 | GAPDH->IRAK1 | NM_002046->NM_001025242 | YES | | E108: chr12: 6517527-6517797 |
| 544 | CD68->PSAP | NM_001251->NM_001042465 | YES | | E12: chr17: 7425419-7426153 |
| 545 | CD68->PSAP | NM_001251->NM_002778 | YES | | E12: chr17: 7425419-7426153 |
| 546 | CD68->PSAP | NM_001251->NM_001042466 | YES | | E12: chr17: 7425419-7426153 |
| 547 | CD68->PSAP | NM_001040059->NM_001042465 | YES | | E12: chr17: 7425419-7426153 |
| 548 | CD68->PSAP | NM_001040059->NM_002778 | YES | | E12: chr17: 7425419-7426153 |
| 549 | CD68->PSAP | NM_001040059->NM_001042466 | YES | | E12: chr17: 7425419-7426153 |
| 550 | CD68->PSAP | NM_001251->NM_001042465 | YES | | E12: chr17: 7425419-7426153 |
| 551 | CD68->P5AP | NM_001251->NM_002778 | YES | | E12: chr17: 7425419-7426153 |
| 552 | CD68->P5AP | NM_001251->NM_001042466 | YES | | E12: chr17: 7425419-7426153 |
| 553 | CD68->PSAP | NM_001040059->NM_001042465 | YES | | E12: chr17: 7425419-7426153 |
| 554 | CD68->PSAP | NM_001040059->NM_002778 | YES | | E12: chr17: 7425419-7426153 |
| 555 | CD68->PSAP | NM_001040059->NM_001042466 | YES | | E12: chr17: 7425419-7426153 |
| 556 | APOL1->ACTB | NM_003661->NM_001101 | YES | | E6: chr22: 34991142-34993522 |
| 557 | APOL1->ACTB | NM_145343->NM_001101 | YES | | E7: chr22: 34991142-34993522 |
| 558 | APOL1->ACTB | NM_001136541->NM_001101 | YES | | E5: chr22: 34991142-34993522 |
| 559 | APOL1->ACTB | NM_001136540->NM_001101 | YES | | E6: chr22: 34991142-34993522 |
| 560 | WRB->SH3BGR | NM_004627->NM_007341 | YES | | E3: chr21: 39685564-39685632 |
| 561 | WRB->SH3BGR | NM_004627->NM_001001713 | | | E3: chr21: 39685564-39685632 |
| 562 | WRB->SH3BGR | NM_001146218->NM_007341 | YES | | E3: chr21: 39685564-39685632 |
| 563 | WRB->SH3BGR | NM_001146218->NM_001001713 | | | E3: chr21: 39685564-39685632 |
| 564 | WRB->SH3BGR | NM_004627->NM_007341 | YES | | E3: chr21: 39685564-39685632 |
| 565 | WRB->SH3BGR | NM_004627->NM_001001713 | | | E3: chr21: 39685564-39685632 |
| 566 | WRB->SH3BGR | NM_001146218->NM_007341 | YES | | E3: chr21: 39685564-39685632 |
| 567 | WRB->SH3BGR | NM_001146218->NM_001001713 | | | E3: chr21: 39685564-39685632 |
| 568 | WRB->SH3BGR | NM_004627->NM_007341 | YES | | E3: chr21: 39685564-39685632 |
| 569 | WRB->SH3BGR | NM_004627->NM_001001713 | | | E3: chr21: 39685564-39685632 |
| 570 | WRB->SH3BGR | NM_001146218->NM_007341 | YES | | E3: chr21: 39685564-39685632 |
| 571 | WRB->SH3BGR | NM_001146218->NM_001001713 | | | E3: chr21: 39685564-39685632 |
| 572 | ITGA3->KHK | NM002204->NM006488 | YES | | E52: chr17: 45521472-45522848 |
| 573 | ITGA3->KHK | NM002204->NM000221 | YES | | E52: chr17: 45521472-45522848 |
| 574 | ITGA3->KHK | NM_005501->NM_006488 | | INSERTION: CCTCCCACGCGGAGGAGGAGCCAGGGCAGCTGGGAGCGGGGA | E50: chr17: 45521472-45522848 |
| | | | | CACCATCCTCCTGGATAAGAGGCAGAGGCCGGGAGGAACCCCGTCAGCCGG | |
| | | | | GCGGGCAGGAAGCTCTGGGAGTAGCCT(PPTRRRSQGSWERGHHPPG*EAEA | |
| | | | | GRNPVSRAGRKLWE*P) | |
| 575 | ITGA3->KHK | NM_005501->NM_000221 | | INSERTION: CCTCCCACGCGGAGGAGGAGCCAGGGCAGCTGGGAGCGGGGA | E50: chr17: 45521472-45522848 |
| | | | | CACCATCCTCCTGGATAAGAGGCAGAGGCCGGGAGGAACCCCGTCAGCCGG | |
| | | | | GCGGGCAGGAAGCTCTGGGAGTAGCCT(PPTRRRSQGSWERGHHPPG*EAEA | |
| | | | | GRNPVSRAGRKLWE*P) | |
| 576 | BDKRB2->BDKRB1 | NM_000623->NM_000710 | | | E2: chr14: 95773163-95773271 |
| 577 | BDKRB2->BDKRB1 | NM_000623->NM_000710 | | | E2: chr14: 95773163-95773271 |
| 578 | RPL14->MPRIP | NM_003973->NM_015134 | | | E54: chr3: 40478433-40478863 |
| 579 | RPL14->MPRIP | NM_003973->NM_201274 | | | E54: chr3: 40478433-40478863 |
| 580 | RPL14->MPRIP | NM_001034996->NM_015134 | | | E54: chr3: 40478433-40478863 |
| 581 | RPL14->MPRIP | NM_001034996->NM_201274 | | | E54: chr3: 40478433-40478863 |
| 582 | PIKFYVE->TMEM119 | NM_015040->NM_181724 | YES | | E42: chr2: 208928158-208931720 |
| 583 | TMEM109->CTSD | NM_024092->NM_001909 | YES | | E4: chr11: 60445821-60447489 |
| 584 | SREBF1->IGFBP5 | NM_004176->NM_000599 | YES | | E19: chr17: 17655392-17656890 |
| 585 | SREBF1->IGFBP5 | NM_001005291->NM_000599 | YES | | E20: chr17: 17655392-17656890 |
| 586 | SREBF1->IGFBP5 | NM_004176->NM_000599 | YES | | E19: chr17: 17655392-17656890 |
| 587 | SREBF1->IGFBP5 | NM_001005291->NM_000599 | YES | | E20: chr17: 17655392-17656890 |
| 588 | MGP->REPS2 | NM_000900->NM_001080975 | YES | | E4: chr12: 14925381-14926481 |
| 589 | MGP->REPS2 | NM_000900->NM_004726 | YES | | E4: chr12: 14925381-14926481 |
| 590 | MGP->REPS2 | NM_001190839-> | YES | | E5: chrl 2: 14925381-14926481 |
| 590 | | NM_001080975 | | | |
| 591 | MGP->REPS2 | NM_001190839->NM_004726 | YES | | E5: chr12: 14925381-14926481 |
| 592 | AKT2->ACTB | NM_001626->NM_001101 | YES | | E14: chr19: 45428063-45431698 |
| 593 | AKT2->ACTB | NM_001626->NM_001101 | YES | | E14: chr19: 45428063-45431698 |
| 594 | SBF1->FAM 129B | NM_002972->NM_022833 | YES | | E41: chr22: 49230298-49232535 |
| 595 | SBF1->FAM 129B | NM_002972->NM_001035534 | YES | | E41: chr22: 49230298-49232535 |
| 596 | SBF1->FAM 129B | NM_002972->NM_022833 | YES | | E41: chr22: 49230298-49232535 |
| 597 | SBF1->FAM 129B | NM_002972->NM_001035534 | YES | | E41: chr22: 49230298-49232535 |
| 598 | RHOBTB3->CRNKL1 | NM_014899->NM_016652 | YES | | E12: chr5: 95154518-95157827 |
| 599 | ACTG1->PPP1R12C | NM_001614->NM_017607 | YES | | E6: chr17: 77091593-77092454 |
| 600 | POSTN->TM9SF3 | NM_001135935->NM_020123 | YES | | E21: chr13: 37034719-37035507 |
| 601 | POSTN->TM9SF3 | NM_006475->NM_020123 | YES | | E23: chr13: 37034719-37035507 |
| 602 | POSTN->TM9SF3 | NM_001135934->NM_020123 | YES | | E21: chr13: 37034719-37035507 |
| 603 | POSTN->TM9SF3 | NM_001135936->NM_020123 | YES | | E20: chr13: 37034719-37035507 |
| 604 | CLTA->PKP3 | NM_001833->NM_007183 | | | E1: chr9: 36180852-36181270 |
| 605 | CLTA->PKP3 | NM_001076677->NM_007183 | | | E1: chr9: 36180852-36181270 |
| 606 | CLTA->PKP3 | NM_001184761->NM_007183 | | | E1: chr9: 36180852-36181270 |
| 607 | CLTA->PKP3 | NM_001184760->NM_007183 | | | E1: chr9: 36180852-36181270 |
| 608 | CLTA->PKP3 | NM_007096->NM_007183 | | | E1: chr9: 36180852-36181270 |
| 609 | CLTA->PKP3 | NM_001184762->NM_007183 | | | E1: chr9: 36180852-36181270 |
| 610 | NTN1->HDLBP | NM_004822->NM_005336 | YES | | E7: chr17: 9083681-9088042 |
| 611 | NTN1->HDLBP | NM_004822->NM_203346 | YES | | E7: chr17: 9083681-9088042 |
| 612 | HACL1->COLQ | NM_012260->NM_005677 | | | E16: chr3: 15579868-15580055 |
| 613 | HACL1->COLQ | NM_012260->NM_080538 | | | E16: chr3: 15579868-15580055 |
| 614 | HACL1->COLQ | NM_012260->NM_080539 | | | E16: chr3: 15579868-15580055 |
| 615 | HACL1->COLQ | NM_012260->NM_005677 | | | E16: chr3: 15579868-15580055 |
| 616 | HACL1->COLQ | NM_012260->NM_080538 | | | E16: chr3: 15579868-15580055 |
| 617 | HACL1->COLQ | NM_012260->NM_080539 | | | E16: chr3: 15579868-15580055 |
| 618 | SHAN K3->TPT1 | NM_001080420->NM_003295 | YES | | E23: chr22: 49516014-49518507 |
| 619 | COL1A1->TIMP2 | NM_000088->NM_003255 | YES | | E51: chr17: 45616455-45618008 |
| 620 | FLNA->GPS1 | NM_001110556->NM_212492 | YES | | E48: chrX: 153230093-153230598 |
| 621 | FLNA->GPS1 | NM_001456->NM_212492 | YES | | E47: chrX: 153230093-153230598 |
| 622 | YWHAG->PDIA3 | NM_012479->NM_005313 | YES | | E2: chr7: 75794043-75797486 |
| 623 | YWHAG->PDIA3 | NM_012479->NM_005313 | YES | | E2: chr7: 75794043-75797486 |
| 624 | MAPK1IP1L->XPO1 | NM_144578->NM_003400 | YES | | E4: chr14: 54601086-54606665 |
| 625 | TP53I13->ABCA10 | NM_138349->NM_080282 | | | E6: chr17: 24923285-24923841 |
| 626 | COL1A1->GORASP2 | NM_000088->NM_015530 | | | E50: chr17: 45618137-45618380 |
| 627 | COL1A1->GORASP2 | NM_000088->NM_015530 | | | E50: chr17: 45618137-45618380 |
| 628 | COL1A2->ACTB | NM_000089->NM_001101 | | | E613: chr7: 93891583-93891691 |
| 629 | LGMN->NAP1L1 | NM_001008530->NM_004537 | NOT Evaluated | | E2: chr14: 92277159-92277277 |
| 630 | LGMN->NAP1L1 | NM_001008530->NM_139207 | NOT Evaluated | | E2: chr14: 92277159-92277277 |
| 631 | CTBS->GNG5 | NM_004388->NM_005274 | YES | | E6: chr1: 84801527-84801689 |
| 632 | CTBS->GNG5 | NM_004388->NM_005274 | YES | | E6: chr1: 84801527-84801689 |
| 633 | CTBS->GNG5 | NM_004388->NM_005274 | YES | | E6: chr1: 84801527-84801689 |
| 634 | CTBS->GNG5 | NM_004388->NM_005274 | YES | | E6: chr1: 84801527-84801689 |
| 635 | CTBS->GNG5 | NM_004388->NM_005274 | YES | | E6: chr1: 84801527-84801689 |
| 636 | CTBS->GNG5 | NM_004388->NM_005274 | YES | | E6: chr1: 84801527-84801689 |
| 637 | CTBS->GNG5 | NM_004388->NM_005274 | YES | | E6: chr1: 84801527-84801689 |
| 638 | CTBS->GNG5 | NM_004388->NM_005274 | YES | | E6: chr1: 84801527-84801689 |
| 639 | CTBS->GNG5 | NM_004388->NM_005274 | YES | | E6: chr1: 84801527-84801689 |
| 640 | CTBS->GNG5 | NM_004388->NM_005274 | YES | | E6: chr1: 84801527-84801689 |
| 641 | CTBS->GNG5 | NM_004388->NM_005274 | YES | | E6: chr1: 84801527-84801689 |
| 642 | ITGB4->KRT6A | NM_000213->NM_005554 | | | E137: chr17: 71244997-71245120 |
| 643 | ITGB4->KRT6A | NM_001005619->NM_005554 | | | E94: chr17: 71244997-71245120 |
| 644 | ITGB4->KRT6A | NM_001005731->NM_005554 | | | E95: chr17: 71244997-71245120 |
| 645 | KRT7->PKM2 | NM_005556->NM_002654 | | | E49: chr12: 50918730-50918826 |
| 646 | KRT7->PKM2 | NM_005556->NM_182471 | | | E49: chr12: 50918730-50918826 |
| 647 | KRT7->PKM2 | NM_005556->NM_182470 | | | E49: chr12: 50918730-50918826 |
| 648 | KRT7->PKM2 | NM_005556->NM_002654 | (part of KRT7) | | E49: chr12: 50918730-50918826 |
| 649 | KRT7->PKM2 | NM_005556->NM_182471 | (part of KRT7) | | E49: chr12: 50918730-50918826 |
| 650 | KRT7->PKM2 | NM_005556->NM_182470 | (part of KRT7) | | E49: chr12: 50918730-50918826 |
| 651 | TNRC18->SLC9A3R1 | NM_001080495->NM_004252 | YES | | E29: chr7: 5315031-5315106 |
| 652 | PTMA->GNB4 | NM_001099285->NM_021629 | YES | | E40: chr2: 232285757-232286494 |
| 653 | PTMA->GNB4 | NM_002823->NM_021629 | YES | | E40: chr2: 232285757-232286494 |
| 654 | GALNT8->KCNA6 | NM_017417->NM_002235 | | | E10: chr12: 4744805-4744973 |
| 655 | GALNT8->KCNA6 | NM_017417->NM_002235 | | | E10: chr12: 4744805-4744973 |
| 656 | GALNT8->KCNA6 | NM_017417->NM_002235 | | | E10: chr12: 4744805-4744973 |
| 657 | RBM6->SLC38A3 | NM_001167582->NM_006841 | YES | | E1: chr3: 49952480-49952662 |
| 658 | RBM6->SLC38A3 | NM_005777->NM_006841 | YES | | E1: chr3: 49952480-49952662 |
| 659 | ITGB4->KRT14 | NM_000213->NM_000526 | | | E159: chr17: 71264875-71264986 |
| 660 | ITGB4->KRT14 | NM_001005619->NM_000526 | | | E116: chr17: 71264875-71264986 |
| 661 | ITGB4->KRT14 | NM_001005731->NM_000526 | | | E116: chr17: 71264875-71264986 |
| 662 | RHOB->GATA3 | NM_004040->NM_002051 | YES | | E2: chr2: 20510315-20512682 |
| 663 | RHOB->GATA3 | NM_004040->NM_001002295 | YES | | E2: chr2: 20510315-20512682 |
| 664 | RPS5->ACTG1 | NM_001009->NM_001614 | (part of RPS5) | | E11: chr19: 63597675-63597774 |
| 665 | TES->HNRNPU | NM_015641->NM_031844 | YES | | E7: chr7: 115684583-115686073 |
| 666 | TES->HNRNPU | NM_015641->NM_004501 | YES | | E7: chr7: 115684583-115686073 |
| 667 | TES->HNRNPU | NM_152829->NM_031844 | YES | | E7: chr7: 115684583-115686073 |
| 668 | TES->HNRNPU | NM_152829->NM_004501 | YES | | E7: chr7: 115684583-115686073 |
| 669 | PLEC->PLEKHM2 | NM_201381->NM_015164 | | | E31: chr8: 145068659-145072040 |
| 670 | PLEC->PLEKHM2 | NM_201382->NM_015164 | | | E31: chr8: 145068659-145072040 |
| 671 | PLEC->PLEKHM2 | NM_201380->NM_015164 | | | E31: chr8: 145068659-145072040 |
| 672 | PLEC->PLEKHM2 | NM_201378->NM_015164 | | | E31: chr8: 145068659-145072040 |
| 673 | PLEC->PLEKHM2 | NM_201379->NM_015164 | | | E31: chr8: 145068659-145072040 |
| 674 | PLEC->PLEKHM2 | NM_201383->NM_015164 | | | E31: chr8: 145068659-145072040 |
| 675 | PLEC->PLEKHM2 | NM_201384->NM_015164 | | | E31: chr8: 145068659-145072040 |
| 676 | PLEC->PLEKHM2 | NM_000445->NM_015164 | | | E32: chr8: 145068659-145072040 |
| 677 | STC2->RNF11 | NM_003714->NM_014372 | | | E4: chr5: 172674331-172677858 |
| 678 | MT2A->KRT5 | NM_005953->NM_000424 | NOT Evaluated | | E4: chr16: 55199978-55200096 |
| 679 | MT2A->KRT5 | NM_005953->NM_000424 | NOT Evaluated | | E4: chr16: 55199978-55200096 |
| 680 | THSD4->PAQR5 | NM_024817->NM_017705 | YES | | E6: chr15: 69491079-69491216 |
| 681 | THSD4->PAQR5 | NM_024817->NM_001104554 | YES | | E6: chr15: 69491079-69491216 |
| 682 | FUS->ACTB | NM_004960->NM_001101 | YES | | E15: chr16: 31110220-31113691 |
| 683 | FUS->ACTB | NR_028388->NM_001101 | NOT Evaluated | | E14: chr16: 31110220-31113691 |
| 684 | FUS->ACTB | NM_001170937->NM_001101 | YES | | E15: chr16: 31110220-31113691 |
| 685 | FUS->ACTB | NM_001170634->NM_001101 | YES | | E15: chr16: 31110220-31113691 |
| 686 | ACTB->C20orf112 | NM_001101->NM_080616 | YES | | E6: chr7: 5533304-5534048 |
| 687 | ACTB->C200rf112 | NM_001101->NM_080616 | YES | | E6: chr7: 5533304-5534048 |
| 688 | ACTB->PMEPA1 | NM_001101->NM_199171 | YES | | E6: chr7: 5533304-5534048 |
| 689 | ACTB->PMEPA1 | NM_001101->NM_199169 | YES | | E6: chr7: 5533304-5534048 |
| 690 | ACTB->PMEPA1 | NM_001101->NM_199170 | YES | | E6: chr7: 5533304-5534048 |
| 691 | ACTB->PMEPA1 | NM_001101->NM_020182 | YES | | E6: chr7: 5533304-5534048 |
| 692 | RPL14->ATXN1 | NM_003973->NM_000332 | YES | CTG->GCG(L->A) | E54: chr3: 40478433-40478863 |
| 693 | RPL14->ATXN1 | NM_003973->NM_001128164 | YES | CTG->GCG(L->A) | E54: chr3: 40478433-40478863 |
| 694 | RPL14->ATXN1 | NM_001034996->NM_000332 | YES | CTG->GCG(L->A) | E54: chr3: 40478433-40478863 |
| 695 | RPL14->ATXN1 | NM_001034996->NM_001128164 | YES | CTG->GCG(L->A) | E54: chr3: 40478433-40478863 |
| 696 | RPL14->ATXN1 | NM_003973->NM_000332 | | | E54: chr3: 40478433-40478863 |
| 697 | RPL14->ATXN1 | NM_003973->NM_001128164 | | | E54: chr3: 40478433-40478863 |
| 698 | RPL14->ATXN1 | NM_001034996->NM_000332 | | | E54: chr3: 40478433-40478863 |
| 699 | RPL14->ATXN1 | NM_001034996->NM_001128164 | | | E54: chr3: 40478433-40478863 |
| 700 | RPL14->ATXN1 | NM_003973->NM_000332 | | | E54: chr3: 40478433-40478863 |
| 701 | RPL14->ATXN1 | NM_003973->NM_001128164 | | | E54: chr3: 40478433-40478863 |
| 702 | RPL14->ATXN1 | NM_001034996->NM_000332 | | | E54: chr3: 40478433-40478863 |
| 703 | RPL14->ATXN1 | NM_001034996->NM_001128164 | | | E54: chr3: 40478433-40478863 |
| 704 | SFI1->YPEL1 | NM_014775->NM_013313 | | | E5: chr22: 30272846-30272957 |
| 705 | SFI1->YPEL1 | NM_001007467->NM_013313 | | | E5: chr22: 30272846-30272957 |
| 706 | CNOT6->MICAL2 | NM_015455->NM_014632 | YES | | E1: chr5: 179854022-179854369 |
| 707 | CNOT6->MICAL2 | NM_015455->NM_014632 | YES | | E1: chr5: 179854022-179854369 |
| 708 | KRT17->PKM2 | NM_000422->NM_002654 | | | E4: chr17: 37031370-37031532 |
| 709 | KRT17->PKM2 | NM_000422->NM_182471 | | | E4: chr17: 37031370-37031532 |
| 710 | KRT17->PKM2 | NM_000422->NM_182470 | | | E4: chr17: 37031370-37031532 |
| 711 | EEF1DP3->FRY | NR_027062->NM_023037 | NOT Evaluated | | E2: chr13: 31418145-31418318 |
| 712 | EEF1DP3->FRY | NR_027062->NM_023037 | NOT Evaluated | | E2: chr13: 31418145-31418318 |
| 713 | EEF1DP3->FRY | NR_027062->NM_023037 | NOT_Evaluated | | E2: chr13: 31418145-31418318 |
| 714 | EEF1DP3->FRY | NR_027062->NM_023037 | NOT Evaluated | | E2: chr13: 31418145-31418318 |
| 715 | EEF1DP3->FRY | NR_027062->NM_023037 | NOT Evaluated | | E2: chr13: 31418145-31418318 |
| 716 | KRT15->KRT6A | NM_002275->NM_005554 | YES | | E8: chr17: 36923523-36923898 |
| 717 | ITGAV->ANKHD1 | NM_002210->NM_017747 | YES | | E17: chr2: 187229218-187229373 |
| 718 | ITGAV->ANKHD1 | NM_001145000->NM_017747 | YES | | E15: chr2: 187229218-187229373 |
| 719 | ITGAV->ANKHD1 | NM_001144999->NM_017747 | YES | | E17: chr2: 187229218-187229373 |
| 720 | KRT5->VCP | NM_000424->NM_007126 | YES | | E9: chr12: 51194625-51195291 |
| 721 | TMED2->ACTB | NM_006815->NM_001101 | YES | | E4: chr12: 122647104-122648641 |
| 722 | TMED2->ACTB | NM_006815->NM_001101 | YES | | E4: chr12: 122647104-122648641 |
| 723 | TNS4->KRT5 | NM_032865->NM_000424 | YES | | E13: chr17: 35885605-35887507 |
| 724 | TNS4->KRT5 | NM_032865->NM_000424 | YES | | E13: chr17: 35885605-35887507 |
| 725 | TPM4->CD24 | NM_001145160->NM_013230 | YES | | E18: chr19: 16073073-16074813 |
| 726 | TPM4->CD24 | NM_003290->NM_013230 | YES | | E16: chr19: 16073073-16074813 |
| 727 | MAF->IGFBP7 | NM_001031804->NM_001553 | YES | | E1: chr16: 78185246-78192123 |
| 728 | POLD3->COL3A1 | NM_006591->NM_000090 | YES | | E12: chr11: 74029256-74031413 |
| 729 | ATP1A1->KRT17 | NM_001160233->NM_000422 | NOT Evaluated | | E1: chr1: 116718011-116718386 |
| 730 | GAPDH->CD24 | NM_002046->NM_013230 | YES | | E108: chr12: 6517527-6517797 |
| 731 | EIF4G1->ABCC5 | NM_001194946->NM_005688 | (part of | | E27: chr3: 185528311-185528484 |
| | | | EIF4G1) | | |
| 732 | EIF4G1->ABCC5 | NM_001194947->NM_005688 | (part of | | E26: chr3: 185528311-185528484 |
| | | | EIF4G1) | | |
| 733 | EIF4G1->ABCC5 | NM_198242->NM_005688 | (part of | | E22: chr3: 185528311-185528484 |
| | | | EIF4G1) | | |
| 734 | EIF4G1->ABCC5 | NM_198244->NM_005688 | (part of | | E23: chr3: 185528311-185528484 |
| | | | EIF4G1) | | |
| 735 | EIF4G1->ABCC5 | NM_198241->NM_005688 | (part of | | E26: chr3: 185528311-185528484 |
| | | | EIF4G1) | | |
| 736 | EIF4G1->ABCC5 | NM_182917->NM_005688 | (part of | | E25: chr3: 185528311-185528484 |
| | | | EIF4G1) | | |
| 737 | EIF4G1->ABCC5 | NM_004953->NM_005688 | (part of | | E19: chr3: 185528311-185528484 |
| | | | EIF4G1) | | |
| 738 | HSP90AB1->KRT6A | NM_007355->NM_005554 | YES | INSERTION: GCAGCTCT | E70: chr6: 44327713-44327982 |
| | | | | CTCATCTCCTGGAACC | |
| | | | | (AALSSPGT) | |
| 739 | RRN3P3->CDR2 | NR_027460->NM_001802 | YES | | E5: chr16: 22348617-22348770 |
| 740 | RRN3P3->CDR2 | NR_027460->NM_001802 | YES | | E5: chr16: 22348617-22348770 |
| 741 | MALAT1->ACTG1 | NR_002819->NM_001614 | NOT Evaluated | | E9: chr11: 65021808-65030513 |
| 742 | MALAT1->ACTG1 | NR_002819->NM_001614 | NOT Evaluated | | E9: chr11: 65021808-65030513 |
| 743 | MALAT1->ACTG1 | NR_002819->NM_001614 | NOT Evaluated | | E9: chr11: 65021808-65030513 |
| 744 | MALAT1->ACTG1 | NR_002819->NM_001614 | NOT Evaluated | | E9: chr11: 65021808-65030513 |
| 745 | COL1A1->CD276 | NM_000088->NM_025240 | | | E44: chr17: 45620455-45620509 |
| 746 | COL1A1->CD276 | NM_000088->NM_001024736 | | | E44: chr17: 45620455-45620509 |
| 747 | COL1A1->CD276 | NM_000088->NM_025240 | | | E44: chr17: 45620455-45620509 |
| 748 | COL1A1->CD276 | NM_000088->NM_001024736 | | | E44: chr17: 45620455-45620509 |
| 749 | SLC26A2->CD24 | NM_000112->NM_013230 | YES | | E3: chr5: 149340048-149347156 |
| 750 | MTG1->LOC619207 | NM_138384->NR_002934 | | | E9: chr10: 135066185-135066267 |
| 751 | MTG1->LOC619207 | NM_138384->NR_002934 | | | E9: chr10: 135066185-135066267 |
| 752 | MTG1->LOC619207 | NM_138384->NR_002934 | | | E9: chr10: 135066185-135066267 |
| 753 | YWHAZ->ZBTB33 | NM_001135700->NM_006777 | YES | | E6: chr8: 101999980-102002156 |
| 754 | YWHAZ->ZBTB33 | NM_001135700->NM_001184742 | YES | | E6: chr8: 101999980-102002156 |
| 755 | YWHAZ->ZBTB33 | NM_003406->NM_006777 | YES | | E6: chr8: 101999980-102002156 |
| 756 | YWHAZ->ZBTB33 | NM_003406->NM_001184742 | YES | | E6: chr8: 101999980-102002156 |
| 757 | YWHAZ->ZBTB33 | NM_145690->NM_006777 | YES | | E6: chr8: 101999980-102002156 |
| 758 | YWHAZ->ZBTB33 | NM_145690->NM_001184742 | YES | | E6: chr8: 101999980-102002156 |
| 759 | YWHAZ->ZBTB33 | NM_001135699->NM_006777 | YES | | E6: chr8: 101999980-102002156 |
| 760 | YWHAZ->ZBTB33 | NM_001135699->NM_001184742 | YES | | E6: chr8: 101999980-102002156 |
| 761 | YWHAZ->ZBTB33 | NM_001135702->NM_006777 | YES | | E6: chr8: 101999980-102002156 |
| 762 | YWHAZ->ZBTB33 | NM_001135702->NM_001184742 | YES | | E6: chr8: 101999980-102002156 |
| 763 | YWHAZ->ZBTB33 | NM_001135701->NM_006777 | YES | | E6: chr8: 101999980-102002156 |
| 764 | YWHAZ->ZBTB33 | NM_001135701->NM_001184742 | YES | | E6: chr8: 101999980-102002156 |
| 765 | SEMA4C->PKM2 | NM_017789->NM_002654 | YES | | E15: chr2: 96889199-96890919 |
| 766 | SEMA4C->PKM2 | NM_017789->NM_182471 | YES | | E15: chr2: 96889199-96890919 |
| 767 | SEMA4C->PKM2 | NM_017789->NM_182470 | YES | | E15: chr2: 96889199-96890919 |
| 768 | ALDOA->TAGLN2 | NM_184043->NM_003564 | (part of | | E35: chr16: 29988651-29988851 |
| | | | ALDOA) | | |
| 769 | ALDOA->TAGLN2 | NM_184041->NM_003564 | (part of | | E35: chr16: 29988651-29988851 |
| | | | ALDOA) | | |
| 770 | ALDOA->TAGLN2 | NM_001127617->NM_003564 | (part of | | E35: chr16: 29988651-29988851 |
| | | | ALDOA) | | |
| 771 | ALDOA->TAGLN2 | NM_000034->NM_003564 | (part of | | E55: chr16: 29988651-29988851 |
| | | | ALDOA) | | |
| 772 | NCOR2->ELN | NM_001077261->NM_001081754 | | | E38: chr12: 123390504-123390703 |
| 773 | NCOR2->ELN | NM_001077261->NM_001081753 | | | E38: chr12: 123390504-123390703 |
| 774 | NCOR2->ELN | NM_001077261->NM_001081755 | | | E38: chr12: 123390504-123390703 |
| 775 | NCOR2->ELN | NM_001077261->NM_001081752 | | | E38: chr12: 123390504-123390703 |
| 776 | NCOR2->ELN | NM_001077261->NM_000501 | | | E38: chr12: 123390504-123390703 |
| 777 | NCOR2->ELN | NM_006312->NM_001081754 | | | E39: chr12: 123390504-123390703 |
| 778 | NCOR2->ELN | NM_006312->NM_001081753 | | | E39: chr12: 123390504-123390703 |
| 779 | NCOR2->ELN | NM_006312->NM_001081755 | | | E39: chr12: 123390504-123390703 |
| 780 | NCOR2->ELN | NM_006312->NM_001081752 | | | E39: chr12: 123390504-123390703 |
| 781 | NCOR2->ELN | NM_006312->NM_000501 | | | E39: chr12: 123390504-123390703 |
| 782 | HLA-A->ARF1 | NM_002116->NM_001658 | | | E15: chr6: 30020989-30021037 |
| 783 | HLA-A->ARF1 | NM_002116->NM_001024226 | | | E15: chr6: 30020989-30021037 |
| 784 | HLA-A->ARF1 | NM_002116->NM_001024227 | | | E15: chr6: 30020989-30021037 |
| 785 | HLA-A->ARF1 | NM_002116->NM_001024228 | | | E15: chr6: 30020989-30021037 |
| 786 | COL1A1->YWHAG | NM_000088->NM_012479 | YES | | E51: chr17: 45616455-45618008 |
| 787 | NAV2->WDFY1 | NM_001111018->NM_020830 | YES | | E114: chr11: 20096254-20099723 |
| 788 | NAV2->WDFY1 | NM_145117->NM_020830 | YES | | E114: chr11: 20096254-20099723 |
| 789 | NAV2->WDFY1 | NM_182964->NM_020830 | YES | | E114: chr11: 20096254-20099723 |
| 790 | NAV2->WDFY1 | NM_001111019->NM_020830 | YES | | E54: chr11: 20096254-20099723 |
| 791 | H1F0->ACTB | NM_005318->NM_001101 | YES | | E3: chr22: 36531059-36533389 |
| 792 | GOLPH3L->CTSS | NM_018178->NM_004079 | | | E4: chr1: 148900913-148901028 |
| 793 | CALR->NCL | NM_004343->NM_005381 | | | E72: chr19: 12915526-12916304 |
| 794 | CALR->NCL | NM_004343->NM_005381 | | | E72: chr19: 12915526-12916304 |
| 795 | CALR->NCL | NM_004343->NM_005381 | | | E72: chr19: 12915526-12916304 |
| 796 | CALR->NCL | NM_004343->NM_005381 | | | E72: chr19: 12915526-12916304 |
| 797 | C9orf30->TMEFF1 | NM_080655->NM_003692 | YES | | E2: chr9: 102244008-102244459 |
| 798 | C9orf30->TMEFF1 | NM_080655->NM_003692 | YES | | E2: chr9: 102244008-102244459 |
| 799 | C9orf30->TMEFF1 | NM_080655->NM_003692 | YES | | E2: chr9: 102244008-102244459 |
| 800 | C9orf30->TMEFF1 | NM_080655->NM_003692 | YES | | E2: chr9: 102244008-102244459 |
| 801 | C9orf30->TMEFF1 | NM_080655->NM_003692 | YES | | E2: chr9: 102244008-102244459 |
| 802 | C9orf30->TMEFF1 | NM_080655->NM_003692 | YES | | E2: chr9: 102244008-102244459 |
| 803 | MYH9->COL1A1 | NM_002473->NM_000088 | | | E37: chr22: 35011649-35011773 |

| | | Fusion Transcript | |
|---|---|---|---|
| | | Coding Sequence | |
| # | Boundary Exon 3′ Gene | (SEQ ID:) | Fusion Protein Sequence (SEQ ID NO: or GenBank Accession No.) |
| 1 | E17: chr14: 51993557-51993642 | 597 | 1083 |
| 2 | E17: chr14: 51993557-51993642 | 598 | 1084 |
| 3 | E4: chr7: 5534437-5534876 | 599 | 1085 |
| 4 | E4: chr7: 5534437-5534876 | 600 | 1086 |
| 5 | E10: chr11: 34442227-34442358 | 601 | 1087 |
| 6 | E10: chr11: 34442227-34442358 | 602 | 1088 |
| 7 | E10: chr11: 34442227-34442358 | 603 | 1089 |
| 8 | E45: chr17: 45620235-45620343 | 604 | 1090 |
| 9 | E45: chr17: 45620235-45620343 | 605 | 1091 |
| 10 | E45: chr17: 45620235-45620343 | 606 | 1092 |
| 11 | E7: chr3: 77678178-77678303 | 607 | 1093 |
| 12 | E6: chr3: 77678178-77678303 | 608 | 1094 |
| 13 | E6: chr11: 1732711-1732834 | | the entire LTBP4 protein from NM_003573 |
| 14 | E6: chr11: 1732711-1732834 | | the entire LTBP4 protein from NM_001042544 |
| 15 | E6: chr11: 1732711-1732834 | | the entire LTBP4 protein from NM_001042545 |
| 16 | E3: chr8: 128972016-128972426 | 609 | Assuming: intact protein for NR_003367 |
| 17 | E3: chr8: 128972016-128972426 | 610 | Assuming: intact protein for NR_003367 |
| 18 | E3: chr8: 128972016-128972426 | 611 | Assuming: intact protein for NR_003367 |
| 19 | E3: chr8: 128972016-128972426 | 612 | Assuming: intact protein for NR_003367 |
| 20 | E3: chr8: 128972016-128972426 | 613 | Assuming: intact protein for NR_003367 |
| 21 | E3: chr8: 128972016-128972426 | 614 | Assuming: intact protein for NR_003367 |
| 22 | E2: chr8: 128936582-128936747 | 615 | Assuming: intact protein for NR_003367 |
| 23 | E2: chr8: 128936582-128936747 | 616 | Assuming: intact protein for NR_003367 |
| 24 | E5: chr20: 43387342-43389469 | | the entire PTMA protein from NM_001099285 |
| 25 | E5: chr20: 43387342-43389469 | | the entire PTMA protein from NM_002823 |
| 26 | E1: chr12: 51199792-51200510 | 617 | 1095 |
| 27 | E3: chr17: 77229079-77229120 | 618 | 1096 |
| 28 | E2: chr17: 77229079-77229120 | 619 | 1097 |
| 29 | E9: chr11: 1730560-1731476 | | the entire SFN protein from NM_006142 |
| 30 | E1: chr17: 36996087-36996673 | | the entire KRT7 protein from NM_005556 |
| 31 | E2: chr20: 1249006-1249079 | 620 | 1098 |
| 32 | E2: chr20: 1249006-1249079 | 621 | 1099 |
| 33 | E2: chr20: 1249006-1249079 | 622 | 1100 |
| 34 | E2: chr20: 1249006-1249079 | 623 | 1101 |
| 35 | E6: chr21: 41642388-41642521 | 624 | 1102 |
| 36 | E7: chr21: 41642388-41642521 | 625 | 1103 |
| 37 | E4: chr7: 5534437-5534876 | 626 | 1104 |
| 38 | E1: chr12: 51199792-51200510 | 627 | 1105 |
| 39 | E1: chr12: 51199792-51200510 | 628 | 1106 |
| 40 | E1: chr3: 66633303-66633535 | 629 | 1107 |
| 41 | E26: chr12: 48317990-48325953 | | the entire COL1A1 protein from NM_000088 |
| 42 | E25: chr12: 48317990-48325953 | | the entire COL1A1 protein from NM_000088 |
| 43 | E16: chr16: 29725355-29725715 | 630 | 1108 |
| 44 | E19: chr16: 29725355-29725715 | 631 | 1109 |
| 45 | E8: chr6: 33375451-33377526 | | the entire PTRF protein from NM_012232 |
| 46 | E7: chr6: 33375451-33377526 | | the entire PTRF protein from NM_012232 |
| 47 | E11: chr22: 21565879-21565998 | 632 | 1110 |
| 48 | E11: chr22: 21565879-21565998 | 633 | 1111 |
| 49 | E2: chr12: 90082512-90082625 | | the entire VPS35 protein from NM_018206 |
| 50 | E3: chr12: 90082512-90082625 | | the entire VPS35 protein from NM_018206 |
| 51 | E3: chr12: 90082512-90082625 | | the entire VPS35 protein from NM_018206 |
| 52 | E2: chr12: 90082512-90082625 | | the entire VPS35 protein from NM_018206 |
| 53 | E3: chr12: 90082512-90082625 | | the entire VPS35 protein from NM_018206 |
| 54 | E3: chr12: 90082512-90082625 | | the entire VPS35 protein from NM_018206 |
| 55 | E1: chr17: 36914833-36915391 | | the entire GAPDH protein from NM_002046 |
| 56 | E1: chr17: 36914833-36915391 | | the entire GAPDH protein from NM_002046 |
| 57 | E612: chr2: 189584598-189585717 | | the entire SPATS2L protein from NM_015535 |
| 57 | E612: chr2: 189584598-189585717 | | the entire SPATS2L protein from NM_001100422 |
| 59 | E612: chr2: 189584598-189585717 | | the entire SPATS2L protein from NM_001100424 |
| 60 | E612: chr2: 189584598-189585717 | | the entire SPATS2L protein from NM_001100423 |
| 61 | E6: chr17: 58863396-58865687 | | the entire YWHAG protein from NM_012479 |
| 62 | E6: chr17: 58863396-58865687 | | the entire YWHAG protein from NM_012479 |
| 63 | E6: chr17: 58863396-58865687 | | the entire YWHAG protein from NM_012479 |
| 64 | E1: chr14: 68515421-68515836 | | the entire LASP1 protein from NM_006148 |
| 65 | E1: chr14: 68515421-68515836 | | the entire LASP1 protein from NM_006148 |
| 66 | E1: chr14: 68515421-68515836 | | the entire LASP1 protein from NM_006148 |
| 67 | E18: chr10: 76458252-76462645 | 634 | 1112 |
| 68 | E18: chr10: 76458252-76462645 | 635 | 1113 |
| 69 | E18: chr10: 76458252-76462645 | 636 | 1114 |
| 70 | E2: chr5: 17328316-17329943 | | the entire COL1A1 protein from NM_000088 |
| 71 | E26: chr12: 56209209-56210198 | | the entire COL1A1 protein from NM_000088 |
| 72 | E8: chr6: 30568504-30569960 | | the entire TSPAN14 protein from NM_030927 |
| 73 | E8: chr6: 30568504-30569960 | | the entire TSPAN14 protein from NM_001128309 |
| 74 | E8: chr6: 30568504-30569960 | | the entire TSPAN14 protein from NM_030927 |
| 75 | E8: chr6: 30568504-30569960 | | the entire TSPAN14 protein from NM_001128309 |
| 76 | E1: chr8: 145088547-145088680 | 637 | 1115 |
| 77 | E256: chr8: 145088547-145088680 | 638 | 1116 |
| 78 | E264: chr8: 145088547-145088680 | 639 | 1117 |
| 79 | E20: chr8: 145076539-145076692 | 640 | 1118 |
| 80 | E20: chr8: 145076539-145076692 | 641 | 1119 |
| 81 | E20: chr8: 145076539-145076692 | 642 | 1120 |
| 82 | E20: chr8: 145076539-145076692 | 643 | 1121 |
| 83 | E20: chr8: 145076539-145076692 | 644 | 1122 |
| 84 | E20: chr8: 145076539-145076692 | 645 | 1123 |
| 85 | E20: chr8: 145076539-145076692 | 646 | 1124 |
| 86 | E21: chr8: 145076539-145076692 | 647 | 1125 |
| 87 | E4: chr7: 5534437-5534876 | 648 | 1126 |
| 88 | E8: chr7: 26199719-26199839 | 649 | 1127 |
| 89 | E9: chr7: 26199719-26199839 | 650 | 1128 |
| 90 | E2: chr7: 75794043-75797486 | 651 | 1129 |
| 91 | E2: chr7: 75794043-75797486 | 652 | 1130 |
| 92 | E2: chr7: 75794043-75797486 | 653 | 1131 |
| 93 | E2: chr7: 75794043-75797486 | 654 | 1132 |
| 94 | E2: chr7: 75794043-75797486 | 655 | 1133 |
| 95 | E1: chr17: 36996087-36996673 | 656 | 1134 |
| 96 | E1: chr17: 36996087-36996673 | 657 | 1135 |
| 97 | E1: chr12: 51199792-51200510 | 658 | 1136 |
| 98 | E1: chr12: 51199792-51200510 | 659 | 1137 |
| 99 | E1: chr12: 51199792-51200510 | 660 | 1138 |
| 100 | E1: chr12: 51199792-51200510 | 661 | 1139 |
| 101 | E20: chr12: 56206615-56207277 | | the entire CD74 protein from NM_001025158 |
| 102 | E2: chr14: 68324127-68326962 | | the entire CALR protein from NM_004343 |
| 103 | E72: chr19: 12915526-12916304 | | the entire ZFP36L1 protein from NM_004926 |
| 104 | E2: chr14: 68324127-68326962 | | the entire CALR protein from NM_004343 |
| 105 | E50: chr17: 45618137-45618380 | 662 | 1140 |
| 106 | E50: chr17: 45618137-45618380 | 663 | 1141 |
| 107 | E33: chr17: 45623176-45623284 | 664 | 1142 |
| 108 | E3: chr17: 45631915-45631950 | 665 | 1143 |
| 109 | E32: chr8: 145061308-145068551 | 666 | 1144 |
| 110 | E32: chr8: 145061308-145068551 | 667 | 1145 |
| 111 | E32: chr8: 145061308-145068551 | 668 | 1146 |
| 112 | E32: chr8: 145061308-145068551 | 669 | 1147 |
| 113 | E32: chr8: 145061308-145068551 | 670 | 1148 |
| 114 | E32: chr8: 145061308-145068551 | 671 | 1149 |
| 115 | E32: chr8: 145061308-145068551 | 672 | 1150 |
| 116 | E33: chr8: 145061308-145068551 | 673 | 1151 |
| 117 | E9: chr11: 1730560-1731476 | | the entire EPHA2 protein from NM_004431 |
| 118 | E17: chr8: 87639631-87642842 | | the entire IFI27 protein from NM_001130080 |
| 119 | E17: chr8: 87639631-87642842 | | the entire IFI27 protein from NM_005532 |
| 120 | E8: chr19: 10230284-10231736 | 674 | 1153 |
| 121 | E8: chr19: 10230284-10231736 | 675 | 1154 |
| 122 | E8: chr19: 10230284-10231736 | 676 | 1155 |
| 123 | E31: chr8: 145068659-145072040 | 677 | 1156 |
| 124 | E31: chr8: 145068659-145072040 | 678 | 1157 |
| 125 | E31: chr8: 145068659-145072040 | 679 | 1157 |
| 126 | E31: chr8: 145068659-145072040 | 680 | 1158 |
| 127 | E31: chr8: 145068659-145072040 | 681 | 1159 |
| 128 | E31: chr8: 145068659-145072040 | 682 | 1160 |
| 129 | E31: chr8: 145068659-145072040 | 683 | 1161 |
| 130 | E32: chr8: 145068659-145072040 | 684 | 1162 |
| 131 | E31: chr8: 145068659-145072040 | 685 | 1163 |
| 132 | E31: chr8: 145068659-145072040 | 686 | 1164 |
| 133 | E31: chr8: 145068659-145072040 | 687 | 1165 |
| 134 | E31: chr8: 145068659-145072040 | 688 | 1166 |
| 135 | E31: chr8: 145068659-145072040 | 689 | 1167 |
| 136 | E31: chr8: 145068659-145072040 | 690 | 1168 |
| 137 | E31: chr8: 145068659-145072040 | 691 | 1169 |
| 138 | E32: chr8: 145068659-145072040 | 692 | 1170 |
| 139 | E37: chr19: 44539168-44539569 | | the entire C2orf56 protein from NM_144736 |
| 140 | E37: chr19: 44539168-44539569 | | the entire C2orf56 protein from NM_001083946 |
| 141 | E20: chr1: 114736921-114742005 | | the entire POSTN protein from NM_001135935 |
| 142 | E19: chr1: 114736921-114742005 | | the entire POSTN protein from NM_001135935 |
| 143 | E20: chr1: 114736921-114742005 | | the entire POSTN protein from NM_006475 |
| 144 | E19: chr1: 114736921-114742005 | | the entire POSTN protein from NM_006475 |
| 145 | E20: chr1: 114736921-114742005 | | the entire POSTN protein from NM_001135934 |
| 146 | E19: chr1: 114736921-114742005 | | the entire POSTN protein from NM_001135934 |
| 147 | E20: chr1: 114736921-114742005 | | the entire POSTN protein from NM_001135936 |
| 148 | E19: chr1: 114736921-114742005 | | the entire POSTN protein from NM_001135936 |
| 149 | E1: chrY: 19611913-19614093 | 693 | 1171 |
| 150 | E1: chrY: 19611913-19614093 | 694 | 1172 |
| 151 | E2: chr19: 9810111-9810324 | 695 | 1173 |
| 152 | E2: chr19: 9810111-9810324 | 696 | 1174 |
| 153 | E2: chr19: 9810111-9810324 | 697 | 1175 |
| 154 | E2: chr19: 9810111-9810324 | 698 | 1176 |
| 155 | E2: chr19: 9810111-9810324 | 699 | 1177 |
| 156 | E1: chr17: 36996087-36996673 | 700 | 1178 |
| 157 | E5: chr17: 45631585-45631687 | 701 | 1179 |
| 158 | E2: chr5: 151035885-151035955 | 702 | 1180 |
| 159 | E2: chr5: 151035885-151035955 | 703 | 1181 |
| 160 | E2: chr5: 151035885-151035955 | 704 | 1182 |
| 161 | E35: chr21: 45749475-45749620 | 705 | 1183 |
| 162 | E36: chr21: 45749475-45749620 | 706 | 1184 |
| 163 | E35: chr21: 45749475-45749620 | 707 | 1185 |
| 164 | E2: chr5: 151035885-151035955 | 708 | 1186 |
| 165 | E2: chr5: 151035885-151035955 | 709 | 1187 |
| 166 | E2: chr5: 151035885-151035955 | 710 | 1188 |
| 167 | E2: chr5: 151035885-151035955 | 711 | 1189 |
| 168 | E2: chr5: 151035885-151035955 | 712 | 1190 |
| 169 | E2: chr5: 151035885-151035955 | 713 | 1191 |
| 170 | E10: chr6: 111302679-111303111 | | the entire IGFBP5 protein from NM_000599 |
| 171 | E39: chr17: 45621736-45621898 | 714 | 1192 |
| 172 | E39: chr17: 45621736-45621898 | 715 | 1193 |
| 173 | E54: chr3: 40478433-40478863 | 716 | 1194 |
| 174 | E54: chr3: 40478433-40478863 | 717 | 1195 |
| 175 | E13: chr1: 207865615-207865994 | 718 | 1196 |
| 176 | E14: chr1: 207865615-207865994 | 719 | 1197 |
| 177 | E14: chr1: 207865615-207865994 | 720 | 1198 |
| 178 | E5: chr6: 37089362-37089519 | 721 | 1199 |
| 179 | E2: chr1: 243070563-243075269 | | the entire CTTN protein from NM_005231 |
| 180 | E5: chr1: 94767319-94768740 | | the entire FBLIM1 protein from NM_017556 |
| 181 | E6: chr1: 94767319-94768740 | | the entire FBLIM1 protein from NM_017556 |
| 182 | E5: chr1: 94767319-94768740 | | the entire FBLIM1 protein from NM_001024216 |
| 183 | E6: chr1: 94767319-94768740 | | the entire FBLIM1 protein from NM_001024216 |
| 184 | E7: chr6: 30701257-30702153 | | the entire GAPDH protein from NM_002046 |
| 185 | E11: chr17: 34143675-34145379 | 722 | 1200 |
| 186 | E1: chr11: 525415-525550 | 723 | 1201 |
| 187 | E1: chr11: 525415-525550 | 724 | 1202 |
| 188 | E1: chr11: 525415-525550 | 725 | 1203 |
| 189 | E9: chr12: 51194625-51195291 | | the entire RNF213 protein from NM_020914 |
| 190 | E23: chr10: 24709803-24710002 | 726 | 1204 |
| 191 | E37: chr10: 24709803-24710002 | 727 | 1205 |
| 192 | E45: chr10: 24709803-24710002 | 728 | 1206 |
| 193 | E25: chr1: 120269450-120269956 | 729 | 1207 |
| 194 | E14: chr6: 35918289-35918359 | 730 | 1208 |
| 195 | E14: chr6: 35918289-35918359 | 731 | 1209 |
| 196 | E14: chr6: 35918289-35918359 | 732 | 1210 |
| 197 | E14: chr6: 35918289-35918359 | 733 | 1211 |
| 198 | E2: chr8: 22318153-22318438 | 734 | Assuming: intact protein for NM_015359 |
| 199 | E2: chr8: 22318153-22318438 | 735 | Assuming: intact protein for NM_001128431 |
| 200 | E2: chr8: 22318153-22318438 | 736 | Assuming: intact protein for NM_001135154 |
| 201 | E2: chr8: 22318153-22318438 | 737 | Assuming: intact protein for NM_001135153 |
| 202 | E2: chr8: 22318153-22318438 | 738 | Assuming: intact protein for NM_015359 |
| 203 | E2: chr8: 22318153-22318438 | 739 | Assuming: intact protein for NM_001128431 |
| 204 | E2: chr8: 22318153-22318438 | 740 | Assuming: intact protein for NM_001135154 |
| 205 | E2: chr8: 22318153-22318438 | 741 | Assuming: intact protein for NM_001135153 |
| 206 | E2: chr8: 22318153-22318438 | 742 | Assuming: intact protein for NM_015359 |
| 207 | E2: chr8: 22318153-22318438 | 743 | Assuming: intact protein for NM_001128431 |
| 208 | E2: chr8: 22318153-22318438 | 744 | Assuming: intact protein for NM_001135154 |
| 209 | E2: chr8: 22318153-22318438 | 745 | Assuming: intact protein for NM_001135153 |
| 210 | E2: chr8: 22318153-22318438 | 746 | Assuming: intact protein for NM_015359 |
| 211 | E2: chr8: 22318153-22318438 | 747 | Assuming: intact protein for NM_001128431 |
| 212 | E2: chr8: 22318153-22318438 | 748 | Assuming: intact protein for NM_001135154 |
| 213 | E2: chr8: 22318153-22318438 | 749 | Assuming: intact protein for NM_001135153 |
| 214 | E6: chr7: 5533304-5534048 | | the entire IRF2BP2 protein from NM_182972 |
| 215 | E6: chr7: 5533304-5534048 | | the entire IRF2BP2 protein from NM_001077397 |
| 216 | E2: chr19: 44618086-44618188 | 750 | 1212 |
| 217 | E2: chr18: 22335033-22335212 | | the entire LOC728606 protein from NR_024259 |
| 218 | E2: chr18: 22335033-22335212 | | the entire LOC728606 protein from NR_024259 |
| 219 | E3: chr18: 22335033-22335212 | | the entire LOC728606 protein from NR_024259 |
| 220 | E2: chr18: 22335033-22335212 | | the entire LOC728606 protein from NR_024259 |
| 221 | E2: chr18: 22335033-22335212 | | the entire LOC728606 protein from NR_024259 |
| 222 | E3: chr18: 22335033-22335212 | | the entire LOC728606 protein from NR_024259 |
| 223 | E1: chr12: 51199792-51200510 | 751 | 1213 |
| 224 | E1: chr12: 51199792-51200510 | 752 | 1214 |
| 225 | E1: chr17: 35472593-35472871 | 753 | 1215 |
| 226 | E1: chr17: 35472593-35472871 | 754 | 1216 |
| 227 | E1: chr17: 35472593-35472871 | 755 | 1217 |
| 228 | E48: chr9: 139021506-139022237 | 756 | 1218 |
| 229 | E48: chr9: 139021506-139022237 | 757 | 1219 |
| 230 | E48: chr9: 139021506-139022237 | 758 | 1220 |
| 231 | E48: chr9: 139021506-139022237 | 759 | 1221 |
| 232 | E14: chr10: 111883073-111885313 | | the entire FTL protein from NM_000146 |
| 233 | E15: chr10: 111883073-111885313 | | the entire FTL protein from NM_000146 |
| 234 | E14: chr10: 111883073-111885313 | | the entire FTL protein from NM_000146 |
| 235 | E32: chr1: 144152539-144153985 | | the entire CYB5R3 protein from NM_001171660 |
| 236 | E32: chr1: 144152539-144153985 | | the entire CYB5R3 protein from NM_001171661 |
| 237 | E32: chr1: 144152539-144153985 | | the entire CYB5R3 protein from NM_007326 |
| 238 | E32: chr1: 144152539-144153985 | | the entire CYB5R3 protein from NM_001129819 |
| 239 | E32: chr1: 144152539-144153985 | | the entire CYB5R3 protein from NM_000398 |
| 240 | E2: chr14: 102663094-102663719 | 760 | 1222 |
| 241 | E13: chr17: 20843497-20846978 | | the entire MRPL52 protein from NM_178336 |
| 242 | E13: chr17: 20843497-20846978 | | the entire MRPL52 protein from NM_180982 |
| 243 | E13: chr17: 20843497-20846978 | | the entire MRPL52 protein from NM_181306 |
| 244 | E13: chr17: 20843497-20846978 | | the entire MRPL52 protein from NM_181305 |
| 245 | E13: chr17: 20843497-20846978 | | the entire MRPL52 protein from NM_181304 |
| 246 | E13: chr17: 20843497-20846978 | | the entire MRPL52 protein from NM_181307 |
| 247 | E9: chr11: 1730560-1731476 | | the entire PLXNA1 protein from NM_032242 |
| 248 | E53: chr1: 31904224-31904269 | 761 | 1223 |
| 249 | E1: chr1: 2110341-2114884 | | the entire SLC9A3R1 protein from NM_004252 |
| 250 | E6: chr19: 18133088-18133305 | 762 | 1224 |
| 251 | E48: chrX: 153230093-153230598 | | the entire SBF1 protein from NM_002972 |
| 252 | E47: chrX: 153230093-153230598 | | the entire SBF1 protein from NM_002972 |
| 253 | E13: chr16: 54096751-54098087 | | the entire CAV1 protein from NM_001753 |
| 254 | E13: chr16: 54096751-54098087 | | the entire CAV1 protein from NM_001753 |
| 255 | E13: chr16: 54096751-54098087 | | the entire CAV1 protein from NM_001172895 |
| 256 | E13: chr16: 54096751-54098087 | | the entire CAV1 protein from NM_001172895 |
| 257 | E13: chr16: 54096751-54098087 | | the entire CAV1 protein from NM_001172896 |
| 258 | E13: chr16: 54096751-54098087 | | the entire CAV1 protein from NM_001172896 |
| 259 | E13: chr16: 54096751-54098087 | | the entire CAV1 protein from NM_001172897 |
| 260 | E13: chr16: 54096751-54098087 | | the entire CAV1 protein from NM_001172897 |
| 261 | E1: chr19: 18911659-18912113 | | the entire CTSD protein from NM_001909 |
| 262 | E8: chr11: 101605642-101609364 | 763 | 1225 |
| 263 | E9: chr11: 101605642-101609364 | 764 | 1226 |
| 264 | E7: chr11: 101605642-101609364 | 765 | 1227 |
| 265 | E9: chr11: 101605642-101609364 | 766 | 1228 |
| 266 | E2: chr2: 46839161-46843431 | 767 | 1229 |
| 267 | E2: chr2: 46839161-46843431 | 768 | 1230 |
| 268 | E1: chr16: 52877196-52877879 | 769 | 1231 |
| 269 | E7: chr12: 53536820-53536943 | 770 | 1232 |
| 270 | E10: chr5: 151021201-151023353 | | the entire SRRM2 protein from NM_016333 |
| 271 | E10: chr5: 151021201-151023353 | | the entire SRRM2 protein from NM_016333 |
| 272 | E48: chr8: 121452571-121453454 | | the entire DNAJA2 protein from NM_005880 |
| 273 | E6: chr7: 5533304-5534048 | | the entire KRT81 protein from NM_002281 |
| 274 | E1: chr13: 76352304-76358541 | 771 | 1233 |
| 275 | E1: chr5: 179267309-179267462 | 772 | 1234 |
| 276 | E1: chr5: 179267309-179267462 | 773 | 1235 |
| 277 | E2: chr19: 44618086-44618188 | 774 | 1236 |
| 278 | E2: chr10: 104455092-104455236 | 775 | 1237 |
| 279 | E2: chr10: 104455092-104455236 | 776 | 1238 |
| 280 | E2: chr10: 104455092-104455236 | 777 | 1239 |
| 281 | E2: chr10: 104455092-104455236 | 778 | 1240 |
| 282 | E2: chr10: 104455092-104455236 | 779 | 1241 |
| 283 | E2: chr10: 104455092-104455236 | 780 | 1242 |
| 284 | E2: chr10: 104455092-104455236 | 781 | 1243 |
| 285 | E2: chr10: 104455092-104455236 | 782 | 1244 |
| 286 | E6: chr22: 21567554-21568011 | 783 | 1245 |
| 287 | E12: chr22: 21567554-21568011 | 784 | 1246 |
| 288 | E6: chr22: 21567554-21568011 | 785 | 1247 |
| 289 | E12: chr22: 21567554-21568011 | 786 | 1248 |
| 290 | E6: chr22: 21567554-21568011 | 787 | 1249 |
| 291 | E12: chr22: 21567554-21568011 | 788 | 1250 |
| 292 | E2: chr6: 74008849-74008974 | | the entire C6orf147 protein from NR_027005 |
| 293 | E1: chr12: 11039827-11041741 | 789 | 1251 |
| 294 | E1: chr12: 11039827-11041741 | 790 | 1252 |
| 295 | E1: chr12: 11039827-11041741 | 791 | 1253 |
| 296 | E1: chr12: 11039827-11041741 | 792 | 1254 |
| 297 | E6: chr7: 5533304-5534048 | | the entire ACTN4 protein from NM_004924 |
| 298 | E6: chr7: 5533304-5534048 | | the entire ACTN4 protein from NM_004924 |
| 299 | E6: chr7: 5533304-5534048 | | the entire ACTN4 protein from NM_004924 |
| 300 | E6: chr7: 5533304-5534048 | | the entire ACTN4 protein from NM_004924 |
| 301 | E6: chr7: 5533304-5534048 | | the entire ACTN4 protein from NM_004924 |
| 302 | E12: chr17: 16285406-16286063 | | the entire MGP protein from NM_000900 |
| 303 | E10: chr17: 16285406-16286063 | | the entire MGP protein from NM_000900 |
| 304 | E10: chr17: 16285406-16286063 | | the entire MGP protein from NM_000900 |
| 305 | E12: chr17: 16285406-16286063 | | the entire MGP protein from NM_000900 |
| 306 | E12: chr17: 16285406-16286063 | | the entire MGP protein from NM_000900 |
| 307 | E10: chr17: 16285406-16286063 | | the entire MGP protein from NM_000900 |
| 308 | E8: chr17: 16285406-16286063 | | the entire MGP protein from NM_000900 |
| 309 | E8: chr17: 16285406-16286063 | | the entire MGP protein from NM_000900 |
| 310 | E10: chr17: 16285406-16286063 | | the entire MGP protein from NM_000900 |
| 311 | E10: chr17: 16285406-16286063 | | the entire MGP protein from NM_000900 |
| 312 | E10: chr17: 16285406-16286063 | | the entire MGP protein from NM_000900 |
| 313 | E8: chr17: 16285406-16286063 | | the entire MGP protein from NM_000900 |
| 314 | E10: chr17: 16285406-16286063 | | the entire MGP protein from NM_000900 |
| 315 | E10: chr17: 16285406-16286063 | | the entire MGP protein from NM_000900 |
| 316 | E12: chr17: 16285406-16286063 | | the entire MGP protein from NM_001190839 |
| 317 | E10: chr17: 16285406-16286063 | | the entire MGP protein from NM_001190839 |
| 318 | E10: chr17: 16285406-16286063 | | the entire MGP protein from NM_001190839 |
| 319 | E12: chr17: 16285406-16286063 | | the entire MGP protein from NM_001190839 |
| 320 | E12: chr17: 16285406-16286063 | | the entire MGP protein from NM_001190839 |
| 321 | E10: chr17: 16285406-16286063 | | the entire MGP protein from NM_001190839 |
| 322 | E8: chr17: 16285406-16286063 | | the entire MGP protein from NM_001190839 |
| 323 | E8: chr17: 16285406-16286063 | | the entire MGP protein from NM_001190839 |
| 324 | E10: chr17: 16285406-16286063 | | the entire MGP protein from NM_001190839 |
| 325 | E10: chr17: 16285406-16286063 | | the entire MGP protein from NM_001190839 |
| 326 | E10: chr17: 16285406-16286063 | | the entire MGP protein from NM_001190839 |
| 327 | E8: chr17: 16285406-16286063 | | the entire MGP protein from NM_001190839 |
| 328 | E10: chr17: 16285406-16286063 | | the entire MGP protein from NM_001190839 |
| 329 | E10: chr17: 16285406-16286063 | | the entire MGP protein from NM_001190839 |
| 330 | E1: chr4: 170167673-170168043 | | the entire PALLD protein from NM_016081 |
| 331 | E1: chr4: 170167673-170168043 | | the entire PALLD protein from NM_016081 |
| 332 | E6: chr7: 5533304-5534048 | 793 | 1255 |
| 333 | E4: chr17: 77092808-77093247 | 794 | 1256 |
| 334 | E5: chr11: 1735129-1735362 | | the entire GNB2 protein from NM_005273 |
| 335 | E10: chr6: 139289230-139289311 | 795 | 1257 |
| 336 | E19: chr6: 139289230-139289311 | 796 | NOT Calculated |
| 337 | E10: chr6: 139289230-139289311 | 797 | 1258 |
| 338 | E19: chr6: 139289230-139289311 | 798 | NOT Calculated |
| 339 | E10: chr6: 139289230-139289311 | 799 | 1259 |
| 340 | E19: chr6: 139289230-139289311 | 800 | NOT Calculated |
| 341 | E10: chr6: 139289230-139289311 | 801 | 1260 |
| 342 | E19: chr6: 139289230-139289311 | 802 | NOT Calculated |
| 343 | E10: chr6: 139289230-139289311 | 803 | 1261 |
| 344 | E19: chr6: 139289230-139289311 | 804 | NOT Calculated |
| 345 | E10: chr6: 139289230-139289311 | 805 | 1262 |
| 346 | E19: chr6: 139289230-139289311 | 806 | NOT Calculated |
| 347 | E11: chr6: 139283866-139283954 | 807 | 1263 |
| 348 | E10: chr6: 139283866-139283954 | 808 | 1264 |
| 349 | E11: chr6: 139283866-139283954 | 809 | 1265 |
| 350 | E10: chr6: 139283866-139283954 | 810 | 1266 |
| 351 | E11: chr6: 139283866-139283954 | 811 | 1267 |
| 352 | E10: chr6: 139283866-139283954 | 812 | 1268 |
| 353 | E11: chr6: 139283866-139283954 | 813 | 1269 |
| 354 | E10: chr6: 139283866-139283954 | 814 | 1270 |
| 355 | E11: chr6: 139283866-139283954 | 815 | 1271 |
| 356 | E10: chr6: 139283866-139283954 | 816 | 1272 |
| 357 | E11: chr6: 139283866-139283954 | 817 | 1273 |
| 358 | E10: chr6: 139283866-139283954 | 818 | 1274 |
| 359 | E5: chr11: 2106922-2111029 | 819 | NOT Calculated |
| 360 | E5: chr11: 2106922-2111029 | 820 | NOT Calculated |
| 361 | E4: chr11: 2106922-2111029 | 821 | NOT Calculated |
| 362 | E1: chr17: 45633770-45633999 | 822 | 1275 |
| 363 | E1: chr17: 45633770-45633999 | 823 | 1276 |
| 364 | E1: chr17: 45633770-45633999 | 824 | 1277 |
| 365 | E1: chr17: 45633770-45633999 | 825 | 1278 |
| 366 | E1: chr17: 45633770-45633999 | 826 | 1279 |
| 367 | E1: chr12: 51131589-51132177 | 827 | 1280 |
| 368 | E3: chr1: 158480373-158480448 | | the entire APOOL protein from NM_198450 |
| 369 | E2: chr1: 158480373-158480448 | | the entire APOOL protein from NM_198450 |
| 370 | E3: chr1: 158480373-158480448 | | the entire APOOL protein from NM_198450 |
| 371 | E3: chr1: 158480373-158480448 | | the entire APOOL protein from NM_198450 |
| 372 | E3: chr1: 158480373-158480448 | | the entire APOOL protein from NM_198450 |
| 373 | E9: chr11: 1730560-1731476 | | the entire PACSIN3 protein from NM_016223 |
| 374 | E9: chr11: 1730560-1731476 | | the entire PACSIN3 protein from NM_001184975 |
| 375 | E9: chr11: 1730560-1731476 | | the entire PACSIN3 protein from NM_001184974 |
| 376 | E1: chr12: 51199792-51200510 | 828 | 1281 |
| 377 | E1: chr17: 45633770-45633999 | | the entire HEATR5A protein from NM_015473 |
| 378 | E2: chr3: 101831131-101831245 | 829 | 1282 |
| 379 | E2: chr3: 101831131-101831245 | 830 | 1283 |
| 380 | E2: chr3: 101831131-101831245 | 831 | 1284 |
| 381 | E2: chr3: 101831131-101831245 | 832 | 1285 |
| 382 | E2: chr10: 126385194-126385446 | | the entire METTL10 protein from NM_212554 |
| 383 | E2: chr10: 126385194-126385446 | | the entire METTL10 protein from NM_212554 |
| 384 | E2: chr10: 126385194-126385446 | | the entire METTL10 protein from NM_212554 |
| 385 | E1: chr12: 51199792-51200510 | | the entire NUFIP2 protein from NM_020772 |
| 386 | E1: chr12: 51199792-51200510 | | the entire NUFIP2 protein from NM_020772 |
| 387 | E1: chr2: 63922517-63922842 | | the entire CIRBP protein from NM_001280 |
| 388 | E2: chr22: 38258345-38258474 | 833 | 1286 |
| 389 | E1: chrX: 72928764-72965791 | | the entire COL1A2 protein from NM_000089 |
| 390 | E1: chr11: 63770463-63770989 | 834 | 1287 |
| 391 | E1: chr11: 63770463-63770989 | 835 | 1288 |
| 392 | E2: chr17: 55777623-55777751 | 836 | 1289 |
| 393 | E2: chr17: 55777623-55777751 | 837 | 1290 |
| 394 | E1: chr12: 51199792-51200510 | 838 | 1291 |
| 395 | E1: chr12: 51199792-51200510 | 839 | 1292 |
| 396 | E2: chr16: 4504576-4504666 | 840 | 1293 |
| 397 | E4: chr2: 217245072-217249850 | | the entire RAB3IP protein from NM_175625 |
| 398 | E4: chr2: 217245072-217249850 | | the entire RAB3IP protein from NM_175624 |
| 399 | E4: chr2: 217245072-217249850 | | the entire RAB3IP protein from NM_022456 |
| 400 | E4: chr2: 217245072-217249850 | | the entire RAB3IP protein from NM_175623 |
| 401 | E4: chr2: 217245072-217249850 | | the entire RAB3IP protein from NM_001024647 |
| 402 | E4: chr2: 217245072-217249850 | | the entire RAB3IP protein from NM_175625 |
| 403 | E4: chr2: 217245072-217249850 | | the entire RAB3IP protein from NM_175624 |
| 404 | E4: chr2: 217245072-217249850 | | the entire RAB3IP protein from NM_022456 |
| 405 | E4: chr2: 217245072-217249850 | | the entire RAB3IP protein from NM_175623 |
| 406 | E4: chr2: 217245072-217249850 | | the entire RAB3IP protein from NM_001024647 |
| 407 | E24: chr6: 56587339-56590175 | 841 | NOT Calculated |
| 408 | E5: chr8: 43046480-43046607 | 842 | 1294 |
| 409 | E4: chr8: 43046480-43046607 | 843 | 1295 |
| 410 | E5: chr16: 10529780-10534450 | | the entire KRT81 protein from NM_002281 |
| 411 | E2: chr8: 81077788-81077970 | 844 | 1296 |
| 412 | E2: chr8: 81077788-81077970 | 845 | 1297 |
| 413 | E2: chr8: 81077788-81077970 | 846 | 1298 |
| 414 | E11: chr7: 555359-556765 | 847 | 1299 |
| 415 | E11: chr7: 555359-556765 | 848 | 1300 |
| 416 | E11: chr7: 555359-556765 | 849 | 1301 |
| 417 | E11: chr7: 555359-556765 | 850 | 1302 |
| 418 | E11: chr7: 555359-556765 | 851 | 1303 |
| 419 | E11: chr7: 555359-556765 | 852 | 1304 |
| 420 | E9: chr11: 65021808-65030513 | | the entire ASAP1 protein from NM_018482 |
| 421 | E66: chr6: 44326005-44326314 | 853 | 1305 |
| 422 | E13: chr4: 15777353-15777514 | 854 | 1306 |
| 423 | E13: chr4: 15777353-15777514 | 855 | 1307 |
| 424 | E13: chr4: 15777353-15777514 | 856 | 1308 |
| 425 | E13: chr4: 15777353-15777514 | 857 | 1309 |
| 426 | E13: chr4: 15777353-15777514 | 858 | 1310 |
| 427 | E13: chr4: 15777353-15777514 | 859 | 1311 |
| 428 | E13: chr4: 15777353-15777514 | 860 | 1312 |
| 429 | E1: chr6: 114285219-114285716 | 861 | 1313 |
| 430 | E2: chr12: 51491813-51492028 | 862 | 1314 |
| 431 | E2: chr12: 51491813-51492028 | 863 | 1315 |
| 432 | E3: chr11: 64946844-64950577 | | the entire CD68 protein from NM_001251 |
| 433 | E3: chr11: 64946844-64950577 | | the entire CD68 protein from NM_001040059 |
| 434 | E4: chr15: 63001172-63001271 | 864 | 1316 |
| 435 | E4: chr15: 63001172-63001271 | 865 | 1317 |
| 436 | E4: chr15: 63001172-63001271 | 866 | 1318 |
| 437 | E4: chr15: 63001172-63001271 | 867 | 1319 |
| 438 | E3: chr20: 10341177-10342579 | 868 | 1320 |
| 439 | E3: chr20: 10341177-10342579 | 869 | 1321 |
| 440 | E1: chr8: 116749945-116750402 | 870 | 1322 |
| 441 | E1: chr8: 116749945-116750402 | | the entire SPARC protein from NM_003118 |
| 442 | E1: chr19: 4408611-4408791 | | the entire FLNA protein from NM_001110556 |
| 443 | E1: chr19: 4408611-4408791 | | the entire FLNA protein from NM_001456 |
| 444 | E18: chr19: 988623-990064 | | the entire WDR82 protein from NM_025222 |
| 445 | E21: chr19: 988623-990064 | | the entire WDR82 protein from NM_025222 |
| 446 | E18: chr19: 988623-990064 | | the entire WDR82 protein from NM_025222 |
| 447 | E21: chr19: 988623-990064 | | the entire WDR82 protein from NM_025222 |
| 448 | E3: chr3: 48939898-48940250 | | the entire TMEM119 protein from NM_181724 |
| 449 | E3: chr3: 131178231-131179466 | | the entire GNB1 protein from NM_002074 |
| 450 | E6: chr18: 31950634-31950740 | | the entire ELF3 protein from NM_001114309 |
| 451 | E5: chr18: 31950634-31950740 | | the entire ELF3 protein from NM_001114309 |
| 452 | E6: chr18: 31950634-31950740 | | the entire ELF3 protein from NM_004433 |
| 453 | E5: chr18: 31950634-31950740 | | the entire ELF3 protein from NM_004433 |
| 454 | E1: chr17: 37033855-37034408 | 871 | 1323 |
| 455 | E1: chr19: 10625936-10626163 | 872 | 1324 |
| 456 | E21: chr19: 10625936-10626163 | 873 | 1325 |
| 457 | E21: chr19: 10625936-10626163 | 874 | 1326 |
| 458 | E1: chr19: 10625936-10626163 | 875 | 1327 |
| 459 | E1: chr19: 10625936-10626163 | 876 | 1328 |
| 460 | E609: chr2: 189581894-189582192 | | the entire BAT2L2 protein from NM_015172 |
| 461 | E5: chr11: 64545768-64546232 | 877 | 1329 |
| 462 | E8: chr15: 42797096-42797649 | | |
| 463 | E8: chr15: 42797096-42797649 | | the entire IGLL5 protein from NM_001178126 |
| 464 | E3: chr17: 77093523-77093763 | 878 | 1330 |
| 465 | E1: chr19: 56164557-56164741 | 879 | 1331 |
| 466 | E1: chr11: 10786827-10787158 | | the entire RAB8A protein from NM_005370 |
| 467 | E1: chr11: 10786827-10787158 | | the entire RAB8A protein from NM_005370 |
| 468 | E5: chr19: 54160377-54160678 | 880 | 1332 |
| 469 | E5: chr19: 54160377-54160678 | 881 | 1333 |
| 470 | E9: chrX: 119454376-119457176 | | the entire COL1A2 protein from NM_000089 |
| 471 | E3: chr19: 44616144-44616241 | 882 | 1334 |
| 472 | E3: chr19: 44616144-44616241 | 883 | 1335 |
| 473 | E3: chr19: 44616144-44616241 | 884 | 1336 |
| 474 | E3: chr19: 44616144-44616241 | 885 | 1337 |
| 475 | E3: chr19: 44616144-44616241 | 886 | 1338 |
| 476 | E3: chr19: 44616144-44616241 | 887 | 1339 |
| 477 | E3: chr19: 44616144-44616241 | 888 | 1340 |
| 478 | E3: chr19: 44616144-44616241 | 889 | 1341 |
| 479 | E2: chr18: 46827287-46827663 | 890 | 1342 |
| 480 | E6: chr7: 5533304-5534048 | | the entire RPS5 protein from NM_001009 |
| 481 | E55: chr17: 32516039-32518487 | 891 | 1343 |
| 482 | E54: chr17: 32516039-32518487 | 892 | 1344 |
| 483 | E56: chr17: 32516039-32518487 | 893 | 1345 |
| 484 | E60: chr17: 32516039-32518487 | 894 | 1346 |
| 485 | E56: chr17: 32516039-32518487 | 895 | 1347 |
| 486 | E6: chr18: 9944049-9950018 | 896 | 1348 |
| 487 | E7: chr18: 9944049-9950018 | 897 | 1349 |
| 488 | E4: chr7: 5534437-5534876 | 898 | 1350 |
| 489 | E2: chr12: 119146336-119146563 | 899 | 1351 |
| 490 | E2: chr12: 119146336-119146563 | 900 | 1352 |
| 491 | E2: chr12: 119146336-119146563 | 901 | 1353 |
| 492 | E2: chr12: 119146336-119146563 | 902 | 1354 |
| 493 | E2: chr12: 119146336-119146563 | 903 | 1355 |
| 494 | E2: chr12: 119146336-119146563 | 904 | 1356 |
| 495 | E2: chr17: 35333808-35334004 | 905 | 1357 |
| 496 | E2: chr17: 35333808-35334004 | 906 | 1358 |
| 497 | E6: chr7: 5533304-5534048 | | the entire OGT protein from NM_181673 |
| 498 | E6: chr7: 5533304-5534048 | | the entire OGT protein from NM_181672 |
| 499 | E6: chr7: 5533304-5534048 | | the entire OGT protein from NM_181673 |
| 500 | E6: chr7: 5533304-5534048 | | the entire OGT protein from NM_181672 |
| 501 | E4: chr19: 21779591-21784449 | | the entire COL3A1 protein from NM_000090 |
| 502 | E3: chr14: 20339354-20340092 | 907 | 1359 |
| 503 | E3: chr14: 20339354-20340092 | 908 | 1360 |
| 504 | E2: chr14: 20339354-20340092 | 909 | 1361 |
| 505 | E2: chr14: 20339354-20340092 | 910 | 1362 |
| 506 | E4: chr17: 77092808-77093247 | 911 | 1363 |
| 507 | E1: chr2: 191453791-191454441 | 912 | 1364 |
| 508 | E1: chr2: 191453791-191454441 | 913 | 1365 |
| 509 | E9: chr11: 65021808-65030513 | | the entire TAX1BP1 protein from NM_001079864 |
| 510 | E9: chr11: 65021808-65030513 | | the entire TAX1BP1 protein from NM_006024 |
| 511 | E35: chr10: 24537725-24538198 | | the entire SERPINA1 protein from NM_001002235 |
| 512 | E43: chr10: 24537725-24538198 | | the entire SERPINA1 protein from NM_001002235 |
| 513 | E35: chr10: 24537725-24538198 | | the entire SERPINA1 protein from NM_001127705 |
| 514 | E43: chr10: 24537725-24538198 | | the entire SERPINA1 protein from NM_001127705 |
| 515 | E35: chr10: 24537725-24538198 | | the entire SERPINA1 protein from NM_001002236 |
| 516 | E43: chr10: 24537725-24538198 | | the entire SERPINA1 protein from NM_001002236 |
| 517 | E35: chr10: 24537725-24538198 | | the entire SERPINA1 protein from NM_001127707 |
| 518 | E43: chr10: 24537725-24538198 | | the entire SERPINA1 protein from NM_001127707 |
| 519 | E35: chr10: 24537725-24538198 | | the entire SERPINA1 protein from NM_001127706 |
| 520 | E43: chr10: 24537725-24538198 | | the entire SERPINA1 protein from NM_001127706 |
| 521 | E35: chr10: 24537725-24538198 | | the entire SERPINA1 protein from NM_001127702 |
| 522 | E43: chr10: 24537725-24538198 | | the entire SERPINA1 protein from NM_001127702 |
| 523 | E35: chr10: 24537725-24538198 | | the entire SERPINA1 protein from NM_001127701 |
| 524 | E43: chr10: 24537725-24538198 | | the entire SERPINA1 protein from NM_001127701 |
| 525 | E35: chr10: 24537725-24538198 | | the entire SERPINA1 protein from NM_001127700 |
| 526 | E43: chr10: 24537725-24538198 | | the entire SERPINA1 protein from NM_001127700 |
| 527 | E35: chr10: 24537725-24538198 | | the entire SERPINA1 protein from NM_001127703 |
| 528 | E43: chr10: 24537725-24538198 | | the entire SERPINA1 protein from NM_001127703 |
| 529 | E35: chr10: 24537725-24538198 | | the entire SERPINA1 protein from NM_001127704 |
| 530 | E43: chr10: 24537725-24538198 | | the entire SERPINA1 protein from NM_001127704 |
| 531 | E35: chr10: 24537725-24538198 | | the entire SERPINA1 protein from NM_000295 |
| 532 | E43: chr10: 24537725-24538198 | | the entire SERPINA1 protein from NM_000295 |
| 533 | E2: chr6: 52375918-52380534 | 914 | 1366 |
| 534 | E2: chr6: 52375918-52380534 | 915 | 1367 |
| 535 | E47: chr12: 131112963-131113199 | 916 | 1368 |
| 536 | E47: chr12: 131112963-131113199 | 917 | 1369 |
| 537 | E2: chr8: 67571225-67571281 | 918 | 1370 |
| 538 | E2: chr8: 67571225-67571281 | | the entire GPATCH8 protein from NR_036474 |
| 539 | E51: chr17: 45616455-45618008 | | the entire PTRF protein from NM_012232 |
| 540 | E1: chrX: 46938144-46938367 | | the entire CDK4 protein from NM_000075 |
| 541 | E9: chrX: 152935081-152935289 | | the entire GAPDH protein from NM_002046 |
| 542 | E9: chrX: 152935081-152935289 | | the entire GAPDH protein from NM_002046 |
| 543 | E9: chrX: 152935081-152935289 | | the entire GAPDH protein from NM_002046 |
| 544 | E11: chr10: 73249476-73249663 | | the entire CD68 protein from NM_001251 |
| 545 | E10: chr10: 73249476-73249663 | | the entire CD68 protein from NM_001251 |
| 546 | E10: chr10: 73249476-73249663 | | the entire CD68 protein from NM_001251 |
| 547 | E11: chr10: 73249476-73249663 | | the entire CD68 protein from NM_001040059 |
| 548 | E10: chr10: 73249476-73249663 | | the entire CD68 protein from NM_001040059 |
| 549 | E10: chr10: 73249476-73249663 | | the entire CD68 protein from NM_001040059 |
| 550 | E11: chr10: 73249476-73249663 | | the entire CD68 protein from NM_001251 |
| 551 | E10: chr10: 73249476-73249663 | | the entire CD68 protein from NM_001251 |
| 552 | E10: chr10: 73249476-73249663 | | the entire CD68 protein from NM_001251 |
| 553 | E11: chr10: 73249476-73249663 | | the entire CD68 protein from NM_001040059 |
| 554 | E10: chr10: 73249476-73249663 | | the entire CD68 protein from NM_001040059 |
| 555 | E10: chr10: 73249476-73249663 | | the entire CD68 protein from NM_001040059 |
| 556 | E6: chr7: 5533304-5534048 | | the entire APOL1 protein from NM_003661 |
| 557 | E6: chr7: 5533304-5534048 | | the entire APOL1 protein from NM_145343 |
| 558 | E6: chr7: 5533304-5534048 | | the entire APOL1 protein from NM_001136541 |
| 559 | E6: chr7: 5533304-5534048 | | the entire APOL1 protein from NM_001136540 |
| 560 | E2: chr21: 39756170-39756356 | 919 | 1371 |
| 561 | E2: chr21: 39756170-39756356 | 920 | 1372 |
| 562 | E2: chr21: 39756170-39756356 | 921 | 1373 |
| 563 | E2: chr21: 39756170-39756356 | 922 | 1374 |
| 564 | E2: chr21: 39756170-39756356 | 923 | 1375 |
| 565 | E2: chr21: 39756170-39756356 | 924 | 1376 |
| 566 | E2: chr21: 39756170-39756356 | 925 | 1377 |
| 567 | E2: chr21: 39756170-39756356 | 926 | 1378 |
| 568 | E2: chr21: 39756170-39756356 | 927 | 1379 |
| 569 | E2: chr21: 39756170-39756356 | 928 | 1380 |
| 570 | E2: chr21: 39756170-39756356 | 929 | 1381 |
| 571 | E2: chr21: 39756170-39756356 | 930 | 1382 |
| 572 | E1: chr2: 27163114-27163723 | | the entire ITGA3 protein from NM_002204 |
| 573 | E1: chr2: 27163114-27163723 | | the entire ITGA3 protein from NM_002204 |
| 574 | E1: chr2: 27163114-27163723 | 931 | 1383 |
| 575 | E1: chr2: 27163114-27163723 | 932 | 1384 |
| 576 | E2: chr14: 95798741-95798860 | 933 | 1385 |
| 577 | E2: chr14: 95798741-95798860 | 934 | 1386 |
| 578 | E6: chr17: 16980257-16980489 | 935 | 1387 |
| 579 | E6: chr17: 16980257-16980489 | 936 | 1388 |
| 580 | E6: chr17: 16980257-16980489 | 937 | 1389 |
| 581 | E6: chr17: 16980257-16980489 | 938 | 1390 |
| 582 | E2: chr12: 107507750-107510302 | | the entire PIKFYVE protein from NM_015040 |
| 583 | E1: chr11: 1741597-1741798 | | the entire TMEM109 protein from NM_024092 |
| 584 | E4: chr2: 217245072-217249850 | | the entire SREBF1 protein from NM_004176 |
| 585 | E4: chr2: 217245072-217249850 | | the entire SREBF1 protein from NM_001005291 |
| 586 | E4: chr2: 217245072-217249850 | | the entire SREBF1 protein from NM_004176 |
| 587 | E4: chr2: 217245072-217249850 | | the entire SREBF1 protein from NM_001005291 |
| 588 | E18: chrX: 17075456-17081324 | | the entire MGP protein from NM_000900 |
| 589 | E18: chrX: 17075456-17081324 | | the entire MGP protein from NM_000900 |
| 590 | E18: chrX: 17075456-17081324 | | the entire MGP protein from NM_001190839 |
| 591 | E18: chrX: 17075456-17081324 | | the entire MGP protein from NM_001190839 |
| 592 | E6: chr7: 5533304-5534048 | | the entire AKT2 protein from NM_001626 |
| 593 | E6: chr7: 5533304-5534048 | | the entire AKT2 protein from NM_001626 |
| 594 | E14: chr9: 129307438-129309531 | | the entire SBF1 protein from NM_002972 |
| 595 | E14: chr9: 129307438-129309531 | | the entire SBF1 protein from NM_002972 |
| 596 | E1: chr9: 129370919-129371176 | | the entire SBF1 protein from NM_002972 |
| 597 | E56: chr9: 129370919-129371176 | | the entire SBF1 protein from NM_002972 |
| 598 | E4: chr20: 19977983-19978075 | | the entire RHOBTB3 protein from NM_014899 |
| 599 | E22: chr19: 60294092-60294738 | 939 | 1391 |
| 600 | E15: chr10: 98267856-98272077 | | the entire POSTN protein from NM_001135935 |
| 601 | E15: chr10: 98267856-98272077 | | the entire POSTN protein from NM_006475 |
| 602 | E15: chr10: 98267856-98272077 | | the entire POSTN protein from NM_001135934 |
| 603 | E15: chr10: 98267856-98272077 | | the entire POSTN protein from NM_001135936 |
| 604 | E3: chr11: 386813-387445 | 940 | 1392 |
| 605 | E3: chr11: 386813-387445 | 941 | 1393 |
| 606 | E3: chr11: 386813-387445 | 942 | 1394 |
| 607 | E3: chr11: 386813-387445 | 943 | 1395 |
| 608 | E3: chr11: 386813-387445 | 944 | 1396 |
| 609 | E3: chr11: 386813-387445 | 945 | 1397 |
| 610 | E19: chr2: 241827689-241827908 | | the entire NTN1 protein from NM_004822 |
| 611 | E19: chr2: 241827689-241827908 | | the entire NTN1 protein from NM_004822 |
| 612 | E2: chr3: 15506035-15506148 | 946 | 1398 |
| 613 | E2: chr3: 15506035-15506148 | 947 | 1399 |
| 614 | E2: chr3: 15506035-15506148 | 948 | 1400 |
| 615 | E2: chr3: 15506035-15506148 | 949 | 1401 |
| 616 | E2: chr3: 15506035-15506148 | 950 | 1402 |
| 617 | E2: chr3: 15506035-15506148 | 951 | 1403 |
| 618 | E1: chr13: 44813176-44813297 | | the entire SHANK3 protein from NM_001080420 |
| 619 | E5: chr17: 74360653-74363541 | | the entire COL1A1 protein from NM_000088 |
| 620 | E1: chr17: 77603051-77603624 | | the entire FLNA protein from NM_001110556 |
| 621 | E1: chr17: 77603051-77603624 | | the entire FLNA protein from NM_001456 |
| 622 | E1: chr15: 41825881-41826196 | | the entire YWHAG protein from NM_012479 |
| 623 | E1: chr15: 41825881-41826196 | | the entire YWHAG protein from NM_012479 |
| 624 | E2: chr2: 61614410-61614542 | | the entire MAPK1IP1L protein from NM_144578 |
| 625 | E24: chr17: 64683141-64683249 | 952 | 1404 |
| 626 | E3: chr2: 171514294-171514498 | 953 | 1405 |
| 627 | E3: chr2: 171514294-171514498 | 954 | 1406 |
| 628 | E4: chr7: 5534437-5534876 | 955 | 1407 |
| 629 | E12: chr12: 74730577-74730700 | 956 | 1408 |
| 630 | E12: chr12: 74730577-74730700 | 957 | 1409 |
| 631 | E3: chr1: 84740096-84740241 | 958 | 1410 |
| 632 | E3: chr1: 84740096-84740241 | 959 | 1411 |
| 633 | E3: chr1: 84740096-84740241 | 960 | 1412 |
| 634 | E3: chr1: 84740096-84740241 | 961 | 1413 |
| 635 | E3: chr1: 84740096-84740241 | 962 | 1414 |
| 636 | E3: chr1: 84740096-84740241 | 963 | 1415 |
| 637 | E3: chr1: 84740096-84740241 | 964 | 1416 |
| 638 | E3: chr1: 84740096-84740241 | 965 | 1417 |
| 639 | E3: chr1: 84740096-84740241 | 966 | 1418 |
| 640 | E3: chr1: 84740096-84740241 | 967 | 1419 |
| 641 | E3: chr1: 84740096-84740241 | 968 | 1420 |
| 642 | E9: chr12: 51167224-51168006 | 969 | 1421 |
| 643 | E9: chr12: 51167224-51168006 | 970 | 1422 |
| 644 | E9: chr12: 51167224-51168006 | 971 | 1423 |
| 645 | E5: chr15: 70289067-70289254 | 972 | 1424 |
| 646 | E5: chr15: 70289067-70289254 | 973 | 1425 |
| 647 | E5: chr15: 70289067-70289254 | 974 | 1426 |
| 648 | E11: chr15: 70278423-70279151 | 975 | 1427 |
| 649 | E11: chr15: 70278423-70279151 | 976 | 1428 |
| 650 | E11: chr15: 70278423-70279151 | 977 | 1429 |
| 651 | E13: chr17: 70256357-70257021 | 978 | 1430 |
| 652 | E10: chr3: 180596569-180601801 | | the entire PTMA protein from NM_001099285 |
| 653 | E10: chr3: 180596569-180601801 | | the entire PTMA protein from NM_002823 |
| 654 | E2: chr12: 4830164-4830538 | 979 | 1431 |
| 655 | E2: chr12: 4830164-4830538 | 980 | 1432 |
| 656 | E2: chr12: 4830164-4830538 | 981 | 1433 |
| 657 | E2: chr3: 50226585-50226737 | 982 | Assuming: intact protein for NM_006841 |
| 658 | E2: chr3: 50226585-50226737 | 983 | Assuming: intact protein for NM_006841 |
| 659 | E1: chr17: 36996087-36996673 | 984 | 1434 |
| 660 | E1: chr17: 36996087-36996673 | 985 | 1435 |
| 661 | E1: chr17: 36996087-36996673 | 986 | 1436 |
| 662 | E7: chr10: 8136672-8136860 | | the entire RHOB protein from NM_004040 |
| 663 | E7: chr10: 8136672-8136860 | | the entire RHOB protein from NM_004040 |
| 664 | E6: chr17: 77091593-77092454 | 987 | 1437 |
| 665 | E14: chr1: 243080224-243084428 | | the entire TES protein from NM_015641 |
| 666 | E14: chr1: 243080224-243084428 | | the entire TES protein from NM_015641 |
| 667 | E14: chr1: 243080224-243084428 | | the entire TES protein from NM_152829 |
| 668 | E14: chr1: 243080224-243084428 | | the entire TES protein from NM_152829 |
| 669 | E1: chr1: 15883413-15883700 | 988 | 1438 |
| 670 | E1: chr1: 15883413-15883700 | 989 | 1439 |
| 671 | E1: chr1: 15883413-15883700 | 990 | 1440 |
| 672 | E1: chr1: 15883413-15883700 | 991 | 1441 |
| 673 | E1: chr1: 15883413-15883700 | 992 | 1442 |
| 674 | E1: chr1: 15883413-15883700 | 993 | 1443 |
| 675 | E1: chr1: 15883413-15883700 | 994 | 1444 |
| 676 | E1: chr1: 15883413-15883700 | 995 | 1445 |
| 677 | E1: chr1: 51474532-51475139 | 996 | 1446 |
| 678 | E1: chr12: 51199792-51200510 | 997 | 1447 |
| 679 | E1: chr12: 51199792-51200510 | 998 | 1448 |
| 680 | E4: chr15: 67459275-67459403 | 999 | 1449 |
| 681 | E4: chr15: 67459275-67459403 | 1000 | 1450 |
| 682 | E6: chr7: 5533304-5534048 | | the entire FUS protein from NM_004960 |
| 683 | E6: chr7: 5533304-5534048 | 1001 | NOT Calculated |
| 684 | E6: chr7: 5533304-5534048 | | the entire FUS protein from NM_001170937 |
| 685 | E6: chr7: 5533304-5534048 | | the entire FUS protein from NM_001170634 |
| 686 | E8: chr20: 30494522-30499280 | | the entire ACTB protein from NM_001101 |
| 687 | E8: chr20: 30494522-30499280 | | the entire ACTB protein from NM_001101 |
| 688 | E4: chr20: 55656857-55661060 | | the entire ACTB protein from NM_001101 |
| 689 | E4: chr20: 55656857-55661060 | | the entire ACTB protein from NM_001101 |
| 690 | E4: chr20: 55656857-55661060 | | the entire ACTB protein from NM_001101 |
| 691 | E4: chr20: 55656857-55661060 | | the entire ACTB protein from NM_001101 |
| 692 | E8: chr6: 16434603-16436680 | 1002 | 1451 |
| 693 | E7: chr6: 16434603-16436680 | 1003 | 1452 |
| 694 | E8: chr6: 16434603-16436680 | 1004 | 1453 |
| 695 | E7: chr6: 16434603-16436680 | 1005 | 1454 |
| 696 | E8: chr6: 16434603-16436680 | 1006 | 1455 |
| 697 | E7: chr6: 16434603-16436680 | 1007 | 1456 |
| 698 | E8: chr6: 16434603-16436680 | 1008 | 1457 |
| 699 | E7: chr6: 16434603-16436680 | 1009 | 1458 |
| 700 | E8: chr6: 16434603-16436680 | 1010 | 1459 |
| 701 | E7: chr6: 16434603-16436680 | 1011 | 1460 |
| 702 | E8: chr6: 16434603-16436680 | 1012 | 1461 |
| 703 | E7: chr6: 16434603-16436680 | 1013 | 1462 |
| 704 | E2: chr22: 20394916-20395197 | 1014 | 1463 |
| 705 | E2: chr22: 20394916-20395197 | 1015 | 1464 |
| 706 | E2: chr11: 12116512-12116587 | 1016 | Assuming: intact protein for NM_014632 |
| 707 | E3: chr11: 12140201-12140542 | 1017 | Assuming: intact protein for NM_014632 |
| 708 | E2: chr15: 70298338-70298505 | 1018 | 1465 |
| 709 | E2: chr15: 70298338-70298505 | 1019 | 1466 |
| 710 | E2: chr15: 70298338-70298505 | 1020 | 1467 |
| 711 | E2: chr13: 31550970-31551170 | 1021 | 1468 |
| 712 | E2: chr13: 31550970-31551170 | 1022 | 1469 |
| 713 | E2: chr13: 31550970-31551170 | 1023 | 1470 |
| 714 | E2: chr13: 31550970-31551170 | 1024 | 1471 |
| 715 | E2: chr13: 31550970-31551170 | 1025 | 1472 |
| 716 | E9: chr12: 51167224-51168006 | 1026 | 1473 |
| 717 | E25: chr5: 139883834-139884009 | 1027 | 1474 |
| 718 | E25: chr5: 139883834-139884009 | 1028 | 1475 |
| 719 | E25: chr5: 139883834-139884009 | 1029 | 1476 |
| 720 | E13: chr9: 35050309-35050522 | | the entire KRT5 protein from NM_000424 |
| 721 | E6: chr7: 5533304-5534048 | | the entire TMED2 protein from NM_006815 |
| 722 | E6: chr7: 5533304-5534048 | | the entire TMED2 protein from NM_006815 |
| 723 | E1: chr12: 51199792-51200510 | | the entire TNS4 protein from NM_032865 |
| 724 | E1: chr12: 51199792-51200510 | | the entire TNS4 protein from NM_032865 |
| 725 | E1: chrY: 19611913-19614093 | | the entire TPM4 protein from NM_001145160 |
| 726 | E1: chrY: 19611913-19614093 | | the entire TPM4 protein from NM_003290 |
| 727 | E1: chr4: 57670799-57671296 | | the entire MAF protein from NM_001031804 |
| 728 | E612: chr2: 189584598-189585717 | | the entire POLD3 protein from NM_006591 |
| 729 | E1: chr17: 37033855-37034408 | 1030 | 1477 |
| 730 | E1: chrY: 19611913-19614093 | | the entire GAPDH protein from NM_002046 |
| 731 | E30: chr3: 185120417-185121883 | 1031 | 1478 |
| 732 | E30: chr3: 185120417-185121883 | 1032 | 1479 |
| 733 | E30: chr3: 185120417-185121883 | 1033 | 1480 |
| 734 | E30: chr3: 185120417-185121883 | 1034 | 1481 |
| 735 | E30: chr3: 185120417-185121883 | 1035 | 1482 |
| 736 | E30: chr3: 185120417-185121883 | 1036 | 1483 |
| 737 | E30: chr3: 185120417-185121883 | 1037 | 1484 |
| 738 | E1: chr12: 51172699-51173448 | 1038 | 1485 |
| 739 | E2: chr16: 22283723-22283836 | | the entire RRN3P3 protein from NR_027460 |
| 740 | E2: chr16: 22283723-22283836 | | the entire RRN3P3 protein from NR_027460 |
| 741 | E4: chr17: 77092808-77093247 | 1039 | 1486 |
| 742 | E4: chr17: 77092808-77093247 | 1040 | 1487 |
| 743 | E4: chr17: 77092808-77093247 | 1041 | 1488 |
| 744 | E4: chr17: 77092808-77093247 | 1042 | 1489 |
| 745 | E1: chr15: 71763674-71763854 | 1043 | 1490 |
| 746 | E1: chr15: 71763674-71763854 | 1044 | 1491 |
| 747 | E1: chr15: 71763674-71763854 | 1045 | 1492 |
| 748 | E1: chr15: 71763674-71763854 | 1046 | 1493 |
| 749 | E1: chrY: 19611913-19614093 | | the entire SLC26A2 protein from NM_000112 |
| 750 | E2: chr10: 135119730-135120048 | 1047 | 1494 |
| 751 | E2: chr10: 135119730-135120048 | 1048 | 1495 |
| 752 | E2: chr10: 135119730-135120048 | 1049 | 1496 |
| 753 | E2: chrX: 119271296-119276279 | | the entire YWHAZ protein from NM_001135700 |
| 754 | E3: chrX: 119271296-119276279 | | the entire YWHAZ protein from NM_001135700 |
| 755 | E2: chrX: 119271296-119276279 | | the entire YWHAZ protein from NM_003406 |
| 756 | E3: chrX: 119271296-119276279 | | the entire YWHAZ protein from NM_003406 |
| 757 | E2: chrX: 119271296-119276279 | | the entire YWHAZ protein from NM_145690 |
| 758 | E3: chrX: 119271296-119276279 | | the entire YWHAZ protein from NM_145690 |
| 759 | E2: chrX: 119271296-119276279 | | the entire YWHAZ protein from NM_001135699 |
| 760 | E3: chrX: 119271296-119276279 | | the entire YWHAZ protein from NM_001135699 |
| 761 | E2: chrX: 119271296-119276279 | | the entire YWHAZ protein from NM_001135702 |
| 762 | E3: chrX: 119271296-119276279 | | the entire YWHAZ protein from NM_001135702 |
| 763 | E2: chrX: 119271296-119276279 | | the entire YWHAZ protein from NM_001135701 |
| 764 | E3: chrX: 119271296-119276279 | | the entire YWHAZ protein from NM_001135701 |
| 765 | E6: chr15: 70288015-70288286 | 1050 | 1497 |
| 766 | E6: chr15: 70288015-70288286 | 1051 | 1498 |
| 767 | E6: chr15: 70288015-70288286 | 1052 | 1499 |
| 768 | E5: chr1: 158154526-158155355 | 1053 | 1500 |
| 769 | E5: chr1: 158154526-158155355 | 1054 | 1501 |
| 770 | E5: chr1: 158154526-158155355 | 1055 | 1502 |
| 771 | E5: chr1: 158154526-158155355 | 1056 | 1503 |
| 772 | E28: chr7: 73115575-73115635 | 1057 | 1504 |
| 773 | E27: chr7: 73115575-73115635 | 1058 | 1505 |
| 774 | E27: chr7: 73115575-73115635 | 1059 | 1506 |
| 775 | E26: chr7: 73115575-73115635 | 1060 | 1507 |
| 776 | E28: chr7: 73115575-73115635 | 1061 | 1508 |
| 777 | E28: chr7: 73115575-73115635 | 1062 | 1509 |
| 778 | E27: chr7: 73115575-73115635 | 1063 | 1510 |
| 779 | E27: chr7: 73115575-73115635 | 1064 | 1511 |
| 780 | E26: chr7: 73115575-73115635 | 1065 | 1512 |
| 781 | E28: chr7: 73115575-73115635 | 1066 | 1513 |
| 782 | E2: chr1: 226351401-226351586 | 1067 | 1514 |
| 783 | E2: chr1: 226351401-226351586 | 1068 | 1515 |
| 784 | E2: chr1: 226351401-226351586 | 1069 | 1516 |
| 785 | E2: chr1: 226351401-226351586 | 1070 | 1517 |
| 786 | E2: chr7: 75794043-75797486 | | the entire COL1A1 protein from NM_000088 |
| 787 | E12: chr2: 224448308-224451691 | | the entire NAV2 protein from NM_001111018 |
| 788 | E12: chr2: 224448308-224451691 | | the entire NAV2 protein from NM_145117 |
| 789 | E12: chr2: 224448308-224451691 | | the entire NAV2 protein from NM_182964 |
| 790 | E12: chr2: 224448308-224451691 | | the entire NAV2 protein from NM_001111019 |
| 791 | E4: chr7: 5534437-5534876 | | the entire H1F0 protein from NM_005318 |
| 792 | E8: chr1: 148969175-148972245 | 1071 | 1518 |
| 793 | E4: chr2: 232033623-232033821 | 1072 | 1519 |
| 794 | E4: chr2: 232033623-232033821 | 1073 | 1520 |
| 795 | E3: chr2: 232034494-232034972 | 1074 | 1521 |
| 796 | E3: chr2: 232034494-232034972 | 1075 | 1522 |
| 797 | E2: chr9: 102300867-102300977 | 1076 | 1523 |
| 798 | E2: chr9: 102300867-102300977 | 1077 | 1524 |
| 799 | E2: chr9: 102300867-102300977 | 1078 | 1525 |
| 800 | E2: chr9: 102300867-102300977 | 1079 | 1526 |
| 801 | E2: chr9: 102300867-102300977 | 1080 | 1527 |
| 802 | E2: chr9: 102300867-102300977 | 1081 | 1528 |
| 803 | E50: chr17: 45618137-45618380 | 1082 | 1529 |

[0071] The most common class of fusion transcripts in cell lines occurred within 3′-untranslated regions (3′UTRs). A similar distribution prevailed in primary breast tumors (FIG. 6). Such fusions resulted in the generation of full length coding sequences of the 5′ fusion partner, but altered the 3′ UTR sequence of such transcripts, with potential effects on stability and/or translational efficiency of the fusion transcript (Mayr et al., Science, 315:1576-9 (2007)).

[0072] The second broad class of chimaeric transcripts involved fusion within the coding regions. Some of these transcripts contained precise exon/exon junctions (column H of Table 8) and were assumed to be processed. However, the data did not discriminate between tumor-specific trans-splicing events and processing of a primary transcript that arises due to genomic rearrangement. The fusion junctions of many chimaeric transcripts did not correspond to known exon/exon boundaries. These may have arose due to trans-splicing at cryptic sites or, more likely, may represent novel exonic sequences derived from transcription of rearranged genes.

[0073] Coding sequence fusions fall into two classes. 25 fusion transcripts were identified that were predicted to give rise to chimaeric proteins, many of which contained functional domains from both fusion partners and might therefore be expected to have novel properties (CIF in FIG. 6). The deduced sequence and functional domains of all predicted fusion products was set forth in FIG. 9. By way of example, the TFG->GPR128 fusion transcript was predicted to encode a 848 amino acid protein in which the PB 1 protein-protein interaction domain of TFG (also known as the TRKT3 oncogene) is fused to the seven trans-membrane spanning domain of GPR128, with loss of the serine/threonine-rich N-terminal domain that is characteristic of this subclass of G-protein-coupled receptors. The potential regulatory effects of such a chimeric protein might be considerable, and the fact that these hypothetical signaling changes might devolve from a G-protein-coupled receptor makes this a potentially druggable target.

[0074] About half of the coding-to-coding fusions were predicted to result in frame shifts and carboxy-terminal truncation of the 5′ fusion partner (CTT in FIG. 6). To the extent to which such transcripts escape non-sense mediated degradation mechanisms, they would be predicted to encode N-terminal polypeptides that are deleted of C-terminal functional domains. For example, the ADCY9->C16orf5 fusion transcript was predicted to encode a polypeptide of 585 amino acids that includes the N-terminal nucleotide binding domain of adenylylate cyclase 9, but is deleted of the C-terminal nucleotide cyclase domain and therefore unlikely to have catalytic activity. However, the N-terminal fragment contained the intact dimerization domain of ADCY9 and might therefore function as a dominant negative inhibitor.

[0075] Taken together, the results provided herein demonstrate that a set of biomarkers (e.g., fusion genes) can be used to identify breast cancer.

[0076] Potential functions for particular fusion transcripts are listed in Table 11.

TABLE 11

| Fusion Transcript | Activity |
|---|---|
| AATK->USP32 | protein synthesis |
| TP53I13->ABCA10 | Drug resistance |
| FLNA->ABCA2 | Drug resistance |
| EIF4G1->ABCC5 | Drug resistance |
| CALR->ACACA | Drug resistance |
| APOL1->ACTB | cell motility/invasion |
| H1F0->ACTB | cell motility/invasion |
| NDUFS6->ACTB | cell motility/invasion |
| OGT->ACTB | cell motility/invasion |
| SLC34A2->ACTB | cell motility/invasion |
| ACTG1->PPP1R12C | cell signaling |
| FTL->ADD3 | cell motility/invasion |
| AEBP1->THRA | cell signaling |
| AEBP1-THRA | cell signaling |
| ITGAV->ANKHD1 | cell survival |
| ANP32E->MYST4 | gene regulation |
| APOOL->DCAF8 | protein synthesis |
| TMEM119->ARIH2 | protein synthesis |
| CAPN1->ARL2 | cell signaling |
| MTF2->ARL3 | cell signaling |
| ASAP1->MALAT1 | metastasis |
| BAT2L2->COL3A1 | cell motility/invasion |
| GPAA1->CD24 | immune surveillance |
| CD74->MBD6 | gene regulation |
| CDK4->UBA1 | protein synthesis |
| CIRBP->UGP2 | Drug resistance |
| DNAJA2->COL14A1 | cell motility/invasion |
| COL3A1->COL16A1 | cell motility/invasion |
| EPN1->COL1A1 | cell motility/invasion |
| COL1A1->FGD2 | cell signaling |
| COL1A1->FMNL3 | cell growth |
| COL1A1->GORASP2 | protein synthesis |
| HEATR5A->COL1A1 | cell motility/invasion |
| COL1A2->LAMP2 | metastasis |
| DCLK1->COL3A1 | cell motility/invasion |
| POLD3->COL3A1 | cell motility/invasion |
| SPATS2L->COL3A1 | cell motility/invasion |
| COL3A1->ZNF43 | gene regulation |
| RHOBTB3->CRNKL1 | gene regulation |
| EPHA2->CTSD | malignant transformation |
| GNB2->CTSD | malignant transformation |
| LTBP4->CTSD | malignant transformation |
| PACSIN3->CTSD | malignant transformation |
| PLXNA1->CTSD | malignant transformation |
| CTSD->PRKAR1B | gene regulation |
| TMEM109->CTSD | malignant transformation |
| GOLPH3L->CTSS | malignant transformation |
| CWC25->ROBO2 | cell motility/invasion |
| VPS35->DCN | cell growth |
| DIDO1->REPS1 | cell signaling |
| DNM2->PIN1 | malignant transformation |
| RAB8A->EIF4G2 | protein synthesis |
| ELAC1->SMAD4 | malignant transformation |
| NCOR2->ELN | cell motility/invasion |
| GLI3->FAM3B | cell viability |
| SBF1->FLNA | cell motility/invasion |
| GAPDH->KRT13 | cell motility/invasion |
| GAPDH->MRPS18B | protein synthesis |
| RHOB->GATA3 | gene regulation |
| GNB1->TRH | cell growth |
| PTMA->GNB4 | cell signaling |
| TFG->GPR128 | malignant transformation |
| TSPAN14->HLA-E | immune surveillance |
| HMGN3->PAQR8 | cell signaling |
| TES->HNRNPU | gene regulation |
| HSP90AB1->PCGF2 | malignant transformation |
| MALAT1->IGF2 | metastasis |
| IGF2-MALAT1 | metastasis |
| RAB3IP->IGFBP5 | cell growth |
| MAF->IGFBP7 | cell growth |
| USF2->IRX3 | cell differentiation |
| JOSD1->RPS19BP1 | protein synthesis |
| LOC728606->KCTD1 | metastasis |
| KRT18->PLEC | cell motility/invasion |
| RPL8->KRT4 | cell motility/invasion |
| RALGPS2->LAMB3 | malignant transformation |
| LGMN->NAP1L1 | gene regulation |
| SLC39A6->LRIG1 | cell growth |
| PTP4A2->MALAT1 | metastasis |
| TAX1BP1->MALAT1 | metastasis |
| MAPK1IP1L->XPO1 | Drug resistance |
| MGP->REPS2 | cell signaling |
| PCNX->MKKS | protein synthesis |
| SLC16A3->MRPL4 | protein synthesis |
| MRPL52->USP22 | protein synthesis |
| RPL23->MUCL1 | metastasis |
| NAV2->WDFY1 | cell signaling |
| NPLOC4->PDE6G | cell signaling |
| OLA1->ORMDL3 | cell signaling |
| THSD4->PAQR5 | cell signaling |
| YWHAG->PDIA3 | protein synthesis |
| SEMA4C->PKM2 | energy metabolism |
| PLEC->PLEKHM2 | metastasis |
| RPS15->PLEC | cell motility/invasion |
| POSTN->TRIM33 | cell growth |
| PROM1->TAPT1 | cell differentiation |
| TEP1->RNASE1 | gene regulation |
| STC2->RNF11 | malignant transformation |
| RPL19->RPS16 | protein synthesis |
| TMSB10->RPS16 | protein synthesis |
| SFI1->YPEL1 | cell differentiation |
| TTC7A->SOCS5 | immune surveillance |
| SPARC->TRPS1 | cell differentiation |
| UBR2->SRPK1 | gene regulation |
| YWHAZ->ZBTB33 | malignant transformation |

### Example 3

### Characterization of the ARID1A-MAST2 Fusion Transcript

[0077] The ARID1A->MAST2 fusion encoded a 2118 amino acid chimeric polypeptide product that contained the complete kinase domain of the microtubule-associated serine/threonine protein kinase MAST2, but is deleted of amino terminal MAST2 sequences that may affect the activity of the kinase. The predicted amino acid sequence of the chimeric polypeptide is set forth in FIG. 10.

[0078] Specific RT-PCR primers that can discriminate between endogenous MAST2 and the ARID1A->MAST2 fusion transcript were designed (FIG. 11; lanes labeled “NT”). Lentiviral shRNA knockdown constructs were designed to attenuate expression of the fusion transcript. These constructs were labeled 73, 74, and 75 in FIG. 11. Knockdown controls were non-template shRNA vectors, labeled NT in FIG. 11.

[0079] Culture growth of MDA-MB-468 cells, which express the ARID1A->MAST2 fusion product, was inhibited by transduction with shRNA knockdown constructs that attenuate expression of the fusion transcript (FIG. 12).

[0080] Taken together, the results provided herein demonstrate that fusion transcripts are recurrent in breast cancer and can serve as biomarkers or therapeutic targets. The results provided herein also demonstrate that fusion transcripts such as the ARID1A->MAST2 fusion product are “driver mutations” (i.e., mutations necessary for survival and/or growth of breast cancer cells). In addition, the results provided herein demonstrate that fusion partners such as MAST2 can be therapeutic targets in breast cancer.

### Other Embodiments

[0081] It is to be understood that while the invention has been described in conjunction with the detailed description thereof, the foregoing description is intended to illustrate and not limit the scope of the invention, which is defined by the scope of the appended claims. Other aspects, advantages, and modifications are within the scope of the following claims.

The application's sequence listing, which the Patent Office published only in electronic form, follows.

SEQUENCE LISTING (1556 sequences)

SEQ ID NO: 1 - DNA, 404 bp, Homo sapiens
  misc_feature (308)..(308): second gene starts at position 308
ctacgatgagctggtggcacagctcacaagggctagctcgcttgaagacatgttcctggaagctgtgcagcctcactggtttgagcgctgccagggggcgtgggactgggcatggggagggggatggggtagccaggcccctgtccgaggctgtgggtggtggggagggagggggcagtggggttgggggcgtcagcagcacctcggtggggcacttgagctcagagcccgagcgaaggaagaagttctccaagctcttacttcggaggatggtcttgagggagagggagcgcttgaatcgctggagcttggcttcagaatccaggtttgctggatcagctgggatacttagttctactgttcgggtttctacagcaacaactcccacaggtattcctcctagc

SEQ ID NO: 2 - DNA, 171 bp, Homo sapiens
  misc_feature (74)..(74): second gene starts at position 74
atgcgcctgactcacatctgctgctgctgcctcctttaccagctggggttcctgtcgaatgggatcgtttcagatggaaaggagaaaatgtcgcaaccactgaggttgctgatgttattggaatgttggatttcatacaggaagcaaacgtctatggtgtggctatatcag

SEQ ID NO: 3 - DNA, 513 bp, Homo sapiens
  misc_feature (274)..(274): second gene starts at position 274
ggcggcgccgtggggccgaggtgtcgcttcctgacggggcggcgcggacggacgcggccggtgccggccgggacgccgggcccgcagcctagctcgccatctcgctcacgccgcccgcccgcggggccgtcagcccccgccgggccggggccatgcaggagagccagaccaagagcatgttcgtgtcccgggccctggagaagatcctagccgacaaggaggtgaagcggccccagcactcccagctgcgcagggcctgccaggtggcgctcggttccatgcaggtgatgaacaagacccggcgcatcatggagcagggcggggcgcacttcatcaacgccttcgtgaccacacccatgtgctgcccctcacgctcctccatcctcactggcaagtacgtccacaaccacaacacctacaccaacaatgagaactgctcctcgccctcctggcaggcacagcacgagagccgcacctttgccgtgtacctcaatagcactggctaccggacag

SEQ ID NO: 4 - DNA, 1658 bp, Homo sapiens
  misc_feature (1511)..(1511): second gene starts at position 1511
cagaaagcggagagtcacagcggggccaggccctggggagcggagcctccaccgcccccctcattcccaggcaagggcttggggggaatgagccgggagagccgggtcccgagcctacagagccgggagcagctgagccgccggcgcctcggccgccgccgccgcctcctcctcctccgccgccgccagcccggagcctgagccggcggggcgggggggagaggagcgagcgcagcgcagcagcggagccccgcgaggcccgcccgggcgggtggggagggcagcccgggggactgggccccggggcggggtgggagggggggagaagacgaagacagggccgggtctctccgcggacgagacagcggggatcatggccgcgcaggtcgcccccgccgccgccagcagcctgggcaacccgccgccgccgccgccctcggagctgaagaaagccgagcagcagcagcgggaggaggcggggggcgaggcggcggcggcggcagcggccgagcgcggggaaatgaaggcagccgccgggcaggaaagcgagggccccgccgtggggccgccgcagccgctgggaaaggagctgcaggacggggccgagagcaatgggggtggcggcggcggcggagccggcagcggcggcgggcccggcgcggagccggacctgaagaactcgaacgggaacgcgggccctaggcccgccctgaacaataacctcacggagccgcccggcggcggcggtggcggcagcagcgatggggtgggggcgcctcctcactcagccgcggccgccttgccgcccccagcctacggcttcgggcaaccctacggccggagcccgtctgccgtcgccgccgccgcggccgccgtcttccaccaacaacatggcggacaacaaagccctggcctggcagcgctgcagagcggcggcggcgggggcctggagccctacgcggggccccagcagaactctcacgaccacggcttccccaaccaccagtacaactcctactaccccaaccgcagcgcctaccccccgcccgccccggcctacgcgctgagctccccgagaggtggcactccgggctccggcgcggcggcggctgccggctccaagccgcctccctcctccagcgcctccgcctcctcgtcgtcttcgtccttcgctcagcagcgcttcggggccatggggggaggcggcccctccgcggccggcgggggaactccccagcccaccgccacccccaccctcaaccaactgctcacgtcgcccagctcggcccggggctaccagggctaccccgggggcgactacagtggcgggccccaggacgggggcgccggcaagggcccggcggacatggcctcgcagtgttggggggctgcggcggcggcagctgcggcggcggccgcctcgggaggggcccaacaaaggagccaccacgcgcccatgagccccgggagcagcggcggcggggggcagccgctcgcccggacccctcaggatgtagtaactggagttagtcccctgctcttcaggaaactcagtaatcctgacatattttcatccactggaaaagttaaacttcagcgacaactgagtcaggatgattgtaagttatggagaggaaacctggccagctctctatcgg

SEQ ID NO: 5 - DNA, 1557 bp, Homo sapiens
  misc_feature (1511)..(1511): second gene starts at position 1511
cagaaagcggagagtcacagcggggccaggccctggggagcggagcctccaccgcccccctcattcccaggcaagggcttggggggaatgagccgggagagccgggtcccgagcctacagagccgggagcagctgagccgccggcgcctcggccgccgccgccgcctcctcctcctccgccgccgccagcccggagcctgagccggcggggcgggggggagaggagcgagcgcagcgcagcagcggagccccgcgaggcccgcccgggcgggtggggagggcagcccgggggactgggccccggggcggggtgggagggggggagaagacgaagacagggccgggtctctccgcggacgagacagcggggatcatggccgcgcaggtcgcccccgccgccgccagcagcctgggcaacccgccgccgccgccgccctcggagctgaagaaagccgagcagcagcagcgggaggaggcggggggcgaggcggcggcggcggcagcggccgagcgcggggaaatgaaggcagccgccgggcaggaaagcgagggccccgccgtggggccgccgcagccgctgggaaaggagctgcaggacggggccgagagcaatgggggtggcggcggcggcggagccggcagcggcggcgggcccggcgcggagccggacctgaagaactcgaacgggaacgcgggccctaggcccgccctgaacaataacctcacggagccgcccggcggcggcggtggcggcagcagcgatggggtgggggcgcctcctcactcagccgcggccgccttgccgcccccagcctacggcttcgggcaaccctacggccggagcccgtctgccgtcgccgccgccgcggccgccgtcttccaccaacaacatggcggacaacaaagccctggcctggcagcgctgcagagcggcggcggcgggggcctggagccctacgcggggccccagcagaactctcacgaccacggcttccccaaccaccagtacaactcctactaccccaaccgcagcgcctaccccccgcccgccccggcctacgcgctgagctccccgagaggtggcactccgggctccggcgcggcggcggctgccggctccaagccgcctccctcctccagcgcctccgcctcctcgtcgtcttcgtccttcgctcagcagcgcttcggggccatggggggaggcggcccctccgcggccggcgggggaactccccagcccaccgccacccccaccctcaaccaactgctcacgtcgcccagctcggcccggggctaccagggctaccccgggggcgactacagtggcgggccccaggacgggggcgccggcaagggcccggcggacatggcctcgcagtgttggggggctgcggcggcggcagctgcggcggcggccgcctcgggaggggcccaacaaaggagccaccacgcgcccatgagccccgggagcagcggcggcggggggcagccgctcgcccggacccctcagggtcactcaggatgtgtcaactgtctggagtggaatgagaaaggaga

SEQ ID NO: 6 - DNA, 301 bp, Homo sapiens
  misc_feature (160)..(160): second gene starts at position 160
ctgagctggaggcctcagtgcccaggaaggcagggaaagcccgcatttcctgctgggtgctggcaggcgtaagtgacgcccagagctggctgtaggtggagctgacaggcaggcgggcagcccggcgctggaactgcaccaagggctgggagcgggcacctctagtttgctgttatccaggccagacaaagacatttcctccattttcatttgtaaactcttgtggagacggcgctctgactgctcatagcacagcgggcggcaacacggctgcacacacgggggtgggggtgttgttgtg

SEQ ID NO: 7 - DNA, 412 bp, Homo sapiens
  misc_feature (245)..(245): second gene starts at position 245
ggagctgcgagccgcgaccgccgggagcgcacctgccccgcctccgccaggcggtccgcggggcatgcagcggaccgggggcggggctccgaggcccgggcgcaaccacgggctcccaggcagcctccgccagccggaccccgtcgccctcctgatgctgctcgtggacgctgatcagccggagcccatgcgcagcggggcgcgcgagctcgcgctcttcctgacccccgagcctggggccgaggtacctttgacaggagcgtgaccctgctggaggtgtgcgggagctggcctgagggcttcgggctgcggcacatgtcctccatggagcacacggaggagggcctccgggagcgacttgccgacgccatggccgagtcacctagccgggacgtcgtgggatccggaacag

SEQ ID NO: 8 - DNA, 375 bp, Homo sapiens
  misc_feature (111)..(111): second gene starts at position 111
gatgtaaatgaagaccctggagaagatgtggccctcctctctgttagttttgaggacactgaagccacccaggtgtaccccaagctgtacttgtcacctcgaattgagcagaacatgcttgccaactcagccagcgtgaggatcctcatcaagggaggcaaggtggtgaacgatgactgcacccacgaggctgacgtctacatcgagaatggcatcatccagcaggtgggccgcgagctcatgatccctggcggggccaaggtgattgatgccacaggaaaactggtgatccctggtggcatcgacaccagcacccacttccaccagaccttcatgaatgccacgtgcgtggacgacttctaccatgggaccaag

SEQ ID NO: 9 - DNA, 174 bp, Homo sapiens
  misc_feature (113)..(113): second gene starts at position 113
attctcagaggattaaacagcaagcaacattgtttgttggagagtcccacaggaagtggaaaaagcttagccttactttgttctgctttagcatggcaacaatctcttagtgaaaatttttgttataataacattcagcaagcacatagtggagcaaatggtggctttcattgg

SEQ ID NO: 10 - DNA, 378 bp, Homo sapiens
  misc_feature (76)..(76): second gene starts at position 76
tacttcatcctgctcctcatcatctttctgctggagatcatcgctggtatcctcgcctacgcctactaccagcaggggccttcctgctgtgctggacgcccttcttcgtggtgcacatcacgcaggcgctgtgtcctgcctgctccgtgcccccgcggctggtcagcgccgtcacctggctgggctacgtcaacagcgccctcaaccccgtcatctacactgtcttcaacgccgagttccgcaacgtcttccgcaaggccctgcgtgcctgctgctgagccgggcacccccggacgccccccggcctgatggccaggcctcagggaccaaggagatggggagggcgcttttgtacgttaattaaacaaattccttccc

SEQ ID NO: 11 - DNA, 693 bp, Homo sapiens
  misc_feature (160)..(160): second gene starts at position 160
gctcacgaggcccagggaatcctctggaccatcagattaccaatgaaagaggagaatcaagctgtgataggttaaccgatcctcatagggctccctctgacactgggtctctgtcacctccatgggaccaggaccgtaggatgatgtttcctccgccaggtattttgaccaacgtgatttagctgatgagccatcttgatgtagctgatctctcagggatagaagatatttctcatgaaggcagcctaactctgaggaaaacaatgccaattcaagtacagatttcaacacatcttcaacactatgtgaagggttcacatcttaacctgtgcaattcagattgatactcagaatatgggttgatttgaatatctgaaatatcaatggaaaatcccactcagtttttgatgaacagtttgaacagttttctgtaatcaagcagcttgcatagaaattgtatgatgaaattttacataggttcttggtgctgttttgttctttttttgttttttgttgttttgttatttacttatatacatataaaattttattgaaaatatgttttggttactaaaattttgtttgactcctaacaaaagacaatggatggccttagcatcagaattaaaataatctggattaaatggcaatgtgttcatagtcagcaataaaattaaacatttttccctttaa

SEQ ID NO: 12 - DNA, 160 bp, Homo sapiens
ctgggtattgtctgtataatgaaaatatcttggccacgaacagattcttttatttcaactcttgtttcgtagctgtcgtcctcctccatggtgcgggagccgggctccgcgctccggctcgccgctcgcgtcccgccgcgccacccgcgcccccgctcgc

SEQ ID NO: 13 - DNA, 253 bp, Homo sapiens
  misc_feature (79)..(79): second gene starts at position 79
ttatctgccatgttgtgggtatcacttaccagcacattgaccgctggctgctggccgagatgctcggggatctgtcggcatcaattccaaagaatgtctttttagcactgcatgaaaaactctatattatgttgaaagggaaaatggggactgtcaatctccatcagtttactgggcaactgactgaagaattacatgaacaactggagaatttaggcactcatgggacaatggacctgaacaacttagtaag

SEQ ID NO: 14 - DNA, 306 bp, Homo sapiens
  misc_feature (84)..(84): second gene starts at position 84
ctgaatgtcagccagcagctcctgttttctccgtcggatgttctccagttcttgacgctcctctgctgtcaggtcactgggaacttggttgcggccatattccaccagccagcgggagatgcgaatgacatcctggagcacgctctcgggcaggtgctccagggtcacgtcctcctgggcctccagatcatcgtcaccactgatcagatccaagatgagcacgggcgagacgaccttactgtgccgcgtcatcaggctgcgaaattcggactccagggcctccttcccgcgctcaaagagcagttt

SEQ ID NO: 15 - DNA, 614 bp, Homo sapiens
  misc_feature (73)..(73): second gene starts at position 73
ccagtgttgctgtgggcatggtgagaccggcagtgtcatacgtggctggtggcattgcaaactggtccagtccttgacgacaagctgacaaaatcccctccatccagcagccggaccttgcagaagaggaccccgttcacgaagggaaccgcagtcagctcctccagggtgaaagtagtttggaatttgaatttcttcttcttcatcaagaaagccatgagcgagttccctgagtctgaagccccgaaggcgaaaaaaggtggagagggacgggattcctttccctacaccacaccccctcctcaaaacaccagagccggatcccgccctgatggtggcggagacggcggagatcggagtccggggccccaggtctgagagatccaccagtccagttcgcgggccggcgggcttcaccctcggggagccggggctcggaggggttcggagcggccggggacctcaccggcatgtaaacagcagggcatggcccaggaggcagaggcaggggcggaggtgcggggctgcgcgcgagcggccgcgctggcttgcagcatcccgagacgcgatgtccggggagctcacgccgcgcggccgggcggaccggtgagact

SEQ ID NO: 16 - DNA, 772 bp, Homo sapiens
  misc_feature (231)..(231): second gene starts at position 231
ctttcgattgggggtggtagaggaggaggtccgggcctgtttctgggggttccgtcctgaaaggttgaactgggaagggttcatggggaccccaacaggaggaggtcccagcaaggactggcgagtggcctggggaaagaactgttgcaaatttggagtggccagttgtgggggtgtgaggctgggggctgcgaggcctggggatgccatgccatagcctcggaggttaccttgacgacaagctgacaaaatcccctccatccagcagccggaccttgcagaagaggaccccgttcacgaagggaaccgcagtcagctcctccagggtgaaagtagtttggaatttgaatttcttcttcttcatcaagaaagccatgagcgagttccctgagtctgaagccccgaaggcgaaaaaaggtggagagggacgggattcctttccctacaccacaccccctcctcaaaacaccagagccggatcccgccctgatggtggcggagacggcggagatcggagtccggggccccaggtctgagagatccaccagtccagttcgcgggccggcgggcttcaccctcggggagccggggctcggaggggttcggagcggccggggacctcaccggcatgtaaacagcagggcatggcccaggaggcagaggcaggggcggaggtgcggggctgcgcgcgagcggccgcgctggcttgcagcatcccgagacgcgatgtccggggagctcacgccgcgcggccgggcggaccggtgagact

SEQ ID NO: 17 - DNA, 172 bp, Homo sapiens
  misc_feature (70)..(70): second gene starts at position 70
ctgtccctcgaaccacagccgctgccgccgctgccgccgccattggtccgtaggcagtgagaggaatggcttttccagcaacacacttcccaagttcactgaggatttctctccgttcctttacactggctgttgtcaccttccctgcaaaacgctttagtgtctcggaaac

SEQ ID NO: 18 - DNA, 429 bp, Homo sapiens
  misc_feature (175)..(175): second gene starts at position 175
cgacaggggccagctgatacaggtgagcacgcggtagaagcggaagaggtggaccaggtaaaaggcgaggatcattatcaagtcgcaaatggtgaccacttcaaagtagctgtaggcgctgtagttggtccacagggagctccgcacacagatgaaggcaatcagcagggtgaccttggtccatccaggaaactggataaaggtgtcctggggcaagtctgggatcccactgggaatggagaagttccccatataaaaggccgggagcgtgtagttggatgagttgtgggcccaggcttcatcatggtggccactgtcacggtgtccccagccccccaggtggctgcacactgcatcctcagtgtccagtggaaagatcgtccagtccgtgaggatattggaactgagagtcaggttagaaaccaaacc

SEQ ID NO: 19 - DNA, 380 bp, Homo sapiens
  misc_feature (275)..(275): second gene starts at position 275
tagtagaaaaagaatttaatagacacgaggccggccacgccacgtgggcgatgaagttcgtactcatcttattcaaagctcataggttagggatttttcaaaggcagtttgggggaaggggtgggggtggacaggtaacaggtgcttgctgctgagtggttggggcagagatgaaatcgtaatgggttgaagctgtcctcctgttgggctgaattgcttctgggtggagccataaggtccaggtggagtcatgggtgtcagacatgcaaaaaacctttctccttgataaccagctgctttctcttataagccatcaccatgcctttctgaagagtcagcgccttcttcttcactctgagactctctccttggccttgacc

SEQ ID NO: 20 - DNA, 562 bp, Homo sapiens
  misc_feature (154)..(154): second gene starts at position 154
ttccaaaaatccagggaactccttttccatgagtactctcaggtcctcctttgttaagtagcctttatccccagcgaatttgtgaaatgtaaacatcatggtttccatggcgtgttccatttgagatggcattttggtgtggtccgttgaagcccgggccggccagtgtgggtagcccttcatcttggcgaacaccaggtccccgcatttgtactccttctgccggttggatcgcgacatggcggggctccgggcgccccgggctccgcgccgggccgggaagcgcgagcccaagtttgcgcgtgcggcggtggcggcgccgctccgctccggccctcgcgcggcccccgcctcgatggtggcccccggcccgagctccggcgcggccacggcgtctccgcccgcgcgccgcacggacggggcgggcgcggatcggggcaaggctccggcgcggtgggtgcgcgctcgtgcagttgtttgtgtttgaaattcaattgctccctcctctgcgcgaggcctcttcctccaccccccgcccggtccccactcctcctcctccctc

SEQ ID NO: 21 - DNA, 277 bp, Homo sapiens
  misc_feature (200)..(200): second gene starts at position 200
cttctccagcttctcgaagtgctcccggaggaacttcatggggcgttcgggcttggagatgcagaggtggacgatacagtctttgaggacctgctggatcccgtgcagctgcacgtacagctcacagcccttcaggctctcgtcctcctccgaggggcaggcgggcggggaggccatggcgagggtggctgcttccttcttgcggtcactctcgggtggccagttgtcccacttgtagtaggtctccggctgctctgtgaacagcaccttgtgcagg

SEQ ID NO: 22 - DNA, 250 bp, Homo sapiens
  misc_feature (198)..(198): second gene starts at position 198
cagtgctgatttcagcaatgagttcagcagaattgtggcaaccctgtactatgctccttgtccagtgggagaggtccctgctggtctctgctctgaagagatgtgtttcaatcccttgcctggtaccagttcgcgttgcaaaggacagatccacaccagcctggggtgatccctttcctggacctgaatggaccagccgtacaagagattttggttgaactgaaaatattagtatttcattactgtgtgc

SEQ ID NO: 23 - DNA, 268 bp, Homo sapiens
  misc_feature (148)..(148): second gene starts at position 148
agagccagctgctccccgggaacaacttcaccaatgagtgcaacataccaggcaacttcatgtgcagcaatggacggtgcatcccgggcgcctggcagtgtgacgggctgcctgactgcttcgacaagagtgatgagaaggagtgcccttgaagaagagagtaaaggagattgtacataaagcgttttgggattgcttgagtgtgcagctaagtgaagatcccccagcatatgaccatgctatcaaacttgtaggagaaatcaaagag

SEQ ID NO: 24 - DNA, 598 bp, Homo sapiens
  misc_feature (134)..(134): second gene starts at position 134
ccaggttgtgccgcttcgccttcgcatgctcgtgaatatgcttctttgtgaaacagccgaagaagacacagtagaggcaggaatgcagcctgttgaggtggacgccacagacatggcagatacaggacttggccttagtttgagttggttcacctttctcaaacatcatcttaagcctgttcagcggaacattatatttctctattttgcccgaagcatctgtgttttcactgatttctgatttttctacttcatgcctggattctcctagacaattttccatttttttactttctgttgagtggtctttaagatcctcaccgtccttgatgtggggatatcgaccctgaacgagggcttcaggaggtgacctgagtctagatctggggtggatttgttcttcttggtcagctttggctccagaagcagcgtggcttgtcacttcagcaggaggatggtctgctctgtgcctaatctcagtgctgctgttccgtagagagtctgtgtgagactctgctcccagccctgggttctcccacttcttctttaacacagtcagggtcccctttctaaagtgctgggagagattttcggtgtt

SEQ ID NO: 25 - DNA, 301 bp, Homo sapiens
  misc_feature (178)..(178): second gene starts at position 178
aagtgaaaaagagtgtggtctcatccagacgaatggtctttggcttgatacataaatccacactggcagtatccaggctgcgctggtgagtcttagagttgtagcacgatgctgagcggcagtggtctcgaagccagacgtaatcaaagcgcatcacggtattagcatatttcagctctgagccctaacatcccagctaccatggaatcctgttggagctggtctacagaagcaaggtgtattctggggagtcacatgtcacatcaaagcaggaactggtgagtctgtatttttatggagc

SEQ ID NO: 26 - DNA, 295 bp, Homo sapiens
  misc_feature (59)..(59): second gene starts at position 59
ttgatgaagtacttgattccatctgctgtgtaagcttcctcccacccataaggtaaaccctcggtttccccctgagctttcatcctgaaggcgaggagaagctagatccgccacaaaaggataagcccttccccaccactaacggaggaaacaagttggctcgggatcccgggacgcagggcaccagcagtccctactcttcccgggaaggatcaatctgaagtccccggcggcaagaagagaagggtgctcgaggccgccgccatcttccccaacggaacttcccaaaattcgc

SEQ ID NO: 27 - DNA, 2480 bp, Homo sapiens
  misc_feature (111)..(111): second gene starts at position 111
gtgaggcatgaaattcaagatggaaccatacatctttatatttattctatacacagtattccaaagggaactgaaattactattgcctttgattttgactatggaaattgttctgctaagccaatattctctagaatgagcacaaaacaaatcgaataacagctaaacaaatcgaataacagctaaacgaatcgaataacagcttttgtacatcaacatcaagaaggaatacgcctgagagagatcagagtatatagatgaatatgaacaagaatggaacattcacttgtcaacgcactttctaaatctagatcagcagagatgggagtgattttctggaaagagatgtgatcatggattaaacaccagctcattggaaactcattggatgagatcagaaaacgttcatgaaaaatcatattcaggaaataaggaagaggaatataaatgctctagagttaacatgtaaaatatatacgtactgaggtttgtaaactgtcctttttaaatcaaactgaaaacaaaaagctttaacctttcaacagaatttttaaaaaggcagttagttctaaattattcctatctcaatagccaagaggctgatcaagcgtcatttattgaggaagcatcttagaaaatgcctctgaatgttttcataggagccgtgacctttggttcttcatctctaccattcatttacttcactgtgtaattagttacaaccactcagttattaagagacgtaacgcttcaaactttttaccaagtctgtgttctgtttaatctgtccatacaagttattactgagaaagtgtttatgccatatactattactccatcaagctgtatattacaggaagtacatctttacatcataggttcccaagcaacatagatttccctatctttcaggaaacagcatcaaggaactctgaaaaatatagaaaaagttcattttcaccttggaagctcacgtgtaatattataggctactatcaaataaacactttttttctaattctccctagtatatgcataggaatttaatatactttataaataagtatctaaaatgtctcctacttttttcctatttctttgccatacatgttatcagaaatccatgtcttctatttcccttactgatgggcactcatttttatttttttaaaaatcattccattaaacatatttctaaataatagtaagtggtactaacaaaataaataataatttaatagccttagaaataaatgactgtatacttatacaggttgaaaaaaactcggtaggaataagttacctttttgtttactaatgttggtttcaaaaatactcagattcattttagttggctgacatctggaagtagttaacaactaaccagtggacttcaacaatcatttgctcccaggcttcccccatcatcaccctcaccacatatcctgctaatatccaacaacaaacaaatatttaatattgaaatagcccattgcctgagaatgaacacaagctaaaatacatgcaagggtacttaatggaagccaaaccatgttctatacctaaggagaaaacatggacatgtagaatgcttttattcatgtattcaaaatcagaacaaatcagtgtatatcactagaacatcagatggaggataacacaagaagtgatacagatcagggttcacttctcttaccctctctctgttaggaccacattcctattttagccaaatgtttctggtacgggccatcttttcaccataaatggcattatgtttcaaatggctaaaagcatattatgggtatgctcaaaggagtaaaacccaattcacagagatgtggcttttctaaagaaccaaattaagggaatacttagtatctacaactaaagtattagtcattctgaggattatttgttgctttaagtattagctccctactacatccataacaccctacttactaaatttaattacacacaacttttcaagaattcgtattttatttgaagggaggtacctgtctactttatctacaataaaaacaaagggtattggctttctctaatccatgcaaactacaaattccatcgggagtcctacatcactaacagtggtatgaacaaaactaagaaagtacttcctatccacatgtgaatgttttaaaaaagtttttgccataaaacctaagtgtaatttagcataccacagtgctctgaagatgggtcattgacgatgtaccatttgtatataggtaatacacatgtaaatcactaattgttaattaaatataagaagtaggtttttatctttttaaaaaaaaaacaaaaaaggtgactccctttctcattctgttctgttgtattgcgtccaaaagttgtgtgtaatttttttaaggtccaagaaatgtaaagaaatttgttggaatacctgaatttctgtaaaaaaataaaaataaaaataagattttgttacttaa

SEQ ID NO: 28 - DNA, 345 bp, Homo sapiens
  misc_feature (134)..(134): second gene starts at position 134
ctttcctagccgatctcctttgctgaacggctggtagggcatatcccgaaactgctcgggaaccgcacagggaccccagcctgaggggttgtcctggatcacgggtgtcatgaactttgccatcttccaaaatctgaacctggatctgccccgggaacaggcgctgcttctcccgagaggactttctcgagcgctcgggcggcggccgggtggggcgagcgcacgaggcgggagctgcagcaggtcagccttgcttagccttccgtgccctgcccaggaaccgcggtgatctgcgcgcctcaccgcacccagctcggctcctcgccgccttcccgccccgccctc

SEQ ID NO: 29 - DNA, 601 bp, Homo sapiens
  misc_feature (533)..(533): second gene starts at position 533
gatgaatttcatcctttcatcgaagcacttctgccccacgtccgagcctttgcctacacatggttcaacctgcaggcccgaaaacgaaaatacttcaaaaaacatgaaaagcgtatgtcaaaagaagaagagagagccgtgaaggatgaattgctaagtgaaaaaccagaggtcaagcagaagtgggcatctcgacttctggcaaagttgcggaaagatatccgacccgaatatcgagaggattttgttcttacagttacagggaaaaaacctccatgttgtgttctttccaacccagaccagaaaggcaagatgcgaagaattgactgcctccgccaggcagataaagtctggaggttggaccttgttatggtgattttgtttaaaggtattccgctggaaagtactgatggcgagcgccttgtaaagtccccacaatgctctaatccagggctctgtgtccaaccccatcacataggggtttctgttaaggaactcgatttatatttggcatactttgtgcatgcagcagagccttccatcatgaacacctggaaagacgagaactatttatatgacaccaactatggtagcacagtag

SEQ ID NO: 30 - DNA, 389 bp, Homo sapiens
  misc_feature (179)..(179): second gene starts at position 179
cctggctttttttgtatcttgatattttgtggtttgttttttcgattcaattcattcccattcttgaaccacttgaatctgagagaggagtattcagaactggtttcacaccgaaggactagtttggaacctgcagccgattcctggcttttcatctctttcaatcggggaggcaaggcaatggcagtggtgagaaaggaaaccacttctgactcctttccgtcattgtaaaaagccaagtgccagattcctgaatccaaatactggatgaagcctgtctcatggctggaggggggcacagttccccgagactggcgcggggtcccctctaggctccgcgcctcctgggttaggagcctcctgccatccagcagctccacaaagtcaaa

SEQ ID NO: 31 - DNA, 8403 bp, Homo sapiens
  misc_feature (127)..(127): second gene starts at position 127
gacttcatgtagagaacgttccaaagatggtctttccacagccagagagcacattatcaaacaagaggaaaaataatcaaggcaactcgtttcaggcaaagagagctcgacttaacaagattactgcatcatctgagggttctccataaacacggttagccttccaagctgctgtcctgccagttgatatgaacatggcctgttcctcacagaaagactaacccatggcactgccagaagatatccttggatcgtggacagattaactggattaactgaaaaaagcacccattcagtcaatattatgggttttggaaaaatcttgctttgctgtggatttaaaatgaggtgcataatataatgccaactcattccaagtggtcattggcagaccattagctggaaaattgcttccagttttcatcactgtgcataactcaagttccctttggggagctgtctgtgcccttcactagaagtcctgttttagcatggcaactactggattattttattatgtgtgcagatggcatgatgttttagaaaaaaaaaattacagcaattctgcaatctcagtggaagtgttcacaatattatgccctggtaggaatgtaaacacgtctcgattatgttagttatgatgtctaaaggtatactgtccaactcttaagcactttatatgagaacactacaccaagatgaatcagcacattcagcacatgtgagaaatcaagtattttctttttatttttataaatcttagtggtttttttttttccggctcagactgtccaagacaaactccactactcgcatatccccagttgtttgtggtaggttgatgtaaatatggccacaatactgttagacttcacctccagatactttattgaacaactggtttacttctagcaccaaagggaagaagaagggggtccagtgatggtgatatcttagcttgcttctttgttcacaggcactattgaccacatgaacatacaggtactcaaatacaggaggcttctatttggctcctccaagggaggagttcctccaagggaaaaaaggggatggtattcttttaatcaaagaccatggtggatggatggtaagggcaacagaatgcaattcttttgtgtggtctgacgttaacacttcggaaaaaattctaagtcaagttgaaatcgccattctctcaagagagaaacatcaagagagaaacatcaagtgaccccactatgtgcctagagaaggaaaagggtcaagtcctatactaggttccttacttagggtagaacctactagtcccttgttaatcctttctgggattatacctgtgactaatttttttttttttaactatgtcttacgacaaagcacagtcctgggaaaccagtcaacttaattattgcttgtctttgagcattagagacatgttcatattgacttgctacataacactgtagcatgttttttcctgaaaatatcaagttggttgaatggaaagctcagcaaagtatgttctgtgtgcccactgtcccagcctgggactgacgggcatcagaggctttgctttaaaatatgggtaaccagttctggaagacttccaacgcaagcaagcttggtgttttagggtgtctccagatacataagcattgtctgcctccgctcagggtctcaggaaatacacagcccattggaaaccacccacgcctgagatttggaaacctgacggaaagggaggaaggtccaaatgagtcagcagcaggatgactcaccacaagcctggcaggctgcagagccagagaagggggcttccaacaaggaactcagagaagttgcagtcaccaccaagatctggcccttcggcaggtcagcaccaggactgccaggccctctgcagaccgtaattctcttcacatctataattaggaggccaaactccagctgccaacacccttggacacaatattccagtctccactgcccatctcatgtggttcagttctaatagcaggtcttcttcttcctttcattccttcctttattcagcaagcatttgttgagcatctactatgtgccaagcattgtgcttgggcaacaacagtccacaaagcagactccccacctgcccttatgaaactgtatctcctcctccccaacattatcaccaccccaccatttccacaatgaaaactgaattcagacagcattctccattctgccagagtaacctaggaagaagaacatggcagcagacggatcctcagggaggaggcagcagagtgacagatggtaaactgcatcaggccacatatttgcacctttcagatacagccaactcttccagggcctagactgagctggttggagctccccaaagcagcattcagttgcttttccttgatatccaccctggctacctatattccctttctttatataggcacaaccattcaccactacgctggattatctaacactccaattctataactcatccaggggacacacagttgagtctgatgaagcctaagaactgccaggtgctgagatattgtaactgggaattaagatttagccaaggacattgtgagactactgctgactctcttggaaaactggacatgctttgtagtgcaaatgttcactaaatgatggtggttcattgttacttactttggcctttgcaaaatattctgaacaattcaataagtagagtttcctagtttgtttgtttttttaagtcaaaggaacgctgtgaaattattgaaagatgatgggtgaagagggacctaggagaaggcaaaatgaagaccattaaagagccccattgaagactgtatctctaaaaatgccttaatgcctggcacatattccatatttgcatatgaactactattcttttccaaactgtcaacttctgtttgaaatcattgtgggggatagtttggaaatatggtggcataaaatccaagcagtcaagagctaaaccagcaaaaaagaggaatgacttcattcacaggctttggcttctttattatgtggtggtcctctgtgatctcccatggttaacttcaactgtgctgtactttcttcccaagatgcatgtacggaatgttacctcctagaaatccagaaatagttgtggtgagttttgtttgataggaagcaagaggtggggaagtaaaggatacatatttttatgtctaaggactgtaaactgttgatgcttgacttttccttttacctacacctgtgctacacctttattaaaaggctgacacccagacttgtgcaggaaaggcactcttgggaatgaacagaaatgaataattatgagactttccatggtgccaaggggattcgcttatttccactccagaactgaatatgcagagcattgccagtcctgctagtgtgaaaagcaaattacttcaatagtttgagacgtacctaggggaagagagatcctatcaactttctttgcgggtagtggcgtaccttcaaatccttgctcaggctctgtgaggtgtgcacccgcagatttcacttctacctccggaatcctggcaaacaagccaggaatctctccagagtcacttcgcagttgctcagaaagaggctaacggtccttagtcctgaggaaattctgccatttttaacattcaaggagaaaaggcgtatcagctgtacgtgagaatatcaactaaggataaaaacctctaatggatcccccttgttacttgcaaatgctttctttgtctgcaaatgtcacataattgattttgcataggaacaacaaaagtctcaaggaattgaagtttttaataccccccttagcactttactttcaccaaaacctcctctttctagtacatgagcagttttgttctttgtgatgttttcctctacattctttagaataattttgttacttgacaactagacttgtcaatcgtcttagactcttttgaaaaatctaatctttgaaaatgacacaaattcctttattgctttaaggctgttttcattcacccctcccacagccccctccactgcacttttttgttttttgcggggatttttttctttcatctctcttcttttaacatgatgctgtgggtagttttcaagaattctataaagaactcaacaaaaagtgtatttgttacctttttccccagtcctaatatttcttcttaagcttgatcttggtgaaaatttgttgcccaaaaagcagtgaggtagggattaataacgctgaccagtcatctggaagattaattaatcccagtgcagccctgagatcaggaaggaggacaggccaggagatgtttctactccaggcaccactaaggactctatttcaaaggcagatcctgctccttagtctttttagatctgaatctaatcctgaatccagaaaattatcctatgaattctggtttatcaacgcacatgattcctggcaccattgcatagcttcaaggtaaaagagagccttgtttccattattttgctatggtggcttttgggaagacagagagcattcttttgaaagcgggaaacttaaggaaaagttggccaagtacacaggaaagttctaccacaccttaatataaagaacaaaatagatgcttctcatttggggaaagtagctaaaaggacagtaacagtactgatggccttctgtccatcaccttagctccacagggaaaattctgggtgagagcaagcactgtttctaaaatctaaattttttcaggtgaaatttaccagcaacaaatgtaaaagggaactgccatcaggcatagggctagttttatacttcctgcctaacggcaaaatgactgagacatgacttccatggaacagcagaaaatggatgccaaagatatcataaaactgaagttcaatttgccacgtaaggctatttaaaaaccctgatgcactccaagcattcttccttcagagctttcctcctacaattatatcaagcacaagaaggcaccaacagcatatacttaatgtaatgtaaaagtaaacatatgacttgtgttgaattaccattggctggttgacataataagtgtcatagatatttagacattatttctgatcatacaaaattattttcataatttcatattcttttcaattttcataaattcttttcaattttcataaattggagccaatggtttgggaggttttttgtttgtttgtttgtttggttggttggttatttgttgcgttgttgttttccaaacctcagatattttgagaagccttagaaaggctcttaagcccaggcctttttgcctcatgtgcagagtattaataacagccctactgatgtgaacctcaaggaaggaggctattaaattaatccatcactggagatactaatacctcaaacaattaaaacactgaagactctgctggttgccttccacattgtttataacctttttaaattcagtcatttggatcaagagaaataaatggttggtttcatatggcttttgccacattagcacagacacatctaccaaatgtagaagtccagactgagtggatgcatgagagcaaacagatctgtaatatgattgcatttaatcaccgccaccgcccaaattctgtaaaaatatattcaaatatgtaatgctaaaaaaaatgcaaaacaggagactcttactagatcatgctttcacttagggtaggataactgatcttgaagataacttcatagaaaaatttgctggctgaaatgccccaggcacctcagggttggtcctgtcctattccacaaactgatcatggtcttctcccatcttctcagaggagttagccttgcctctaaaatagcaaaaatgccatgaaattatctttctaacctctatagagacttcttatccaagtataattccaaaaatatgatttgagtttgagcatgcctgtggtccttgattctatgatccctaaatcagttctacttttctcactctctctctctctctctctctctctctctctctctctctatatatatatatatatatatatatatatatatatatatatatatatatatatataatctccagtattttttttcaaccacaatttagtgcatttagcgtgttaatgttgggaactgcctgctggctctatgtctacttttgacaatgcttatgtccagataccatacagtgcatttgagagaggaccaaggttatgttttcccacataccagctgctgcagaggtttcgaagtgcctgacccagttctttttcacatcaaaaaggccttcggttgcagatggaaaccttaaagatgaatgtagagtggggtaggaaattcatgtttgaatgctgaaacccttgtcttttttagttttattcaattcccacctcagatcaccagaaagggaggcctctttggtgggtgttggccctcactgggggtaaaaggggttctatttgcttaaactcatgctcgtaggcaattttagggctctctggggctctgaatggtttctccaccaccacctttcttccaccaatagaaagatgttgtccttacaaggccatgtctgagaagaccatggtttaactagtaaaagaagctcacattgcagagagctgaataataccaggctcttgactttgtactgtgtgtcacagtcatgattgggacagaaggaaccagtctgctgaaaagtcaagccagcacaaatatttggaaactaattccactgaaactcttgtatcattaaatcatactattgtagtttcagttaatgtaattatttaatatcaggcactaaattaaatagctttgcacaaaattttagaaaagatcaatcttgtaacaaaatttaatattaacagtaaaaagcacctgagaaaagaaaatatcgatctgttgtggtttatatacttgagttattcttagaactttgtggagattgacactgctctgataaaaaggaagaaaatgttttgaattcaagaatgctagactaatagaaatagcccagtctctctgggccactgctcttcagtatggggtgctctctgtccctccttagcagatggggttgtttggaggctaaaatgagctaagggaagaagctatactgtgcctccaatatcccttatgtgtaattagagtgccgatctgggctgcaggctttattcaatgattcctttcccttacttgaggctttctctgtagagctgttatttctgagcctccattctgggatttacaaaggaaacagaatgatgaagaagtaacaatcagcattttacacacacgcacacacacacacacacacacactttttctaatatatgaggctagtctgcagagtccacagcccaggtgtccatttatttccacttcttcacctcccaaagatttagagctccatgatctaccaaggtgaagactgccaatcccaggttggagaagacccgtcagagtgtggaggtgccaaactgagaggcacaggaagcagacagccacatcaaacttttttgatgaactactgcaaattggtgtttgttctaggaaagaaagaggaagaaaaattacacaatgtgaattgaacataagagcagtgctctttacagagtatgagaagggaggatgggggagaatctgattaaaaaaatgattcattccttcacagacactaacaaacatggctaaaaagcacatgtcagaacacagaagcctaggtagatggttgacatttttataacttccttaagtgagtagttaaaccagcagtcttaattctgttggtcttccaagagtgtttaattacataagtattacctgtattcatttcccacaactgttgggtttttctttctttttttttttttttttttttttcctctgtgcatcctagaaaaactcccaggactagacttaggaggaggcaatcaagttatgtggtaaaacaagagtgccttttctgttggatatccactttagtttcctggcttccagggcataagatgtttagaaactttttttctctaaacataagaattattgtgtaccacaattttgaaccaccgatttccatatcttcagcagctatcaacttgccaattccctttgggtctcctttgtatattcttatgtttccttctgtttccagttgtcctcaaaaagagttgaggggggcatgactcttataaaatggataaaaatgaaactgtacagatgtttgcctcccttgtatctgtgagcatgatctctatcaggctggaaaatctgctttatcattttgtatatttgactattttgtattcagcattacttgactccttatgtgcatggcaatgtattaaaatgtgggatttctattaccgtgtaaa

SEQ ID NO: 32 - DNA, 175 bp, Homo sapiens
  misc_feature (115)..(115): second gene starts at position 115
gccaaggacttgccaacattcaaagacaatgacttcctcaatgaagggcagaagctgcatgtgggagaggagagtaaaaagaacttcctggagaaactgaagcgggacgttgaggggaaagttggggacatgctgctacaatacggctaatctttcattgggaccgaaagcaaag

SEQ ID NO: 33 - DNA, 195 bp, Homo sapiens
  misc_feature (114)..(114): second gene starts at position 114
ctaccaagggcctggtttaaggccctgtatgcttgaatttcataccactgacggccaggtagaagacctctcaattttgaatggtggtcattgtattgtcgttttagttcaacctgcccggtctcatattttccattctgttttggcacctcaaacacaccaactgtctccaacactttgccctctggtcggttt

SEQ ID NO: 34 - DNA, 531 bp, Homo sapiens
  misc_feature (442)..(442): second gene starts at position 442
actactggcgggaggagtaaagatggcggcgcgagggtctccgccctctgctccgggctgaagcgctctgagagaggcggcagcggcaactcgagccccaacagtaatttagtgttggtagttttggcagcagctgccgaggccggagcaatggcggaactggagcacctaggagggaagcgggcagagtcggcgcgaatgcggcgggcagagcagcttcggcgctggcggggctcgctgacagagcaggagcctgcggagcgacgaggcgcggggcggcagccgctgaccaggcgcgggagccccagggtccgcttcgaggacggtgctgtctttctggccgcctgctctagcggggacaccgacgaggtgagaaagcttctggcaagaggtgctgatatcaacacggtcaacgtggacggcttgacagccctgcaccaggcagtcgatgatgtgaagaaaggttacatcaaagcagaagaaaagtcctatcaattacagaagctatacgaacaaagaaaaatggtcatg

SEQ ID NO: 35 - DNA, 383 bp, Homo sapiens
  misc_feature (168)..(168): second gene starts at position 168
gctcaactggagaagctacaggcagagatttcacaagcagctcgaaaaacaggcatccatacttcgactaggcttgccctcattgctcctaagaaggagctaaaggaaggagatattcctgaaattgagtggtgggactcttacataatccccaatggctttgatctgtgatgaagacatatcacatgtacaatgccgacagcatcagtgctcagagcaaactaaaggaggcggagaagcaggaggagaagcaaattggtaaatcggtaaagcaggaggaccggcagaccccacgctcccctgactccacggccaacgttcgcattgaggagaaacatgtccggaggagctcagtgaagaagattgagaagatgaaggagaag

SEQ ID NO: 36 - DNA, 1817 bp, Homo sapiens
  misc_feature (1696)..(1696): second gene starts at position 1696
ctggggccacatggcactgggagacagctgctgatgctgaggccccatgttgttgaggtggatcccactgggggataggagggggcgatgggggagggtgctgctgacccgggtcagatctgagctcgctgggtctcccattcctgtgtcaggaggccccaggtccccatgggagctcagcatggcctgggcctgtctgtcactagagtaggtcttcagctgactgtcctcacgctgctggtgctgggacaggtggctctgctggtagagggggtggctgtagggctgctggggctcctggtagtagtactgggacatggagcccaggggaatcagctggacagtgtgtgcctgctctggggtatactggtgagggtccctgtgataagaaggaggctgcaggtgcatctgttgctgctgctgctcttgcaagtgctgcatcatgggttggggctgataatactgaggtatctgcattgaaccctgccgctgctgcagctgtagctgctgcggctgctgctgctgtggcggcggctgtggctgtgatgggcgaatttgttgcggctgcgtctgtatttcttgcatggagatacgctgttgcccggcttgctgctgttgctgcggtgggtaatactggtgctgctgcatctgttgcatgtgctgtgacagcatctgtggggcctgcagtggctgtcctccctgcactggcacctgagccagaggctgctggtagtcataatacaggtgcccttgggtagggtgctgcccgacctgaagagctggtttggacagcccaccagtgaaaccagggtgaggctgctggggcacctgctggtagcgggaagggatagccggtgctgggggctccatgggcttctgagacagcagctggcggagagcactgtcaggggctccatccatcactgctgactgagtgtgcagcacctgggccatattgttgacctgaattcgcaggttttggttggcaaacacctgggtgaaagagtccagcttgtgtaagacaccgctggtaagcttctgggtccggatctcgctggcctgggagtaggtgtattggtagccatcagtgggctcagcctgggctggtgccccccacatcatgtttgagttggccaggtttccacgtagctggacatggtttccaggccctgcatgacttccccaccctccctgcctcgaggtatccatttggccaaggtttttggagccaacaggcaagcccagaccatcccgtgtatcttgagggaagtggggggagattggcgaggcctgaggggcatccattccgccccctgtaactgcattcccatagttgtggttcagcccgctgtggacgccaagtggtggctgttggtagaaaaggttctcactaccatgggccacatggttggtcttgtacagttgctggtcacccatgctgtctgccttggttgtgaacgtccagccacaaaaccataaaaaaggtaaataaaacaaacccaaaaggactgaaaccctgagaagctgagagaaaagtgtcagcactactccacggctgacatgtctgtgaacgtggctggagccaggtgttcctgttggcctgtaccactcatgtgcagggcggggggtttcacatcctctccctggctgaggtatagaccacacagcactgtggtgaggagacgtcgctcacaccttgcaaatttgtgctgactcaatacaagtacattgcctcggatttctgctacaattttgcttttatcctcaggacgaccgtgctccagtacatgttggattacataatttccatattgatc

SEQ ID NO: 37 - DNA, 175 bp, Homo sapiens
  misc_feature (81)..(81): second gene starts at position 81
gatacaggtgtaggtaaatcgagtattgtgtggcggtttgtggaagacagttttgatccaaacatcaacccaacaatagggcttttggaaatgccaagacagcccacaacaacaactccagccggtttgggaaattcatccaagtcagctacctagagagtggcatcgtgagagg

SEQ ID NO: 38 - DNA, 273 bp, Homo sapiens
  misc_feature (225)..(225): second gene starts at position 225
acttccgctcggggcggcggcggtggcggaagtgggagcgggcctggagtcttggccataaagcctgaggcggcggcagcggcggagttggcggcttggagagctcgggagagttccctggaaccagaacttggaccttctcgcttctgtcctccgtttagtctcctcctcggcgggagccctcgcgacgcgcccggcccggagcccccagcgcagcggccgcgagtgatgacagacctaatgctctattaagttcacctgcaacagaaacag

SEQ ID NO: 39 - DNA, 241 bp, Homo sapiens
  misc_feature (146)..(146): second gene starts at position 146
gaggacgttgctgtggctgctgcagtcttggagtccctgctcaagctggccctgctggccggcctgaccatcactgtttttggctttgcctattctcagctggctctggatatctacggagggaccatgcttagctcaggatccggtgtgagtcatcctgttctaaagcaagttgctgaacagtttctcaacatgaggggtgggcttggtttatctggtgcaaaggccaactaccgtggag

SEQ ID NO: 40 - DNA, 408 bp, Homo sapiens
  misc_feature (316)..(316): second gene starts at position 316
gctgtcgccttggattgaaggccattgatttgtatgtatttgtcccagcgctggaggctgccccagccgccgcgccggtgccgccgctgccagtggagttgcctccccgcttccctagggtggttcggctccaccaaacatgtcggctcctgtcgggccccggggccgcctggctcccatcccggcggcctctcagccgcctctgcagcccgagatgcctgacctcagccacctcacggaggaggagaggaaaatcatcctggccgtcatggataggcagaagaaagaagaggagaaggagcagtccgtgctcaatgttctttcagaggaccaagacagttacctgtgtaatgtcaccttgtttaggaaggcagttgatgacttcagacacaaagccagagaaaacaa

SEQ ID NO: 41 - DNA, 196 bp, Homo sapiens
  misc_feature (94)..(94): second gene starts at position 94
gagaacaaggggtctgtggaaatcatgagaaaggacttgaatgacgcccgggacctgcatggccaggcagagtcagcagctgcagtgtggaagtcccaccacggttcgtgaacaaggtccgggcctcaccctttgtggagggagaggacgcccagttcacctgcaccatcgaaggcgccccgtacccgcagatcag

SEQ ID NO: 42 - DNA, 1316 bp, Homo sapiens
  misc_feature (59)..(59): second gene starts at position 59
gaggagaactatttatgcagttagaaagagagggaatatttatggaagacactgcctgaaaatcagaaagtgcagttgacagaagggtcacgttcacactacaatatcaattgcaactcaacaaggactccagtcgccaaggagcttaattataatctagacactcatacgtctactgggaggatcaaggcagctgagaagaaggaagcgtgtaatgtagaaagcaacagaaaaaaggaaacggaacttcttggctctttttctaaaaatgaatcagttcccgaagttgaagccctgctggcaagattacgagctttataagttaaactggtttttaaaaaaaatgattaagccaaatataaagccatgctctaaactataacacttgaaaaaattgcttttatgtaagtgactttatatagttttaaattatgatatatattagaaaaataaagctaaatatatgattgcaatgctttttctatgtactggaggttttggtttattcaagattgtaccgggctttaatccttttttttttttttttgtctcctggtattcctcagttctttatttggtggttaaattatacatattgctttagagagcaggtaggtggccatgtgttcagcagtgtgtccttaagaaaataccatctttctaagccactggaatttttactttactatttttaacattaatggatgtcaggtcatcaacctcaagtctttacatatccatgtatattccatatatattgtttatataggcccaagtttctccttaattgggatctatatactaccagcacaacatcaaaaacatgtaattgaatacatcagagctatatatgtaaggaaatgactggtgaccccattatcatcattgttgaattcatgttaagtagaccctctaggggaccataaggcaattgagcacataacgaaaaatgatgcaataagaatgtatgcactctctttgccaaatgcatgtgcttttgtgtaacgtggatgtaaacagaattgcagtgctgccgaaattcttgatcttggctaagagagtatttttccccttgtaattatgactctgagataaaattgccattttgaaatttccaaagtaacaactttttttattttatgaataaacttgggattgcaatttctctgatctgacaatcaataactttaacaaagatctaaataagtgtttcaaggaaagttttcctaagcaaatgtaatattacctcatttgggcatcattactctgttaattctatatcaaaggaaataaacttgctacttgcactaaatgaa

SEQ ID NO: 43 - DNA, 295 bp, Homo sapiens
  misc_feature (52)..(52): second gene starts at position 52
ctgggctagctggtcctcagccaagaccgtccctcgctccttatacttggccccctcctccagctcatcctcagagcccgcgtcctctggctggtccaggtctatgtcaaacactcctgccatgtcctcagcttccctgtctcggaagtccggggctgggtaaaagccgtcccgcctccttcgtcgcctcatgggcccggacccgccgcagccaccacagccgctgccgccatcaccggctgcttaggctcagtgcgtctgcgcctaggccttagactggctcctaaagttcagc

SEQ ID NO: 44 - DNA, 358 bp, Homo sapiens
  misc_feature (216)..(216): second gene starts at position 216
cacctcagcgggaagcggagacgcaagcagctggatctccggtaactgagacatagggtataactgttgtcgcggcggaggaagtgaggacggcgccaagggccttccgggccagtgttggatccctgtagtttgtgaagatggtgttgctaacaatgatcgcccgagtggcggacgggctcccgctggccgcctcgatgcaggaggacgaacagctctaaagtctttctggaaattgacaaccgccagtgtgttcaagactcagaccactgcttcaagaacacggatgcagcagcagctctcctggcctctcacgccatacaggggaccctgtcataccctcttgtgtctgtcgtca

SEQ ID NO: 45 - DNA, 183 bp, Homo sapiens
  misc_feature (133)..(133): second gene starts at position 133
gacccagagatgcagtgcctgctgctctcagatgggaagggctccatccacccgaaccacgtcgtcattctccccggggacggtgggagtggcacggccgccatcagcttcacaggggccttgaaaattccagtgtcggcacatctgaagcttcaggagaaggatgaaggcagaagggaaatg

SEQ ID NO: 46 - DNA, 125 bp, Homo sapiens
  misc_feature (64)..(64): second gene starts at position 64
agtaaagaagtcggccagcagctccaagatgatttgatgaaggtcctgaacgagctctactcgatgatgaggagtctgatgaggaagctgtgaagaaaaccaacaaatgtgtactagtctgggag

SEQ ID NO: 47 - DNA, 273 bp, Homo sapiens
  misc_feature (153)..(153): second gene starts at position 153
gaacgcaagtcccgcttcgctctcgggggcggactcagcggcggaagtggcgctgccggaagatcttcttccgctctgaggcgctactgaggccgcggagccggactgcggttggggcgggaagagccggggccgtggctgacatggagcagctccagatgaagatgagtgagcgggccgcctcgctgagcaccatggtgcccctgcctcgcagcgcctactggcagcacatcacacggcagcacagcacgggacagctctaccgcttgcaag

SEQ ID NO: 48 - DNA, 257 bp, Homo sapiens
  misc_feature (123)..(123): second gene starts at position 123
gaagaggatttgacaacttgacttctgtccatcttgcacggcatactcccacaggaacactggtaactataaaaattacaaatctggaaaactgcaatgaagaacgcctgaaagctttacagatttctcgaatgctggcagccaaaaccgttttggctatccgttatgatgcttttggtgaggattcaagttctgcaatgggagttgagaacagagccaaattagaggccaggttgagaactttggaagacagaggg

SEQ ID NO: 49 - DNA, 6644 bp, Homo sapiens
  misc_feature (76)..(76): second gene starts at position 76
gagaagaatggcaacatttcttttattcaaattttattggaagtttacaaatgtattacagacatcagtaaaacatcatatccattttacagggcacggatctcaagcaaagtgttcagaacagtctctggcagagcccacaccaaaggcctgttgcagaccttcttaacaaatagcttgacactcaacacagaacacagactctggcctgcctcaccttcccaggccctttgaggttttgtttatgcacttgaaatgaaagcaggagatggacaaagcaatcctgtggaggaaagaatgagtttaggagaggaaaacctgccgaagtcctaatttgctaaaaaaaaattaattaaaaaatggaggactcatagtccttacaatgttaagtcagggtctatgacagaatcatgacactttatggaaagatatgaaaatcaactaggtaggtttaagaacagaccttactggtaagtaactctctctgaaaaatttagaaaagcttggtcagtgacctgttgaatatcaatggccaaatgccaagcagagtgaagggatatctcagagaactctcagaatagaacaagcagatttttctctatcctatggattcatcgtattcaaaacacaggaatgttttcctaacactatgtgactttcccctcctttatatttccttgaggaaagctagttttgtcagcaggaagtaagcttataaaatagtatggctcccaatagtgagtcatattttatgggagtcttgtgttgactaggctactattatgagaaaatggaaaaagaatccaattttttcttgatctttactttgaggactacttccaaatggtcataagaataagctctggtatctgctgaggcaccagagggacaaaccactggagacaaggcaaaggccatttctacttctcttgtgcttaaagaaatgtacctcaaaaggtggcgatctgaaactgccttcaacaattggcagtggaggcttggctactgagtcttgcatatgcaaatgctgtctgcagagcccattttaaagccctgaaggtgcaaaacagttgctaatagcaactgtcctggcatgaagtattcagataactggttcagttttccactttcctttgtcatggacggatcttccttcttaggcttaagcatctgttttctgctagaaatacacaaagaacacttctccttggaatttaaatatttatttattttttgttagaaggtgggattacatgaagaataagatgaagtcttacctcacctctgcaaaatgaagactgcctatagtaattggcagagaacatgaaaatggccaaggaggtaaagagatttttttgtcctttagcctaagaagtcagcttcctcgagcctccacaacctgggatgggggaggggcaggtgaattggagtctccgaattacttatacatattggttcctaaatgttcgtaattatgcttcctaaactgtttttgttctacggcaagagaaccaagagtggaaagacagatatgaatcagttcacaaataagattggttatcagaccaataagatcagttctgatcaactggtcctggctggttggagtgttgcaaagatctgtgaggctgcatccacattctcagcaagagtatacagtgatgcattggttgtatctgctcagcttgcagggagcgcagagcacatgctacatatatgtcatcacaggcctcacctgaattgaacaatagctagtagtacccaagaagcagaaagctgctgcagaaggaagaaaacataatcttgttatagtgcaggaacatcctacaggaaatgaggattagaaagcactacttccagatcctgtattagaaacacaaaattgctcatttgctcgactggttgggggtagaaaggaaggaataaaaaataaaaggtgaaagtggaaagaaggtgtcaaacaacccacaccaggacttcttccttggatgtatgaaaaaccaggaagcatggttctgatctcccttacctcattcaccttcacacttggtagagatcccacaactatatgacagaaggaaagcgccctgaataccatcctcaatgccacctggctgccaagaagccttttcacagtaccaagggtggtatggattggcagagccactcaggaaactgtcaatgacttatacttcctgggtctgggaacaagccagctatgttgctactgaattgagcagcaataggaaatgaactcaactccgaagttgcagttctaaccaaaagacaagaagatcaatattaggagaggtgggaaaaataacaaccagggcattggagaagagagaacgctggaaaaagattactattctggaaatcagtctcttgaagatggaattatgatctaagaggaagtgagtacaggccctactcacaggaggagcttgtccaataagagttaatggttgtgatggaggaattaggtgaggaccttaagttcttgcctcaggaaataatgcattgggagtgggattctgggatgtgatgtgtgagctatcactagcaggcagaattccaaatacagtgatgtccttctcctcaatagggcattcgcttgggggttctgccatcattgtaaggaattggccttcctcattcagcattctctgtaaggttgcatttggggtcagaagaaatctgcaatggtagaattgagggaggtaatcttgctagtagacagttttaccctgaagcttgtatgtcatttcatctcaagctctgagcagttcagtgcctggatgctctctgggcatctagacttatgcctccagacccctccgggcactggccatgtgtcagtttttaggccaccttctttctgatgatggtggttgaagctttctttgagaaaggtaagaggtattctgagaaaaacagagttaggaagcaacttttactgggagaatttctttcactggatttggggccacagaggacagacatattttcaaccgtttgctaagataagtgatctacttttccccctctctttttccaaaattgcctttttagtttcatcaatcaaggaacttaaaactccaaattggactcgcacaatttctaccagaaacctgccactttagtagcacggtattgcaaattatttcttaatcagtttgccaagcagtttacaaacttactatacaaacgtaatagagttaattctccggaggctcggataattaatgaagcatttagatatgaagatagcatgcggaaaacagccacaaccaacatgtgcattgcttttttaaaaaaatcagtgacaatgacaaatgtcatattaatacctgaaaagcaaattattttaatacatcccgaatggagtgccattaccatgtcctttacagccttcctttcctcagacccatctgggacggggtctgaaatgccacttttgacattctctccataaaaaatactagaaaatgttaactactatactgaaaagagatcacgctcacctcaccatggcagatggccactgagatacaccgggcactacatcgacagtacatctcactacaggtgggtcatccgatggattatttcaactgccacaatccattaaggggaggaggaggatggaagaaaccaagtgcttcatttttaactgaagcaaggtagggagttttattttactataaacagcacaaccgttaaatgtcttcattaagcaaactcacttttgagcccattttctgaccaacagtcctcaaagttcaaaatggaaataccctcccaacaaagcctgtttttttaaagacattgcaccactgaaatctcagcagctcaaccttcctgggtaatccagatactctggttactaagctggttacactggactctttctacaatctctgggagctcttcgaggtggttgtcacctgtcctctgtttcatttccagttcttcttttccctgacctgccttcagattctcctttaacttctacccttgacctgccttctgttttcaaatagccttgttccttctccaggcatgacatgtcacacaccgtccctcgcagagccccctcagaatccttctgtccctcaatcccaaatgcttaagttcatttgctttgaggacaaccggttgtcaggctaaggcagcagttctgtctgccttggtaaaggaaagcagataatacaatccaggaaacatgagcaccagaacataatgccacattcaaaacaacgtcatgctgacatcacacaatggcaccactcacagtcacttttactttccccaagggatagatcaacattaagtaacttcaacattcccagcagggatggcatttctcacagaattttactgacaccggttggtttctctaattggcaaaaattacatttgcaatttaaaaaaaaattactaccactttgtagaaaataaattctactgagggtgggagcagacttaaggatggctccttaagatggaacggagcataaaatgctttgggtctaacagttatgttttttcagccacaaaaagccaaattgaatatgttcctttgaaaaaggtctcactgacatgtaacaaatttgtatagaaaaaaaaaaaaaaaaaaaaaaggtggtaccgggccacatttcaatactactcagagacaatggtggatgtgcatgcaagtccccactgagtcctacgatatagaaattcctttgatattacaaaatacaaaaatattttatcagaactctcatttacattgcatttacaatggacatgtaaataacttagtcttgggtcctggctaataaacaaattacttactgaaaaaagggtcctaaaagtaagagaaccagagaggataaaagcgagcaggaaacaatttaccatcttgagagatggcaactcaacacagaactgatgggaaggaagtgaccaagcctggcctcgatagagtctactgtgtttccaaagtgaaatgtgcaaataatattcaacatgccaagaactgtgactacctattgagtcaacctgtaaccttgcctccatctactgacagcattttcccttttctcccccataagccacccccaaaagcgctttaacatttaaaacagtgcaagtttctgactttacattcttagctcccatcttctcccattccctgatcccaatcatattaagaaatgatacagtttttgctcttctgtcttttcctgctgtgcaactgtcctctgccacctaatgtggaagatttggggaggccgtaggagctgtatttgtgcagcagctcatcgcttgtgacgtatcgcaggcgcgctggctgggggatgggttctcctaggaaatagccctcgttgtcagactctgaagaggaggagcaggtggaacaccaatcatactcggcgaagtagggtccccagcggtccccaaaggcattctgcaaagccaggtccgacacagtcctagggcactggccgtacaggtccctccgggacccatgccccatgctctcctggaagctccgctggcgcataaattggtcatagtcctccctggctctcagagggggcctatcttttaaccgggagatggcctcgcgttcgctggccaggtggagggcgttgtcggagcgagagcgtcgggaacgcctggacctgtgaggtcggaaacggcggttgtcgtcgcgtgaagtagctcttctccgggtgcgttcactcatgggctggatcctcacgccctcctgccctggcagcttgctgcccgccatccctccatcaaaatcaaagctctgatgcatccttccgtgggactgcaggtctctgtagccaatggggttgctgagctggtggaggtttccctccatctcctggtactgctgggcagagagcaggctgcgaactgactctgcgctccggaactgcatggacgagttaagagtgcccatgttgctcagcttctcagacacattcattccagagtctttgctgaggtcaggcatggaaaatcgggataggtgctcctggcgcttggcaccaccatcagcagagaggctcgacacactctcgctcctgctcgccctcggcggagagttgaaacagatgtgggattcgcccaggagctggaaacgagggagggaagcgagccagagccttgtgtgcacgtgtgtgtgcgtaacacacaaaccagggggcatcgctaataaatcaaatatcgtgataaattcaggagggccatcgatcaggtccacttggctggaaacgacgtgaatctgcctcttttccgctttcttcttctcctctctcggagctggagggagccaaatgttccgcggggagtgcgacagccccggccgggcgctcccctcgtaatgacacgttaataaatgttttcttttatctgctttcacaggactcgccccggtctgcaaacactcgactgcctttgccgaaagcctcgcgctcgcctccagccacacacatttgccattggagaggccggcgccggccgcgacccgcagctcaatcgcagggcaaaccgagctgcctgtgcgcgcccgagaactccccgagaaattaacttcggctcaagtgaaaatagcagctgttgtccagaaatggccc

SEQ ID NO: 50 - DNA, 144 bp, Homo sapiens
  misc_feature (91)..(91): second gene starts at position 91
ctgttcctgtgactccaattctttgtgttgtaattttttctctgcacatcgcacctgattagaacggttttctaattcatcttgtaaaaccttggggcaggcgaccagtgactgacaccgcatatacacctggcttaaagttac

SEQ ID NO: 51 - DNA, 342 bp, Homo sapiens
  misc_feature (192)..(192): second gene starts at position 192
ctcagcacccagggtgacgagggtctcaatgaggacggccgtctccacggtcatgtgcaggcagccagcgatgcgggcgcccttcagtggcttggaggccgagtaccgctcccgcatacgcatcaggcccggcatctcgttctcagcaatgtccagggccttgcgtccccaggcagccaggccgatgtcggccagtggaaagactcccggatcaagggagaaagttacgcaggcttccgatcctgatccgccatcagccgccgaacctcttccgccactaccgcctacccccaaagaccggctacacctcccctcccagccgacagtaggccttgcgtcact

SEQ ID NO: 52 - DNA, 183 bp, Homo sapiens
  misc_feature (87)..(87): second gene starts at position 87
ccacttaggagcattattttccttcagcttttccttaaaatactcaattactttcttctcccagtcaggattaactccattttgggctctgttatcattttacagcttttacagggtccaatctgactgaacaactgaagtataaggacttctgtcacatctctggaaaggttacctacgtat

SEQ ID NO: 53 - DNA, 4041 bp, Homo sapiens
  misc_feature (98)..(98): second gene starts at position 98
gaggaggaagatgacgactcctccacagcctcagacagcgatgttctcatccgggacaactacgagcgggcagagaagcggcccatcctgtctgtgccatgtcctcctcacattcttccaccagagaagaggccccctgagccccccggacctccaccgccgccacctccaccccctctggttgaaggcgatctttccagcgccccccaggagttgaacccagccgtgacagccgccttgctgcaacttttatcccagcctgaagcagagcctcctggccacctgccacatgagcaccaggccttgagaccaatggagtactccacccgaccccgtccaaacaggacttatggaaacactgatgggcctgaaacagggttcagtgccattgacactgatgaacgaaactctggtccagccttgacagaatccttggtccagaccctggtgaagaacaggaccttctcaggctctctgagccaccttggggagtccagcagttaccagggcacagggtcagtgcagtttccaggggaccaggacctccgttttgccagggtccccttagcgttacacccggtggtcgggcaaccattcctgaaggctgagggaagcagcaattctgtggtacatgcagagaccaaattgcaaaactatggggagctggggccaggaaccactggggccagcagctcaggagcaggccttcactgggggggcccaactcagtcttctgcttatggaaaactctatcgggggcctacaagagtcccaccaagagggggaagagggagaggagttccttactaacccagagacttcagtgtcctgaaagattcctttcctatccatccttccatccagttctctgaatctttaatgaaatcatttgccagagcgaggtaatcatctgcatttggctactgcaaagctgtccgttgtattccttgctcacttgctactagcaggcgacttacgaaataatgatgttggcaccagttccccctggatgggctatagccagaacatttacttcaactctaccttagtagatacaagtagagaatatggagaggatcattacattgaaaagtaaatgttttattagttcattgcctgcacttactgatcggaagagagaaagaacagtttcagtattgagatggctcaggagaggctctttgatttttaaagttttggggtgggggattgtgtgtggtttctttcttttgaattttaatttaggtgttttgggtttttttcctttaaagagaatagtgttcacaaaatttgagctgctctttggcttttgctataagggaaacagagtggcctggctgatttgaataaatgtttctttcctctccaccatctcacattttgcttttaagtgaacactttttccccattgagcatcttgaacatactttttttccaaataaattactcatccttaaagtttactccactttgacaaaagatacgcccttctccctgcacataaagcaggttgtagaacgtggcattcttgggcaagtaggtagactttacccagtctctttccttttttgctgatgtgtgctctctctctctctttctctctctctctctctctctctctctctctctctctctctgtctcgcttgctcgctctcgctgtttctctctctttgaggcatttgtttggaaaaaatcgttgagatgcccaagaacctgggataattctttactttttttgaaataaaggaaaggaaattcagactcttacattgttctctgtaactcttcaattctaaaatgttttgttttttaaaccatgttctgatggggaagttgatttgtaagtgtggacagcttggacattgctgctgagctgtggttagagatgatgcctccattcctagagggctaataacagcatttagcatattgtttacacatatatttttatgtcaaaaaaaaaacaaaaacctttcaaacagagcattgtgatattgtcaaagagaaaaacaaatcctgaagatacatggaaatgtaacctagtttagggtgggtatttttctgaagatacatcaatacctgaccttttttaaaaaaataattttaaaacagcatactgtgaggaagaacagtattgacatacccacatcccagcatgtgtaccctgccagttcttttagggatttttcctccaaagagatttggatttggttttggtaaaaggggttaaattgtgcttccaggcaagaactttgccttatcataaacaggaaatgaaaaagggaagggctgtcaggatgggataatttgggaggcttctcattctggcttctatttctatgtgagtaccagcatatagagtgttttaaaaacagatacatgtcatataatttatctgcacagacttagaccttcaggaaacataggttaagcccccttttacaaagaaaaagtaaacatacttcagcatcttggagggtagttttcaaaactcaagtttcatgtttcaatgccaagttcttattttaaaaaataaaatctacttataagagaaaggtgcattacttaaaaaaaaaaaactttaaagaaatgaaagaagaaccctcttcagatacttacttgaagactgttttcccctgttaatgagatatagctagatatcggtgtgtgtatttctttattattctctggtttttgatctggccttgcctccagggccaaacactgatttagaaagagagccttctagctattttggcattgatggctttttataccagtgtgtccagttagatttactaggcttactgacatgctattggtaaatcgcattaaagttcatctgaaccttctgtctgttgacttcttagtcctcagacatgggcctttgtgttttagaatatttgaatttgagttattgggccccactccctgttttttattaaagaacgtgagcctgggatactttcagaagtatctgttcaatgaaaaaaagttggtttcccatcaaatatgaataaaattctctatatatttcattgtattttggttatcagcagtcatcaataatgtttttccctcccctctcccacctcttatttttaattatgccaaatatcctaaataatatacttaagcctccattccctcatccctactagggaagggggtgagtgtatgtgtgagtgtatgtgtatgtatgatcccatctcacccccacccccattttgggagtcttttaaaatgaaaacaaagtttggtagttttgactatttctaaaagcagaggagaaaaaaaaacttatttaaatatcctggaatctgtatggaggaagaaaaggtatttgttaatttttcagttacgttatctataaacatgatggaagtaaaggtttggcagaatttcaccttgactatttgaaaattacagacccaattaattccattcaaaagtggttttcgttttgttttaattattgtacaatgagagatattgtctattaaatacattattttgaacagatgagaaatctgattctgttcatgagtgggaggcaaaactggtttgaccgtgatcatttttgtggttttgaaaacaaatatacttgacccagtttccttagttttttcttcaactgtccataggaacgataagtatttgaaagcaacatcaaatctatacgtttaaagcagggcagttagcacaaatttgcaagtagaacttctattagcttatgccatagacatcacccaaccacttgtatgtgtgtgtgtatatataatatgcatatatagttaccgtgctaaaatggttaccagcaggttttgagagagaatgctgcatcagaaaagtgtcagttgccacctcattctccctgatttaggttcctgacactgattcctttctctctcgtttttgacccccattgggtgtatcttgtctatgtacagatattttgtaatatattaaatttttttctttcagtttataaaaatggaaagtggagattggaaaattaaatatttcctgttactatacca

SEQ ID NO: 54 - DNA, 4014 bp, Homo sapiens
  misc_feature (98)..(98): second gene starts at position 98
gaggaggaagatgacgactcctccacagcctcagacagcgatgttctcatccgggacaactacgagcgggcagagaagcggcccatcctgtctgtgcagaagaggccccctgagccccccggacctccaccgccgccacctccaccccctctggttgaaggcgatctttccagcgccccccaggagttgaacccagccgtgacagccgccttgctgcaacttttatcccagcctgaagcagagcctcctggccacctgccacatgagcaccaggccttgagaccaatggagtactccacccgaccccgtccaaacaggacttatggaaacactgatgggcctgaaacagggttcagtgccattgacactgatgaacgaaactctggtccagccttgacagaatccttggtccagaccctggtgaagaacaggaccttctcaggctctctgagccaccttggggagtccagcagttaccagggcacagggtcagtgcagtttccaggggaccaggacctccgttttgccagggtccccttagcgttacacccggtggtcgggcaaccattcctgaaggctgagggaagcagcaattctgtggtacatgcagagaccaaattgcaaaactatggggagctggggccaggaaccactggggccagcagctcaggagcaggccttcactgggggggcccaactcagtcttctgcttatggaaaactctatcgggggcctacaagagtcccaccaagagggggaagagggagaggagttccttactaacccagagacttcagtgtcctgaaagattcctttcctatccatccttccatccagttctctgaatctttaatgaaatcatttgccagagcgaggtaatcatctgcatttggctactgcaaagctgtccgttgtattccttgctcacttgctactagcaggcgacttacgaaataatgatgttggcaccagttccccctggatgggctatagccagaacatttacttcaactctaccttagtagatacaagtagagaatatggagaggatcattacattgaaaagtaaatgttttattagttcattgcctgcacttactgatcggaagagagaaagaacagtttcagtattgagatggctcaggagaggctctttgatttttaaagttttggggtgggggattgtgtgtggtttctttcttttgaattttaatttaggtgttttgggtttttttcctttaaagagaatagtgttcacaaaatttgagctgctctttggcttttgctataagggaaacagagtggcctggctgatttgaataaatgtttctttcctctccaccatctcacattttgcttttaagtgaacactttttccccattgagcatcttgaacatactttttttccaaataaattactcatccttaaagtttactccactttgacaaaagatacgcccttctccctgcacataaagcaggttgtagaacgtggcattcttgggcaagtaggtagactttacccagtctctttccttttttgctgatgtgtgctctctctctctctttctctctctctctctctctctctctctctctctctctctctgtctcgcttgctcgctctcgctgtttctctctctttgaggcatttgtttggaaaaaatcgttgagatgcccaagaacctgggataattctttactttttttgaaataaaggaaaggaaattcagactcttacattgttctctgtaactcttcaattctaaaatgttttgttttttaaaccatgttctgatggggaagttgatttgtaagtgtggacagcttggacattgctgctgagctgtggttagagatgatgcctccattcctagagggctaataacagcatttagcatattgtttacacatatatttttatgtcaaaaaaaaaacaaaaacctttcaaacagagcattgtgatattgtcaaagagaaaaacaaatcctgaagatacatggaaatgtaacctagtttagggtgggtatttttctgaagatacatcaatacctgaccttttttaaaaaaataattttaaaacagcatactgtgaggaagaacagtattgacatacccacatcccagcatgtgtaccctgccagttcttttagggatttttcctccaaagagatttggatttggttttggtaaaaggggttaaattgtgcttccaggcaagaactttgccttatcataaacaggaaatgaaaaagggaagggctgtcaggatgggataatttgggaggcttctcattctggcttctatttctatgtgagtaccagcatatagagtgttttaaaaacagatacatgtcatataatttatctgcacagacttagaccttcaggaaacataggttaagcccccttttacaaagaaaaagtaaacatacttcagcatcttggagggtagttttcaaaactcaagtttcatgtttcaatgccaagttcttattttaaaaaataaaatctacttataagagaaaggtgcattacttaaaaaaaaaaaactttaaagaaatgaaagaagaaccctcttcagatacttacttgaagactgttttcccctgttaatgagatatagctagatatcggtgtgtgtatttctttattattctctggtttttgatctggccttgcctccagggccaaacactgatttagaaagagagccttctagctattttggcattgatggctttttataccagtgtgtccagttagatttactaggcttactgacatgctattggtaaatcgcattaaagttcatctgaaccttctgtctgttgacttcttagtcctcagacatgggcctttgtgttttagaatatttgaatttgagttattgggccccactccctgttttttattaaagaacgtgagcctgggatactttcagaagtatctgttcaatgaaaaaaagttggtttcccatcaaatatgaataaaattctctatatatttcattgtattttggttatcagcagtcatcaataatgtttttccctcccctctcccacctcttatttttaattatgccaaatatcctaaataatatacttaagcctccattccctcatccctactagggaagggggtgagtgtatgtgtgagtgtatgtgtatgtatgatcccatctcacccccacccccattttgggagtcttttaaaatgaaaacaaagtttggtagttttgactatttctaaaagcagaggagaaaaaaaaacttatttaaatatcctggaatctgtatggaggaagaaaaggtatttgttaatttttcagttacgttatctataaacatgatggaagtaaaggtttggcagaatttcaccttgactatttgaaaattacagacccaattaattccattcaaaagtggttttcgttttgttttaattattgtacaatgagagatattgtctattaaatacattattttgaacagatgagaaatctgattctgttcatgagtgggaggcaaaactggtttgaccgtgatcatttttgtggttttgaaaacaaatatacttgacccagtttccttagttttttcttcaactgtccataggaacgataagtatttgaaagcaacatcaaatctatacgtttaaagcagggcagttagcacaaatttgcaagtagaacttctattagcttatgccatagacatcacccaaccacttgtatgtgtgtgtgtatatataatatgcatatatagttaccgtgctaaaatggttaccagcaggttttgagagagaatgctgcatcagaaaagtgtcagttgccacctcattctccctgatttaggttcctgacactgattcctttctctctcgtttttgacccccattgggtgtatcttgtctatgtacagatattttgtaatatattaaatttttttctttcagtttataaaaatggaaagtggagattggaaaattaaatatttcctgttactatacca

SEQ ID NO: 55 - DNA, 303 bp, Homo sapiens
  misc_feature (130)..(130): second gene starts at position 130
ttcactgagacttttttgacggagagggacaaacaatccaagtggagtggaattcctcagctgctcctcaagctgcacaccaccagccacctccacagtgactttgttgagtgtcaaaacatcctcaagactctggccatctatgaccggtttggccggttgatgtatggacaggaagatgtacccaaggatgtcctggagtatgttgtattcgaaaagcagttgacaaacccctatggaagctggagaatgcataccaagatcgttcccccatgggcaccccctaagcagcccatccttaag

SEQ ID NO: 56 - DNA, 246 bp, Homo sapiens
  misc_feature (152)..(152): second gene starts at position 152
aagaaaaagtagagtccccaggataaacctgcaccccatatatttggggttactccttgataaagtccccgtagtccatcaagtttccaaatggtagtcaagcaatgtaaaattccattatatttcggtctcagttccaatccatcactcactgtcattgagctggtcctcggtgcccggcagcgggtgaaccacgaaatggatggacgtcatggtgctttccttctcgtcctccactcgagggcg

SEQ ID NO: 57 - DNA, 365 bp, Homo sapiens
  misc_feature (172)..(172): second gene starts at position 172
ggggacggtgggagcagatccatttccgggttggcaaaaggggcggtggcggcggcggcggcggcggcggcggcggcgacggcgagaaagagcttgccggggggcgagcaggacaggacgaagccggagtgtaggcggcagaggattcgctcccagagcagctgcggccaggtggcaaagcaaagctatattcaagaccacatgcaaagctactccctgagcaaagagtcacagataaaacgggggcaccagtagaatggccaggacaaacgcagtgcagcacagagactcagaccctggcagccatgcctgcgcaggcagtgatgagagtgacatgtactgttgtggacatgcacaaaagtgag

SEQ ID NO: 58 - DNA, 323 bp, Homo sapiens
  misc_feature (172)..(172): second gene starts at position 172
ggggacggtgggagcagatccatttccgggttggcaaaaggggcggtggcggcggcggcggcggcggcggcggcggcgacggcgagaaagagcttgccggggggcgagcaggacaggacgaagccggagtgtaggcggcagaggattcgctcccagagcagctgcggccagtgtgcaccggcacagacatgaagctgcggctccctgccagtcccgagacccacctggacatgctccgccacctctaccagggctgccaggtggtgcagggaaacctggaactcacctacctgcccaccaatgccagcctgtccttcctgcag

SEQ ID NO: 59 - DNA, 408 bp, Homo sapiens
  misc_feature (241)..(241): second gene starts at position 241
agctgaccatggcggagatgcggcagagcctggagcaggagcgggaccggctcatcgccgaggtgaagaagcagctggagttggagaagcagcaggcggtggatgagaccaagaagaagcagtggtgcgccaactgcaagaaggaggccatcttttactgctgttggaacactagctactgtgactacccctgccagcaagcccactggcctgagcacatgaagtcctgcacccagtcaggagaaggagcgctcctggcaccagcaggagctggcaaaggctctggagagcttagaaagggaaaaaatggagctggaaatgaggctaaaggagcagcagacagaaatggaggccatccaggcccagagggaagaagaacggacccaggcagagagtgccctatgccag

SEQ ID NO: 60 - DNA, 375 bp, Homo sapiens
  misc_feature (241)..(241): second gene starts at position 241
agctgaccatggcggagatgcggcagagcctggagcaggagcgggaccggctcatcgccgaggtgaagaagcagctggagttggagaagcagcaggcggtggatgagaccaagaagaagcagtggtgcgccaactgcaagaaggaggccatcttttactgctgttggaacactagctactgtgactacccctgccagcaagcccactggcctgagcacatgaagtcctgcacccagtcagatgcagctggaaacagagaaggagagagtatccctcctggagacactgctgcagacgcagaaggagctagcagatgccagccaacaactggaacgactgaggcaggacatgaaagtccagaaattaaaggagcag

SEQ ID NO: 61 - DNA, 9039 bp, Homo sapiens
  misc_feature (139)..(139): second gene starts at position 139
atgtggtggtctactctgatgtcaatcttgagggctaggtctttctggaagtggatatctactcagacagtaagaattataagagctgtaagagctcattttggaggaataatggatgaaccatctcccttggcccaacctctggagctgaaccagcactctcgattcataataggttctgtgtctgaagataactcagaggatgagatcagcaacctggtgaagttggacctactggaggagaaggagggctccttgtcacctgcttctgttggctcagatacactctctgatttggggatctctagcctacaggatggcttggccttgcacataaggtccagcatgtctggcttgcacctagtaaagcagggccgagacagaaagaaaatagattctcaacgagatttcactgtggcttctccagcagaatttgttactcgctttgggggaaataaagtgattgagaaggttcttattgctaacaatggcattgcagcagtgaaatgcatgcggtctatccgtaggtggtcttatgaaatgtttcgaaatgaacgtgcaattagattcgttgtcatggtcacacctgaagaccttaaagccaatgcagaatacattaagatggcagatcactatgtgccagtgcctggaggaccaaacaacaacaactatgcaaatgtggaattaattcttgatattgctaaaaggatcccagtacaagcagtgtgggctggctggggtcatgcttctgagaatcccaaactaccggaacttctcttgaaaaatggcattgccttcatgggtcctccaagccaggccatgtgggctttaggggataagattgcatcttccatagtggctcaaactgcaggtatcccaactcttccctggagcggcagtggtcttcgtgtggactggcaggaaaatgatttttcaaaacgtatcttaaatgttccccaggagctatatgaaaaaggttatgtgaaagatgtggatgatgggctacaggcagctgaggaagttggatatccagtaatgatcaaggcctcagagggaggaggagggaagggaattagaaaagtcaacaatgcagatgacttccctaatctcttcagacaggttcaagctgaagttcctggatctcccatatttgtgatgagactagccaaacaatctcgtcatctggaggtgcagatcttagcggaccaatatggcaatgctatctctttgtttggtcgtgattgctctgtacaacgcaggcatcagaagattattgaagaagcacctgctactattgctactccagcagtatttgaacacatggaacagtgtgcggtgaaacttgccaaaatggtgggttatgtgagtgctgggactgtggaatacctgtacagccaggatggcagcttctactttctggaattgaatcctcggctgcaggtagagcacccttgtacagagatggtggctgatgtcaatctccctgcagcacagctccagattgccatggggattcctctatatagaatcaaggatatccgtatgatgtatggggtatctccctggggtgattctcccattgattttgaagattctgcacacgttccttgtccaaggggccatgttattgctgctcggatcactagtgaaaatccagatgagggttttaagcccagctcaggaacagttcaggagctaaatttccgcagcaataagaatgtttggggatatttcagtgttgctgctgcagggggacttcatgaatttgctgattctcagtttggtcactgcttttcttggggagaaaacagagaagaggcaatttcaaacatggtggtggctttgaaggagctgtctattcggggtgactttcgaactacagttgaatacctgatcaaattgttagagactgaaagctttcagatgaacagaattgatactggctggctggacagactgatagcagaaaaagtacaggctgagcgacctgacaccatgttgggggttgtgtgtggtgccctccacgtggcagatgtgagcctgcggaatagcgtctctaacttccttcactccttagaaaggggtcaagtccttcctgctcatacacttctgaatacagtagatgttgaacttatctatgagggagtcaagtatgtacttaaggtgactcgacagtcccccaactcctatgtggtgatcatgaatggctcatgtgtagaagtagatgtacatcggctgagtgacggtggactgctcttgtcctatgatggcagcagttatactacgtatatgaaagaggaagtggatagatatcgcatcacaattggcaataaaacctgtgtgtttgagaaggaaaatgacccatcggtgatgcgctcaccttctgctgggaagttaatccagtacattgtagaagatggaggtcatgtgtttgccggccagtgctatgctgagattgaggtaatgaagatggtaatgaccttaacagctgtggagtctggctgtatccattacgtcaagcgacctggagcagctcttgaccctggctgtgtactagccaaaatgcaactggacaaccccagcaaggttcagcaggctgaacttcacacaggtagtctgccacggatccagagcacggcactcagaggcgagaaactccatcgagtgttccattatgtcctggataatctggtcaatgtaatgaatggatactgccttccagatcctttctttagcagcaaggtaaaagactgggtagagcgattgatgaaaaccctcagagatccctccctgcctctcctagaattgcaagatattatgaccagtgtgtctggccgcattccccccaatgtggagaagtctatcaagaaggaaatggctcagtatgctagcaacatcacatcagtcctctgtcagtttcccagccagcagattgcaaacatcctagatagccatgcagctacattgaaccggaaatctgaacgggaagtcttctttatgaatactcagagcattgttcagctggtacagaggtaccgaagtggcatccgaggccacatgaaggctgtggtgatggatctgctccggcagtacctgcgagtagagacacaattccagaatggtcactatgacaaatgtgtattcgccctccgagaagagaataaaagtgacatgaacactgtactgaactacatcttctctcacgctcaagtcaccaagaagaatcttctggtcacaatgcttattgatcagttgtgtggccgggaccctactctcactgatgagctgctgaatattctcacagagctaactcaactcagtaagaccaccaatgccaaagtagcacttcgagcacgccaggttcttattgcctcccatttgccatcatatgagcttcgccataaccaagtagagtctatcttcctatcagctattgacatgtatggacatcaattttgcattgagaacctgcagaaactcatcctatcagaaacatctatttttgatgtcctaccaaacttcttctatcacagcaaccaagtagtgaggatggcagctctggaggtgtatgttcgaagggcttatattgcctatgaacttaacagcgtacaacaccgccagcttaaggacaacacctgtgtggtggaattccagttcatgctgcccacatctcatccaaacagagggaacatccctacgctaaacagaatgtccttctcctccaacctcaaccactatggcatgacccatgtagctagtgtcagcgatgtactgttggacaactcattcactccaccttgtcagcggatgggcggaatggtctcttttcggacttttgaagattttgtcaggatctttgatgaagtgatgggctgcttctctgactccccaccccagagtcccacattccctgaggcaggtcacacgtctctttatgatgaggataaggttcccagggatgaaccaattcacattctcaatgtggctatcaagactgactgtgatattgaggatgacaggctggcagctatgttcagagaatttacccagcaaaataaagctaccctggttgaccatgggatccggcgccttactttcctggttgcacaaaaggatttcagaaagcaggtcaactatgaggtggatcggagatttcatagagaattccctaaattttttacattccgagcaagggataagtttgaggaggatcgtatctatcgtcatctggagcctgctctggctttccagttagagctgaaccggatgagaaattttgacctcactgccattccatgtgctaatcacaagatgcacctgtatctcggggcagccaaggtggaagtgggcacagaagtgacagactacaggttctttgttcgtgcaatcatcaggcattctgatctggtcaccaaggaagcttcttttgaatatctgcaaaatgaaggggagcggctactcctggaagccatggatgagttggaagttgcttttaacaatacaaatgtccgcactgactgtaaccacatcttcctcaactttgtgcccacggttatcatggacccatcaaagattgaggaatccgtgcggagcatggtaatgcggtatggaagtcgcctgtggaaattgcgcgtcctccaggcagaactgaaaatcaacattcgcctgacgccaactggaaaagcaattcccatccgcctcttcctgacaaacgagtctggctattacttggatatcagcctatacaaggaagtgactgactccaggacagcacagatcatgtttcaggcatatggagacaaacagggaccactgcatggaatgttaatcaatactccatatgtgaccaaagacctgctgcaatcaaagaggttccaggcacaatccttagggacaacatacatatatgatatcccagagatgtttcggcagtccctgatcaaactctgggagtctatgtccactcaagcatttcttccatctccccctctgccttctgacatgctgacttacactgaactggtactggatgatcaaggtcagctggtccacatgaacaggcttccaggaggaaatgagattggcatggtagcttggaaaatgacctttaaaagtcctgaatatccagaaggccgagatatcattgttattggcaatgacatcacataccgaattgggtcctttgggcctcaagaggatttgttatttctcagagcttccgaacttgctagggcagaaggtattccacgcatctatgtatcagccaacagtggagcaagaatcggactggcagaagaaattcgccatatgtttcatgtggcctgggtagatcctgaggatccttacaagggatacaggtatttatatctgactcctcaagattataagagagtcagtgctctcaactctgtccattgtgaacacgtggaagatgaaggagaatccaggtacaagataacagatattattgggaaagaagagggaattggacccgagaaccttcgaggttctggaatgattgctggagaatcctcattggcctataatgagatcattaccatcagcctggtgacgtgccgggccattgggattggggcttaccttgtccggctgggacagagaaccatccaggttgagaattctcacttaattctaacaggagctggagccctcaacaaagtcctcgggcgggaagtgtacacctccaataaccagctggggggcatccagattatgcacaacaatggggtgacccactgcactgtgtgtgatgactttgaaggggttttcactgtcctgcactggctgtcttacatgcccaagagcgtgcacagttcagttcctcttctgaactcaaaggatcctatagacagaatcatcgagtttgttcccacaaagaccccatacgatcctcgatggatgctagcaggccgtcctcacccaacccaaaaaggtcagtggttgagtggcttttttgactatggatctttctcagagattatgcagccctgggcacagactgtggtggttggtagagccaggctaggaggaatacctgtgggagttgttgctgtagaaacccgaacagtagaactaagtatcccagctgatccagcaaacctggattctgaagccaagctccagcgattcaagcgctccctctccctcaagaccatcctccgaagtaagagcttggagaacttcttccttcgctcgggctctgagctcaagtgccccaccgaggtgctgctgacgcccccaaccccactgccccctccctccccaccacccacagcctcggacaggggcctggctaccccatccccctccccatgcccagtcccacgccccctggcagcgctcaaaccagtgaggctgcacagcttccaggaacatgtcttcaagcgagctagcccttgtgagctgtgccaccagctcatcgtaggaaactccaaacagggcttgcgatgtaagatgtgcaaagtcagcgtccacctctggtgctctgaggagatctcccaccagcaatgcccaggcaagacgtccacctccttccgccgcaacttcagttcccctctcctggtgcatgagccgccaccagtctgtgccacaagcaaagagtccccacccactggggacagtgggaaggtggaccctgtctacgagaccctgcgctatggcacctccctggcactgatgaaccgctccagtttcagcagcacctctgagtccccgacaaggagcctgagtgagcgggatgagctgaccgaggatggggaaggcagcatccgcagctctgaggaggggcctggtgacagtgcatctccagtattcacagccccagcagagagtgaagggccaggaccagaggagaagagtcctggacagcagctccccaaagccaccctgcggaaggatgtggggcccatgtactcctacgttgcactctacaagtttctgccccaggagaacaatgatctggctctgcagcctggagatcggatcatgctggtggatgactctaacgaggactggtggaagggcaagatcggcgaccgggttggcttcttcccagctaattttgtgcaacgggtgaggccaggcgagaatgtttggcgctgctgccaacccttctccgggaacaaggaacagggttacatgagcctcaaggagaaccagatctgcgtgggcgtgggcagaagcaaggatgctgacggcttcatccgcgtcagcagtggcaagaagcggggcctggtgccagtcgacgccctgactgagatctgagaggagccaagggaacccagatgacacccttgcccatgcctggaccttgcttctggccagggaggggatcaggcccccttgtccactccatacccttcctccctctgtccctctcctaggtgccacttaccgtggcttaggagccttttgtactggggaagattttatttcttgggtggggtgccctgagtgggttgatcctctgggacttggcggggatggggtggggtgggagggaatgaggaagctacaggtaggtccacccaacgcccaggcaccccagtctacttgctgggctgagtccagccctggggaagattcctggggaatttatttgctgcttctcccagccttcccctgcccacaccacctgcgcatgcctggcacacccctctccccacagagcctctgcttgggtctatgtgtgtgtgaccgtgcatctgctcctttgcaagtggggtcttgggagcaggcctttttgtgtcctcggccctccacccttggtggggaggggacccaggaccataggaaggtcctgagtccacctcctggtctccacctctgtcattccgtcaattctcaggaaagttttgcaggaatctctcccgttacttgaaacctgggcggacagatgaggggaaggctgaggtccctggaaggtgtaacaaatcagagactatctgttcaagtagaaaacccaagagctggccaggtgtggtggctcatgcctgtaatcccagcactttgggaggctgaggtgggcagatcacctgaggtcaggagttcaagaccagcctggccaacatggtgaaaccccgtctctactaaaagtacgaaacttagccaggcatgatgggggtctgcctgtaatgccagctactccagaggctgaggcaagagaatcacttgaacccgggaggcggaggtttcagtgagccgagattgcaccattgcaccccagcctgggcaacagagcgagactccgtctcaaaaaaaaaaaaagaaagaaagaaaaggaaacccaagagctgcctggacacacggaaacccaactgagaacaaaatcctggcccgtgcttggtcaaagcaaacccatttcactgtcaggacccccggtcacacaggaaccacccgccaggggagcctgtgactgtcagttcctgtcccaggctttgcccggccgccccaggaacccaaccctctgggctgacctttctcctgcttctctccaggctctgcaggggacagggcaggtgctgcaggagcccctttgctggctttatctgctcccttgttctggacacagagccctgggaaaaagagggggtggaagacagacaaggaaggtggaatgttctgttttggccaccaggaaatggggtggggtgggcatacacagagaggacccctctcttaatacagctgcttttctcggtgccaacctccctcccccaagctcagatcctcctcttatgcccttgattgtgccagcccatgccacccccatcctgggcacagttacaccctcccatgcagtgggagaaacacagaccctcgtacccaaaggcccctgccccacttctcccccacaaagcggggtctcaagccacactgccctgtttgctgccatgaggcccccccccccagcaatatcccaggggcgggcccaatgcccactgtacatgaggctgcatgatgggtctggggccttgctgattccccagacccctaattaaatgtttcttgtcccagccc

SEQ ID NO: 62 - DNA, 8928 bp, Homo sapiens
  misc_feature (28)..(28): second gene starts at position 28
atggatgaaccatctcccttggcccaacctctggagctgaaccagcactctcgattcataataggttctgtgtctgaagataactcagaggatgagatcagcaacctggtgaagttggacctactggaggagaaggagggctccttgtcacctgcttctgttggctcagatacactctctgatttggggatctctagcctacaggatggcttggccttgcacataaggtccagcatgtctggcttgcacctagtaaagcagggccgagacagaaagaaaatagattctcaacgagatttcactgtggcttctccagcagaatttgttactcgctttgggggaaataaagtgattgagaaggttcttattgctaacaatggcattgcagcagtgaaatgcatgcggtctatccgtaggtggtcttatgaaatgtttcgaaatgaacgtgcaattagattcgttgtcatggtcacacctgaagaccttaaagccaatgcagaatacattaagatggcagatcactatgtgccagtgcctggaggaccaaacaacaacaactatgcaaatgtggaattaattcttgatattgctaaaaggatcccagtacaagcagtgtgggctggctggggtcatgcttctgagaatcccaaactaccggaacttctcttgaaaaatggcattgccttcatgggtcctccaagccaggccatgtgggctttaggggataagattgcatcttccatagtggctcaaactgcaggtatcccaactcttccctggagcggcagtggtcttcgtgtggactggcaggaaaatgatttttcaaaacgtatcttaaatgttccccaggagctatatgaaaaaggttatgtgaaagatgtggatgatgggctacaggcagctgaggaagttggatatccagtaatgatcaaggcctcagagggaggaggagggaagggaattagaaaagtcaacaatgcagatgacttccctaatctcttcagacaggttcaagctgaagttcctggatctcccatatttgtgatgagactagccaaacaatctcgtcatctggaggtgcagatcttagcggaccaatatggcaatgctatctctttgtttggtcgtgattgctctgtacaacgcaggcatcagaagattattgaagaagcacctgctactattgctactccagcagtatttgaacacatggaacagtgtgcggtgaaacttgccaaaatggtgggttatgtgagtgctgggactgtggaatacctgtacagccaggatggcagcttctactttctggaattgaatcctcggctgcaggtagagcacccttgtacagagatggtggctgatgtcaatctccctgcagcacagctccagattgccatggggattcctctatatagaatcaaggatatccgtatgatgtatggggtatctccctggggtgattctcccattgattttgaagattctgcacacgttccttgtccaaggggccatgttattgctgctcggatcactagtgaaaatccagatgagggttttaagcccagctcaggaacagttcaggagctaaatttccgcagcaataagaatgtttggggatatttcagtgttgctgctgcagggggacttcatgaatttgctgattctcagtttggtcactgcttttcttggggagaaaacagagaagaggcaatttcaaacatggtggtggctttgaaggagctgtctattcggggtgactttcgaactacagttgaatacctgatcaaattgttagagactgaaagctttcagatgaacagaattgatactggctggctggacagactgatagcagaaaaagtacaggctgagcgacctgacaccatgttgggggttgtgtgtggtgccctccacgtggcagatgtgagcctgcggaatagcgtctctaacttccttcactccttagaaaggggtcaagtccttcctgctcatacacttctgaatacagtagatgttgaacttatctatgagggagtcaagtatgtacttaaggtgactcgacagtcccccaactcctatgtggtgatcatgaatggctcatgtgtagaagtagatgtacatcggctgagtgacggtggactgctcttgtcctatgatggcagcagttatactacgtatatgaaagaggaagtggatagatatcgcatcacaattggcaataaaacctgtgtgtttgagaaggaaaatgacccatcggtgatgcgctcaccttctgctgggaagttaatccagtacattgtagaagatggaggtcatgtgtttgccggccagtgctatgctgagattgaggtaatgaagatggtaatgaccttaacagctgtggagtctggctgtatccattacgtcaagcgacctggagcagctcttgaccctggctgtgtactagccaaaatgcaactggacaaccccagcaaggttcagcaggctgaacttcacacaggtagtctgccacggatccagagcacggcactcagaggcgagaaactccatcgagtgttccattatgtcctggataatctggtcaatgtaatgaatggatactgccttccagatcctttctttagcagcaaggtaaaagactgggtagagcgattgatgaaaaccctcagagatccctccctgcctctcctagaattgcaagatattatgaccagtgtgtctggccgcattccccccaatgtggagaagtctatcaagaaggaaatggctcagtatgctagcaacatcacatcagtcctctgtcagtttcccagccagcagattgcaaacatcctagatagccatgcagctacattgaaccggaaatctgaacgggaagtcttctttatgaatactcagagcattgttcagctggtacagaggtaccgaagtggcatccgaggccacatgaaggctgtggtgatggatctgctccggcagtacctgcgagtagagacacaattccagaatggtcactatgacaaatgtgtattcgccctccgagaagagaataaaagtgacatgaacactgtactgaactacatcttctctcacgctcaagtcaccaagaagaatcttctggtcacaatgcttattgatcagttgtgtggccgggaccctactctcactgatgagctgctgaatattctcacagagctaactcaactcagtaagaccaccaatgccaaagtagcacttcgagcacgccaggttcttattgcctcccatttgccatcatatgagcttcgccataaccaagtagagtctatcttcctatcagctattgacatgtatggacatcaattttgcattgagaacctgcagaaactcatcctatcagaaacatctatttttgatgtcctaccaaacttcttctatcacagcaaccaagtagtgaggatggcagctctggaggtgtatgttcgaagggcttatattgcctatgaacttaacagcgtacaacaccgccagcttaaggacaacacctgtgtggtggaattccagttcatgctgcccacatctcatccaaacagagggaacatccctacgctaaacagaatgtccttctcctccaacctcaaccactatggcatgacccatgtagctagtgtcagcgatgtactgttggacaactcattcactccaccttgtcagcggatgggcggaatggtctcttttcggacttttgaagattttgtcaggatctttgatgaagtgatgggctgcttctctgactccccaccccagagtcccacattccctgaggcaggtcacacgtctctttatgatgaggataaggttcccagggatgaaccaattcacattctcaatgtggctatcaagactgactgtgatattgaggatgacaggctggcagctatgttcagagaatttacccagcaaaataaagctaccctggttgaccatgggatccggcgccttactttcctggttgcacaaaaggatttcagaaagcaggtcaactatgaggtggatcggagatttcatagagaattccctaaattttttacattccgagcaagggataagtttgaggaggatcgtatctatcgtcatctggagcctgctctggctttccagttagagctgaaccggatgagaaattttgacctcactgccattccatgtgctaatcacaagatgcacctgtatctcggggcagccaaggtggaagtgggcacagaagtgacagactacaggttctttgttcgtgcaatcatcaggcattctgatctggtcaccaaggaagcttcttttgaatatctgcaaaatgaaggggagcggctactcctggaagccatggatgagttggaagttgcttttaacaatacaaatgtccgcactgactgtaaccacatcttcctcaactttgtgcccacggttatcatggacccatcaaagattgaggaatccgtgcggagcatggtaatgcggtatggaagtcgcctgtggaaattgcgcgtcctccaggcagaactgaaaatcaacattcgcctgacgccaactggaaaagcaattcccatccgcctcttcctgacaaacgagtctggctattacttggatatcagcctatacaaggaagtgactgactccaggacagcacagatcatgtttcaggcatatggagacaaacagggaccactgcatggaatgttaatcaatactccatatgtgaccaaagacctgctgcaatcaaagaggttccaggcacaatccttagggacaacatacatatatgatatcccagagatgtttcggcagtccctgatcaaactctgggagtctatgtccactcaagcatttcttccatctccccctctgccttctgacatgctgacttacactgaactggtactggatgatcaaggtcagctggtccacatgaacaggcttccaggaggaaatgagattggcatggtagcttggaaaatgacctttaaaagtcctgaatatccagaaggccgagatatcattgttattggcaatgacatcacataccgaattgggtcctttgggcctcaagaggatttgttatttctcagagcttccgaacttgctagggcagaaggtattccacgcatctatgtatcagccaacagtggagcaagaatcggactggcagaagaaattcgccatatgtttcatgtggcctgggtagatcctgaggatccttacaagggatacaggtatttatatctgactcctcaagattataagagagtcagtgctctcaactctgtccattgtgaacacgtggaagatgaaggagaatccaggtacaagataacagatattattgggaaagaagagggaattggacccgagaaccttcgaggttctggaatgattgctggagaatcctcattggcctataatgagatcattaccatcagcctggtgacgtgccgggccattgggattggggcttaccttgtccggctgggacagagaaccatccaggttgagaattctcacttaattctaacaggagctggagccctcaacaaagtcctcgggcgggaagtgtacacctccaataaccagctggggggcatccagattatgcacaacaatggggtgacccactgcactgtgtgtgatgactttgaaggggttttcactgtcctgcactggctgtcttacatgcccaagagcgtgcacagttcagttcctcttctgaactcaaaggatcctatagacagaatcatcgagtttgttcccacaaagaccccatacgatcctcgatggatgctagcaggccgtcctcacccaacccaaaaaggtcagtggttgagtggcttttttgactatggatctttctcagagattatgcagccctgggcacagactgtggtggttggtagagccaggctaggaggaatacctgtgggagttgttgctgtagaaacccgaacagtagaactaagtatcccagctgatccagcaaacctggattctgaagccaagctccagcgattcaagcgctccctctccctcaagaccatcctccgaagtaagagcttggagaacttcttccttcgctcgggctctgagctcaagtgccccaccgaggtgctgctgacgcccccaaccccactgccccctccctccccaccacccacagcctcggacaggggcctggctaccccatccccctccccatgcccagtcccacgccccctggcagcgctcaaaccagtgaggctgcacagcttccaggaacatgtcttcaagcgagctagcccttgtgagctgtgccaccagctcatcgtaggaaactccaaacagggcttgcgatgtaagatgtgcaaagtcagcgtccacctctggtgctctgaggagatctcccaccagcaatgcccaggcaagacgtccacctccttccgccgcaacttcagttcccctctcctggtgcatgagccgccaccagtctgtgccacaagcaaagagtccccacccactggggacagtgggaaggtggaccctgtctacgagaccctgcgctatggcacctccctggcactgatgaaccgctccagtttcagcagcacctctgagtccccgacaaggagcctgagtgagcgggatgagctgaccgaggatggggaaggcagcatccgcagctctgaggaggggcctggtgacagtgcatctccagtattcacagccccagcagagagtgaagggccaggaccagaggagaagagtcctggacagcagctccccaaagccaccctgcggaaggatgtggggcccatgtactcctacgttgcactctacaagtttctgccccaggagaacaatgatctggctctgcagcctggagatcggatcatgctggtggatgactctaacgaggactggtggaagggcaagatcggcgaccgggttggcttcttcccagctaattttgtgcaacgggtgaggccaggcgagaatgtttggcgctgctgccaacccttctccgggaacaaggaacagggttacatgagcctcaaggagaaccagatctgcgtgggcgtgggcagaagcaaggatgctgacggcttcatccgcgtcagcagtggcaagaagcggggcctggtgccagtcgacgccctgactgagatctgagaggagccaagggaacccagatgacacccttgcccatgcctggaccttgcttctggccagggaggggatcaggcccccttgtccactccatacccttcctccctctgtccctctcctaggtgccacttaccgtggcttaggagccttttgtactggggaagattttatttcttgggtggggtgccctgagtgggttgatcctctgggacttggcggggatggggtggggtgggagggaatgaggaagctacaggtaggtccacccaacgcccaggcaccccagtctacttgctgggctgagtccagccctggggaagattcctggggaatttatttgctgcttctcccagccttcccctgcccacaccacctgcgcatgcctggcacacccctctccccacagagcctctgcttgggtctatgtgtgtgtgaccgtgcatctgctcctttgcaagtggggtcttgggagcaggcctttttgtgtcctcggccctccacccttggtggggaggggacccaggaccataggaaggtcctgagtccacctcctggtctccacctctgtcattccgtcaattctcaggaaagttttgcaggaatctctcccgttacttgaaacctgggcggacagatgaggggaaggctgaggtccctggaaggtgtaacaaatcagagactatctgttcaagtagaaaacccaagagctggccaggtgtggtggctcatgcctgtaatcccagcactttgggaggctgaggtgggcagatcacctgaggtcaggagttcaagaccagcctggccaacatggtgaaaccccgtctctactaaaagtacgaaacttagccaggcatgatgggggtctgcctgtaatgccagctactccagaggctgaggcaagagaatcacttgaacccgggaggcggaggtttcagtgagccgagattgcaccattgcaccccagcctgggcaacagagcgagactccgtctcaaaaaaaaaaaaagaaagaaagaaaaggaaacccaagagctgcctggacacacggaaacccaactgagaacaaaatcctggcccgtgcttggtcaaagcaaacccatttcactgtcaggacccccggtcacacaggaaccacccgccaggggagcctgtgactgtcagttcctgtcccaggctttgcccggccgccccaggaacccaaccctctgggctgacctttctcctgcttctctccaggctctgcaggggacagggcaggtgctgcaggagcccctttgctggctttatctgctcccttgttctggacacagagccctgggaaaaagagggggtggaagacagacaaggaaggtggaatgttctgttttggccaccaggaaatggggtggggtgggcatacacagagaggacccctctcttaatacagctgcttttctcggtgccaacctccctcccccaagctcagatcctcctcttatgcccttgattgtgccagcccatgccacccccatcctgggcacagttacaccctcccatgcagtgggagaaacacagaccctcgtacccaaaggcccctgccccacttctcccccacaaagcggggtctcaagccacactgccctgtttgctgccatgaggcccccccccccagcaatatcccaggggcgggcccaatgcccactgtacatgaggctgcatgatgggtctggggccttgctgattccccagacccctaattaaatgtttcttgtcccagccc

SEQ ID NO: 63 - DNA, 8754 bp, Homo sapiens
  misc_feature (854)..(854): second gene starts at position 854
atggagggttctccagaggaaaataaggaaatgagatattacatgcttcaaaggtccagcatgtctggcttgcacctagtaaagcagggccgagacagaaagaaaatagattctcaacgagatttcactgtggcttctccagcagaatttgttactcgctttgggggaaataaagtgattgagaaggttcttattgctaacaatggcattgcagcagtgaaatgcatgcggtctatccgtaggtggtcttatgaaatgtttcgaaatgaacgtgcaattagattcgttgtcatggtcacacctgaagaccttaaagccaatgcagaatacattaagatggcagatcactatgtgccagtgcctggaggaccaaacaacaacaactatgcaaatgtggaattaattcttgatattgctaaaaggatcccagtacaagcagtgtgggctggctggggtcatgcttctgagaatcccaaactaccggaacttctcttgaaaaatggcattgccttcatgggtcctccaagccaggccatgtgggctttaggggataagattgcatcttccatagtggctcaaactgcaggtatcccaactcttccctggagcggcagtggtcttcgtgtggactggcaggaaaatgatttttcaaaacgtatcttaaatgttccccaggagctatatgaaaaaggttatgtgaaagatgtggatgatgggctacaggcagctgaggaagttggatatccagtaatgatcaaggcctcagagggaggaggagggaagggaattagaaaagtcaacaatgcagatgacttccctaatctcttcagacaggttcaagctgaagttcctggatctcccatatttgtgatgagactagccaaacaatctcgtcatctggaggtgcagatcttagcggaccaatatggcaatgctatctctttgtttggtcgtgattgctctgtacaacgcaggcatcagaagattattgaagaagcacctgctactattgctactccagcagtatttgaacacatggaacagtgtgcggtgaaacttgccaaaatggtgggttatgtgagtgctgggactgtggaatacctgtacagccaggatggcagcttctactttctggaattgaatcctcggctgcaggtagagcacccttgtacagagatggtggctgatgtcaatctccctgcagcacagctccagattgccatggggattcctctatatagaatcaaggatatccgtatgatgtatggggtatctccctggggtgattctcccattgattttgaagattctgcacacgttccttgtccaaggggccatgttattgctgctcggatcactagtgaaaatccagatgagggttttaagcccagctcaggaacagttcaggagctaaatttccgcagcaataagaatgtttggggatatttcagtgttgctgctgcagggggacttcatgaatttgctgattctcagtttggtcactgcttttcttggggagaaaacagagaagaggcaatttcaaacatggtggtggctttgaaggagctgtctattcggggtgactttcgaactacagttgaatacctgatcaaattgttagagactgaaagctttcagatgaacagaattgatactggctggctggacagactgatagcagaaaaagtacaggctgagcgacctgacaccatgttgggggttgtgtgtggtgccctccacgtggcagatgtgagcctgcggaatagcgtctctaacttccttcactccttagaaaggggtcaagtccttcctgctcatacacttctgaatacagtagatgttgaacttatctatgagggagtcaagtatgtacttaaggtgactcgacagtcccccaactcctatgtggtgatcatgaatggctcatgtgtagaagtagatgtacatcggctgagtgacggtggactgctcttgtcctatgatggcagcagttatactacgtatatgaaagaggaagtggatagatatcgcatcacaattggcaataaaacctgtgtgtttgagaaggaaaatgacccatcggtgatgcgctcaccttctgctgggaagttaatccagtacattgtagaagatggaggtcatgtgtttgccggccagtgctatgctgagattgaggtaatgaagatggtaatgaccttaacagctgtggagtctggctgtatccattacgtcaagcgacctggagcagctcttgaccctggctgtgtactagccaaaatgcaactggacaaccccagcaaggttcagcaggctgaacttcacacaggtagtctgccacggatccagagcacggcactcagaggcgagaaactccatcgagtgttccattatgtcctggataatctggtcaatgtaatgaatggatactgccttccagatcctttctttagcagcaaggtaaaagactgggtagagcgattgatgaaaaccctcagagatccctccctgcctctcctagaattgcaagatattatgaccagtgtgtctggccgcattccccccaatgtggagaagtctatcaagaaggaaatggctcagtatgctagcaacatcacatcagtcctctgtcagtttcccagccagcagattgcaaacatcctagatagccatgcagctacattgaaccggaaatctgaacgggaagtcttctttatgaatactcagagcattgttcagctggtacagaggtaccgaagtggcatccgaggccacatgaaggctgtggtgatggatctgctccggcagtacctgcgagtagagacacaattccagaatggtcactatgacaaatgtgtattcgccctccgagaagagaataaaagtgacatgaacactgtactgaactacatcttctctcacgctcaagtcaccaagaagaatcttctggtcacaatgcttattgatcagttgtgtggccgggaccctactctcactgatgagctgctgaatattctcacagagctaactcaactcagtaagaccaccaatgccaaagtagcacttcgagcacgccaggttcttattgcctcccatttgccatcatatgagcttcgccataaccaagtagagtctatcttcctatcagctattgacatgtatggacatcaattttgcattgagaacctgcagaaactcatcctatcagaaacatctatttttgatgtcctaccaaacttcttctatcacagcaaccaagtagtgaggatggcagctctggaggtgtatgttcgaagggcttatattgcctatgaacttaacagcgtacaacaccgccagcttaaggacaacacctgtgtggtggaattccagttcatgctgcccacatctcatccaaacagagggaacatccctacgctaaacagaatgtccttctcctccaacctcaaccactatggcatgacccatgtagctagtgtcagcgatgtactgttggacaactcattcactccaccttgtcagcggatgggcggaatggtctcttttcggacttttgaagattttgtcaggatctttgatgaagtgatgggctgcttctctgactccccaccccagagtcccacattccctgaggcaggtcacacgtctctttatgatgaggataaggttcccagggatgaaccaattcacattctcaatgtggctatcaagactgactgtgatattgaggatgacaggctggcagctatgttcagagaatttacccagcaaaataaagctaccctggttgaccatgggatccggcgccttactttcctggttgcacaaaaggatttcagaaagcaggtcaactatgaggtggatcggagatttcatagagaattccctaaattttttacattccgagcaagggataagtttgaggaggatcgtatctatcgtcatctggagcctgctctggctttccagttagagctgaaccggatgagaaattttgacctcactgccattccatgtgctaatcacaagatgcacctgtatctcggggcagccaaggtggaagtgggcacagaagtgacagactacaggttctttgttcgtgcaatcatcaggcattctgatctggtcaccaaggaagcttcttttgaatatctgcaaaatgaaggggagcggctactcctggaagccatggatgagttggaagttgcttttaacaatacaaatgtccgcactgactgtaaccacatcttcctcaactttgtgcccacggttatcatggacccatcaaagattgaggaatccgtgcggagcatggtaatgcggtatggaagtcgcctgtggaaattgcgcgtcctccaggcagaactgaaaatcaacattcgcctgacgccaactggaaaagcaattcccatccgcctcttcctgacaaacgagtctggctattacttggatatcagcctatacaaggaagtgactgactccaggacagcacagatcatgtttcaggcatatggagacaaacagggaccactgcatggaatgttaatcaatactccatatgtgaccaaagacctgctgcaatcaaagaggttccaggcacaatccttagggacaacatacatatatgatatcccagagatgtttcggcagtccctgatcaaactctgggagtctatgtccactcaagcatttcttccatctccccctctgccttctgacatgctgacttacactgaactggtactggatgatcaaggtcagctggtccacatgaacaggcttccaggaggaaatgagattggcatggtagcttggaaaatgacctttaaaagtcctgaatatccagaaggccgagatatcattgttattggcaatgacatcacataccgaattgggtcctttgggcctcaagaggatttgttatttctcagagcttccgaacttgctagggcagaaggtattccacgcatctatgtatcagccaacagtggagcaagaatcggactggcagaagaaattcgccatatgtttcatgtggcctgggtagatcctgaggatccttacaagggatacaggtatttatatctgactcctcaagattataagagagtcagtgctctcaactctgtccattgtgaacacgtggaagatgaaggagaatccaggtacaagataacagatattattgggaaagaagagggaattggacccgagaaccttcgaggttctggaatgattgctggagaatcctcattggcctataatgagatcattaccatcagcctggtgacgtgccgggccattgggattggggcttaccttgtccggctgggacagagaaccatccaggttgagaattctcacttaattctaacaggagctggagccctcaacaaagtcctcgggcgggaagtgtacacctccaataaccagctggggggcatccagattatgcacaacaatggggtgacccactgcactgtgtgtgatgactttgaaggggttttcactgtcctgcactggctgtcttacatgcccaagagcgtgcacagttcagttcctcttctgaactcaaaggatcctatagacagaatcatcgagtttgttcccacaaagaccccatacgatcctcgatggatgctagcaggccgtcctcacccaacccaaaaaggtcagtggttgagtggcttttttgactatggatctttctcagagattatgcagccctgggcacagactgtggtggttggtagagccaggctaggaggaatacctgtgggagttgttgctgtagaaacccgaacagtagaactaagtatcccagctgatccagcaaacctggattctgaagccaagctccagcgattcaagcgctccctctccctcaagaccatcctccgaagtaagagcttggagaacttcttccttcgctcgggctctgagctcaagtgccccaccgaggtgctgctgacgcccccaaccccactgccccctccctccccaccacccacagcctcggacaggggcctggctaccccatccccctccccatgcccagtcccacgccccctggcagcgctcaaaccagtgaggctgcacagcttccaggaacatgtcttcaagcgagctagcccttgtgagctgtgccaccagctcatcgtaggaaactccaaacagggcttgcgatgtaagatgtgcaaagtcagcgtccacctctggtgctctgaggagatctcccaccagcaatgcccaggcaagacgtccacctccttccgccgcaacttcagttcccctctcctggtgcatgagccgccaccagtctgtgccacaagcaaagagtccccacccactggggacagtgggaaggtggaccctgtctacgagaccctgcgctatggcacctccctggcactgatgaaccgctccagtttcagcagcacctctgagtccccgacaaggagcctgagtgagcgggatgagctgaccgaggatggggaaggcagcatccgcagctctgaggaggggcctggtgacagtgcatctccagtattcacagccccagcagagagtgaagggccaggaccagaggagaagagtcctggacagcagctccccaaagccaccctgcggaaggatgtggggcccatgtactcctacgttgcactctacaagtttctgccccaggagaacaatgatctggctctgcagcctggagatcggatcatgctggtggatgactctaacgaggactggtggaagggcaagatcggcgaccgggttggcttcttcccagctaattttgtgcaacgggtgaggccaggcgagaatgtttggcgctgctgccaacccttctccgggaacaaggaacagggttacatgagcctcaaggagaaccagatctgcgtgggcgtgggcagaagcaaggatgctgacggcttcatccgcgtcagcagtggcaagaagcggggcctggtgccagtcgacgccctgactgagatctgagaggagccaagggaacccagatgacacccttgcccatgcctggaccttgcttctggccagggaggggatcaggcccccttgtccactccatacccttcctccctctgtccctctcctaggtgccacttaccgtggcttaggagccttttgtactggggaagattttatttcttgggtggggtgccctgagtgggttgatcctctgggacttggcggggatggggtggggtgggagggaatgaggaagctacaggtaggtccacccaacgcccaggcaccccagtctacttgctgggctgagtccagccctggggaagattcctggggaatttatttgctgcttctcccagccttcccctgcccacaccacctgcgcatgcctggcacacccctctccccacagagcctctgcttgggtctatgtgtgtgtgaccgtgcatctgctcctttgcaagtggggtcttgggagcaggcctttttgtgtcctcggccctccacccttggtggggaggggacccaggaccataggaaggtcctgagtccacctcctggtctccacctctgtcattccgtcaattctcaggaaagttttgcaggaatctctcccgttacttgaaacctgggcggacagatgaggggaaggctgaggtccctggaaggtgtaacaaatcagagactatctgttcaagtagaaaacccaagagctggccaggtgtggtggctcatgcctgtaatcccagcactttgggaggctgaggtgggcagatcacctgaggtcaggagttcaagaccagcctggccaacatggtgaaaccccgtctctactaaaagtacgaaacttagccaggcatgatgggggtctgcctgtaatgccagctactccagaggctgaggcaagagaatcacttgaacccgggaggcggaggtttcagtgagccgagattgcaccattgcaccccagcctgggcaacagagcgagactccgtctcaaaaaaaaaaaaagaaagaaagaaaaggaaacccaagagctgcctggacacacggaaacccaactgagaacaaaatcctggcccgtgcttggtcaaagcaaacccatttcactgtcaggacccccggtcacacaggaaccacccgccaggggagcctgtgactgtcagttcctgtcccaggctttgcccggccgccccaggaacccaaccctctgggctgacctttctcctgcttctctccaggctctgcaggggacagggcaggtgctgcaggagcccctttgctggctttatctgctcccttgttctggacacagagccctgggaaaaagagggggtggaagacagacaaggaaggtggaatgttctgttttggccaccaggaaatggggtggggtgggcatacacagagaggacccctctcttaatacagctgcttttctcggtgccaacctccctcccccaagctcagatcctcctcttatgcccttgattgtgccagcccatgccacccccatcctgggcacagttacaccctcccatgcagtgggagaaacacagaccctcgtacccaaaggcccctgccccacttctcccccacaaagcggggtctcaagccacactgccctgtttgctgccatgaggcccccccccccagcaatatcccaggggcgggcccaatgcccactgtacatgaggctgcatgatgggtctggggccttgctgattccccagacccctaattaaatgtttcttgtcccagccc

SEQ ID NO: 64 - DNA, 8694 bp, Homo sapiens
  misc_feature (794)..(794): second gene starts at position 794
atgtctggcttgcacctagtaaagcagggccgagacagaaagaaaatagattctcaacgagatttcactgtggcttctccagcagaatttgttactcgctttgggggaaataaagtgattgagaaggttcttattgctaacaatggcattgcagcagtgaaatgcatgcggtctatccgtaggtggtcttatgaaatgtttcgaaatgaacgtgcaattagattcgttgtcatggtcacacctgaagaccttaaagccaatgcagaatacattaagatggcagatcactatgtgccagtgcctggaggaccaaacaacaacaactatgcaaatgtggaattaattcttgatattgctaaaaggatcccagtacaagcagtgtgggctggctggggtcatgcttctgagaatcccaaactaccggaacttctcttgaaaaatggcattgccttcatgggtcctccaagccaggccatgtgggctttaggggataagattgcatcttccatagtggctcaaactgcaggtatcccaactcttccctggagcggcagtggtcttcgtgtggactggcaggaaaatgatttttcaaaacgtatcttaaatgttccccaggagctatatgaaaaaggttatgtgaaagatgtggatgatgggctacaggcagctgaggaagttggatatccagtaatgatcaaggcctcagagggaggaggagggaagggaattagaaaagtcaacaatgcagatgacttccctaatctcttcagacaggttcaagctgaagttcctggatctcccatatttgtgatgagactagccaaacaatctcgtcatctggaggtgcagatcttagcggaccaatatggcaatgctatctctttgtttggtcgtgattgctctgtacaacgcaggcatcagaagattattgaagaagcacctgctactattgctactccagcagtatttgaacacatggaacagtgtgcggtgaaacttgccaaaatggtgggttatgtgagtgctgggactgtggaatacctgtacagccaggatggcagcttctactttctggaattgaatcctcggctgcaggtagagcacccttgtacagagatggtggctgatgtcaatctccctgcagcacagctccagattgccatggggattcctctatatagaatcaaggatatccgtatgatgtatggggtatctccctggggtgattctcccattgattttgaagattctgcacacgttccttgtccaaggggccatgttattgctgctcggatcactagtgaaaatccagatgagggttttaagcccagctcaggaacagttcaggagctaaatttccgcagcaataagaatgtttggggatatttcagtgttgctgctgcagggggacttcatgaatttgctgattctcagtttggtcactgcttttcttggggagaaaacagagaagaggcaatttcaaacatggtggtggctttgaaggagctgtctattcggggtgactttcgaactacagttgaatacctgatcaaattgttagagactgaaagctttcagatgaacagaattgatactggctggctggacagactgatagcagaaaaagtacaggctgagcgacctgacaccatgttgggggttgtgtgtggtgccctccacgtggcagatgtgagcctgcggaatagcgtctctaacttccttcactccttagaaaggggtcaagtccttcctgctcatacacttctgaatacagtagatgttgaacttatctatgagggagtcaagtatgtacttaaggtgactcgacagtcccccaactcctatgtggtgatcatgaatggctcatgtgtagaagtagatgtacatcggctgagtgacggtggactgctcttgtcctatgatggcagcagttatactacgtatatgaaagaggaagtggatagatatcgcatcacaattggcaataaaacctgtgtgtttgagaaggaaaatgacccatcggtgatgcgctcaccttctgctgggaagttaatccagtacattgtagaagatggaggtcatgtgtttgccggccagtgctatgctgagattgaggtaatgaagatggtaatgaccttaacagctgtggagtctggctgtatccattacgtcaagcgacctggagcagctcttgaccctggctgtgtactagccaaaatgcaactggacaaccccagcaaggttcagcaggctgaacttcacacaggtagtctgccacggatccagagcacggcactcagaggcgagaaactccatcgagtgttccattatgtcctggataatctggtcaatgtaatgaatggatactgccttccagatcctttctttagcagcaaggtaaaagactgggtagagcgattgatgaaaaccctcagagatccctccctgcctctcctagaattgcaagatattatgaccagtgtgtctggccgcattccccccaatgtggagaagtctatcaagaaggaaatggctcagtatgctagcaacatcacatcagtcctctgtcagtttcccagccagcagattgcaaacatcctagatagccatgcagctacattgaaccggaaatctgaacgggaagtcttctttatgaatactcagagcattgttcagctggtacagaggtaccgaagtggcatccgaggccacatgaaggctgtggtgatggatctgctccggcagtacctgcgagtagagacacaattccagaatggtcactatgacaaatgtgtattcgccctccgagaagagaataaaagtgacatgaacactgtactgaactacatcttctctcacgctcaagtcaccaagaagaatcttctggtcacaatgcttattgatcagttgtgtggccgggaccctactctcactgatgagctgctgaatattctcacagagctaactcaactcagtaagaccaccaatgccaaagtagcacttcgagcacgccaggttcttattgcctcccatttgccatcatatgagcttcgccataaccaagtagagtctatcttcctatcagctattgacatgtatggacatcaattttgcattgagaacctgcagaaactcatcctatcagaaacatctatttttgatgtcctaccaaacttcttctatcacagcaaccaagtagtgaggatggcagctctggaggtgtatgttcgaagggcttatattgcctatgaacttaacagcgtacaacaccgccagcttaaggacaacacctgtgtggtggaattccagttcatgctgcccacatctcatccaaacagagggaacatccctacgctaaacagaatgtccttctcctccaacctcaaccactatggcatgacccatgtagctagtgtcagcgatgtactgttggacaactcattcactccaccttgtcagcggatgggcggaatggtctcttttcggacttttgaagattttgtcaggatctttgatgaagtgatgggctgcttctctgactccccaccccagagtcccacattccctgaggcaggtcacacgtctctttatgatgaggataaggttcccagggatgaaccaattcacattctcaatgtggctatcaagactgactgtgatattgaggatgacaggctggcagctatgttcagagaatttacccagcaaaataaagctaccctggttgaccatgggatccggcgccttactttcctggttgcacaaaaggatttcagaaagcaggtcaactatgaggtggatcggagatttcatagagaattccctaaattttttacattccgagcaagggataagtttgaggaggatcgtatctatcgtcatctggagcctgctctggctttccagttagagctgaaccggatgagaaattttgacctcactgccattccatgtgctaatcacaagatgcacctgtatctcggggcagccaaggtggaagtgggcacagaagtgacagactacaggttctttgttcgtgcaatcatcaggcattctgatctggtcaccaaggaagcttcttttgaatatctgcaaaatgaaggggagcggctactcctggaagccatggatgagttggaagttgcttttaacaatacaaatgtccgcactgactgtaaccacatcttcctcaactttgtgcccacggttatcatggacccatcaaagattgaggaatccgtgcggagcatggtaatgcggtatggaagtcgcctgtggaaattgcgcgtcctccaggcagaactgaaaatcaacattcgcctgacgccaactggaaaagcaattcccatccgcctcttcctgacaaacgagtctggctattacttggatatcagcctatacaaggaagtgactgactccaggacagcacagatcatgtttcaggcatatggagacaaacagggaccactgcatggaatgttaatcaatactccatatgtgaccaaagacctgctgcaatcaaagaggttccaggcacaatccttagggacaacatacatatatgatatcccagagatgtttcggcagtccctgatcaaactctgggagtctatgtccactcaagcatttcttccatctccccctctgccttctgacatgctgacttacactgaactggtactggatgatcaaggtcagctggtccacatgaacaggcttccaggaggaaatgagattggcatggtagcttggaaaatgacctttaaaagtcctgaatatccagaaggccgagatatcattgttattggcaatgacatcacataccgaattgggtcctttgggcctcaagaggatttgttatttctcagagcttccgaacttgctagggcagaaggtattccacgcatctatgtatcagccaacagtggagcaagaatcggactggcagaagaaattcgccatatgtttcatgtggcctgggtagatcctgaggatccttacaagggatacaggtatttatatctgactcctcaagattataagagagtcagtgctctcaactctgtccattgtgaacacgtggaagatgaaggagaatccaggtacaagataacagatattattgggaaagaagagggaattggacccgagaaccttcgaggttctggaatgattgctggagaatcctcattggcctataatgagatcattaccatcagcctggtgacgtgccgggccattgggattggggcttaccttgtccggctgggacagagaaccatccaggttgagaattctcacttaattctaacaggagctggagccctcaacaaagtcctcgggcgggaagtgtacacctccaataaccagctggggggcatccagattatgcacaacaatggggtgacccactgcactgtgtgtgatgactttgaaggggttttcactgtcctgcactggctgtcttacatgcccaagagcgtgcacagttcagttcctcttctgaactcaaaggatcctatagacagaatcatcgagtttgttcccacaaagaccccatacgatcctcgatggatgctagcaggccgtcctcacccaacccaaaaaggtcagtggttgagtggcttttttgactatggatctttctcagagattatgcagccctgggcacagactgtggtggttggtagagccaggctaggaggaatacctgtgggagttgttgctgtagaaacccgaacagtagaactaagtatcccagctgatccagcaaacctggattctgaagccaagctccagcgattcaagcgctccctctccctcaagaccatcctccgaagtaagagcttggagaacttcttccttcgctcgggctctgagctcaagtgccccaccgaggtgctgctgacgcccccaaccccactgccccctccctccccaccacccacagcctcggacaggggcctggctaccccatccccctccccatgcccagtcccacgccccctggcagcgctcaaaccagtgaggctgcacagcttccaggaacatgtcttcaagcgagctagcccttgtgagctgtgccaccagctcatcgtaggaaactccaaacagggcttgcgatgtaagatgtgcaaagtcagcgtccacctctggtgctctgaggagatctcccaccagcaatgcccaggcaagacgtccacctccttccgccgcaacttcagttcccctctcctggtgcatgagccgccaccagtctgtgccacaagcaaagagtccccacccactggggacagtgggaaggtggaccctgtctacgagaccctgcgctatggcacctccctggcactgatgaaccgctccagtttcagcagcacctctgagtccccgacaaggagcctgagtgagcgggatgagctgaccgaggatggggaaggcagcatccgcagctctgaggaggggcctggtgacagtgcatctccagtattcacagccccagcagagagtgaagggccaggaccagaggagaagagtcctggacagcagctccccaaagccaccctgcggaaggatgtggggcccatgtactcctacgttgcactctacaagtttctgccccaggagaacaatgatctggctctgcagcctggagatcggatcatgctggtggatgactctaacgaggactggtggaagggcaagatcggcgaccgggttggcttcttcccagctaattttgtgcaacgggtgaggccaggcgagaatgtttggcgctgctgccaacccttctccgggaacaaggaacagggttacatgagcctcaaggagaaccagatctgcgtgggcgtgggcagaagcaaggatgctgacggcttcatccgcgtcagcagtggcaagaagcggggcctggtgccagtcgacgccctgactgagatctgagaggagccaagggaacccagatgacacccttgcccatgcctggaccttgcttctggccagggaggggatcaggcccccttgtccactccatacccttcctccctctgtccctctcctaggtgccacttaccgtggcttaggagccttttgtactggggaagattttatttcttgggtggggtgccctgagtgggttgatcctctgggacttggcggggatggggtggggtgggagggaatgaggaagctacaggtaggtccacccaacgcccaggcaccccagtctacttgctgggctgagtccagccctggggaagattcctggggaatttatttgctgcttctcccagccttcccctgcccacaccacctgcgcatgcctggcacacccctctccccacagagcctctgcttgggtctatgtgtgtgtgaccgtgcatctgctcctttgcaagtggggtcttgggagcaggcctttttgtgtcctcggccctccacccttggtggggaggggacccaggaccataggaaggtcctgagtccacctcctggtctccacctctgtcattccgtcaattctcaggaaagttttgcaggaatctctcccgttacttgaaacctgggcggacagatgaggggaaggctgaggtccctggaaggtgtaacaaatcagagactatctgttcaagtagaaaacccaagagctggccaggtgtggtggctcatgcctgtaatcccagcactttgggaggctgaggtgggcagatcacctgaggtcaggagttcaagaccagcctggccaacatggtgaaaccccgtctctactaaaagtacgaaacttagccaggcatgatgggggtctgcctgtaatgccagctactccagaggctgaggcaagagaatcacttgaacccgggaggcggaggtttcagtgagccgagattgcaccattgcaccccagcctgggcaacagagcgagactccgtctcaaaaaaaaaaaaagaaagaaagaaaaggaaacccaagagctgcctggacacacggaaacccaactgagaacaaaatcctggcccgtgcttggtcaaagcaaacccatttcactgtcaggacccccggtcacacaggaaccacccgccaggggagcctgtgactgtcagttcctgtcccaggctttgcccggccgccccaggaacccaaccctctgggctgacctttctcctgcttctctccaggctctgcaggggacagggcaggtgctgcaggagcccctttgctggctttatctgctcccttgttctggacacagagccctgggaaaaagagggggtggaagacagacaaggaaggtggaatgttctgttttggccaccaggaaatggggtggggtgggcatacacagagaggacccctctcttaatacagctgcttttctcggtgccaacctccctcccccaagctcagatcctcctcttatgcccttgattgtgccagcccatgccacccccatcctgggcacagttacaccctcccatgcagtgggagaaacacagaccctcgtacccaaaggcccctgccccacttctcccccacaaagcggggtctcaagccacactgccctgtttgctgccatgaggcccccccccccagcaatatcccaggggcgggcccaatgcccactgtacatgaggctgcatgatgggtctggggccttgctgattccccagacccctaattaaatgtttcttgtcccagccc

SEQ ID NO: 65 - DNA, 8928 bp, Homo sapiens; identical to SEQ ID NO: 62
  misc_feature (28)..(28): second gene starts at position 28

SEQ ID NO: 66 - DNA, 839 bp, Homo sapiens
  misc_feature (74)..(74): second gene starts at position 74
atgcgcctgactcacatctgctgctgctgcctcctttaccagctggggttcctgtcgaatgggatcgtttcagatggaaaggagaaaatgtcgcaaccactgaggttgctgatgttattggaatgttggatttcatacaggaagcaaacgtctatggtgtggctatatcaggttatgaaggaagagcaggaatggcttctattattttaaaaccaaatacatctttagatttggaaaaagtttatgaacaagttgtaacatttctaccagcttatgcttgtccacgatttttaagaattcaggaaaaaatggaagcaacaggaacattcaaactattgaagcatcagttggtggaagatggatttaatccactgaaaatttctgaaccactttacttcatggataacttgaaaaagtcttatgttctactgaccagggaactttatgatcaaataatgttaggggaaataaaactttaagatttttatatctagaactttcatatgctttcttaggaagagtgagaggggggtatatgattctttatgaaatggggaaagggagctaacattaattatgcatgtactatatttccttaatatgagagataattttttaattgcataagaattttaatttcttttaattgatataaacagtagttgattattctttttatctatttggagattcagtgcataactaagtattttccttaatactaaagattttaaataataaatagtggctagcggtttggacaatcactaaaaatgtactttctaataagtaaaatttctaattttgaataaaagattaaattttactgaaatatttta

SEQ ID NO: 67 - DNA, 839 bp, Homo sapiens; identical to SEQ ID NO: 66
  misc_feature (74)..(74): second gene starts at position 74

SEQ ID NO: 68 - DNA, 3515 bp, Homo sapiens
  misc_feature (122)..(122): second gene starts at position 122
atgcaggagagccagaccaagagcatgttcgtgtcccgggccctggagaagatcctagccgacaaggaggtgaagcggccccagcactcccagctgcgcagggcctgccaggtggcgctcggttccatgcaggtgatgaacaagacccggcgcatcatggagcagggcggggcgcacttcatcaacgccttcgtgaccacacccatgtgctgcccctcacgctcctccatcctcactggcaagtacgtccacaaccacaacacctacaccaacaatgagaactgctcctcgccctcctggcaggcacagcacgagagccgcacctttgccgtgtacctcaatagcactggctaccggacagctttcttcgggaagtatcttaatgaatacaacggctcctacgtgccacccggctggaaggagtgggtcggactccttaaaaactcccgcttttataactacacgctgtgtcggaacggggtgaaagagaagcacggctccgactactccaaggattacctcacagacctcatcaccaatgacagcgtgagcttcttccgcacgtccaagaagatgtacccgcacaggccagtcctcatggtcatcagccatgcagccccccacggccctgaggattcagccccacaatattcacgcctcttcccaaacgcatctcagcacatcacgccgagctacaactacgcgcccaacccggacaaacactggatcatgcgctacacggggcccatgaagcccatccacatggaattcaccaacatgctccagcggaagcgcttgcagaccctcatgtcggtggacgactccatggagacgatttacaacatgctggttgagacgggcgagctggacaacacgtacatcgtatacaccgccgaccacggttaccacatcggccagtttggcctggtgaaagggaaatccatgccatatgagtttgacatcagggtcccgttctacgtgaggggccccaacgtggaagccggctgtctgaatccccacatcgtcctcaacattgacctggcccccaccatcctggacattgcaggcctggacatacctgcggatatggacgggaaatccatcctcaagctgctggacacggagcggccggtgaatcggtttcacttgaaaaagaagatgagggtctggcgggactccttcttggtggagagaggcaagctgctacacaagagagacaatgacaaggtggacgcccaggaggagaactttctgcccaagtaccagcgtgtgaaggacctgtgtcagcgtgctgagtaccagacggcgtgtgagcagctgggacagaagtggcagtgtgtggaggacgccacggggaagctgaagctgcataagtgcaagggccccatgcggctgggcggcagcagagccctctccaacctcgtgcccaagtactacgggcagggcagcgaggcctgcacctgtgacagcggggactacaagctcagcctggccggacgccggaaaaaactcttcaagaagaagtacaaggccagctatgtccgcagtcgctccatccgctcagtggccatcgaggtggacggcagggtgtaccacgtaggcctgggtgatgccgcccagccccgaaacctcaccaagcggcactggccaggggcccctgaggaccaagatgacaaggatggtggggacttcagtggcactggaggccttcccgactactcagccgccaaccccattaaagtgacacatcggtgctacatcctagagaacgacacagtccagtgtgacctggacctgtacaagtccctgcaggcctggaaagaccacaagctgcacatcgaccacgagattgaaaccctgcagaacaaaattaagaacctgagggaagtccgaggtcacctgaagaaaaagcggccagaagaatgtgactgtcacaaaatcagctaccacacccagcacaaaggccgcctcaagcacagaggctccagtctgcatcctttcaggaagggcctgcaagagaaggacaaggtgtggctgttgcgggagcagaagcgcaagaagaaactccgcaagctgctcaagcgcctgcagaacaacgacacgtgcagcatgccaggcctcacgtgcttcacccacgacaaccagcactggcagacggcgcctttctggacactggggcctttctgtgcctgcaccagcgccaacaataacacgtactggtgcatgaggaccatcaatgagactcacaatttcctcttctgtgaatttgcaactggcttcctagagtactttgatctcaacacagacccctaccagctgatgaatgcagtgaacacactggacagggatgtcctcaaccagctacacgtacagctcatggagctgaggagctgcaagggttacaagcagtgtaacccccggactcgaaacatggacctgggacttaaagatggaggaagctatgagcaatacaggcagtttcagcgtcgaaagtggccagaaatgaagagaccttcttccaaatcactgggacaactgtgggaaggctgggaaggttaagaaacaacagaggtggacctccaaaaacatagaggcatcacctgactgcacaggcaatgaaaaaccatgtgggtgatttccagcagacctgtggtattggccaggaggcctgagaaagcaagcacgcactctcagtcaacatgacagattctggaggataaccagcaggagcagagataacttcaggaagtccatttttgcccctgcttttgctttggattatacctcaccagctgcacaaaatgcattttttcgtatcaaaaagtcaccactaaccctcccccagaagctcacaaaggaaaacggagagagcgagcgagagagatttccttggaaatttctcccaagggcgaaagtcattggaatttttaaatcataggggaaaagcagtcctgttctaaatcctcttattcttttggtttgtcacaaagaaggaactaagaagcaggacagaggcaacgtggagaggctgaaaacagtgcagagacgtttgacaatgagtcagtagcacaaaagagatgacatttacctagcactataaaccctggttgcctctgaagaaactgccttcattgtatatatgtgactatttacatgtaatcaacatgggaacttttaggggaacctaataagaaatcccaattttcaggagtggtggtgtcaataaacgctctgtggccagtgtaaaagaaaatccctcgcagttgtggacatttctgttcctgtccagataccatttctcctagtatttctttgttatgtcccagaactgatgttttttttttaaggtactgaaaagaaatgaagttgatgtatgtcccaagttttgatgaaactgtatttgtaaaaaaaattttgtagtttaagtattgtcatacagtgttcaaaaccccagccaatgaccagcagttggtatgaagaacctttgacattttgtaaaaggccatttcttggga

SEQ ID NO: 69 - DNA, 3515 bp, Homo sapiens; identical to SEQ ID NO: 68
  misc_feature (122)..(122): second gene starts at position 122

SEQ ID NO: 70 - DNA, 3506 bp, Homo sapiens
  misc_feature (122)..(122): second gene starts at position 122
atgcaggagagccagaccaagagcatgttcgtgtcccgggccctggagaagatcctagccgacaaggaggtgaagcggccccagcactcccagctgcgcagggcctgccaggtggcgctcggttccatgcaggtgatgaacaagacccggcgcatcatggagcagggcggggcgcacttcatcaacgccttcgtgaccacacccatgtgctgcccctcacgctcctccatcctcactggcaagtacgtccacaaccacaacacctacaccaacaatgagaactgctcctcgccctcctggcaggcacagcacgagagccgcacctttgccgtgtacctcaatagcactggctaccggacagctttcttcgggaagtatcttaatgaatacaacggctcctacgtgccacccggctggaaggagtgggtcggactccttaaaaactcccgcttttataactacacgctgtgtcggaacggggtgaaagagaagcacggctccgactactccaaggattacctcacagacctcatcaccaatgacagcgtgagcttcttccgcacgtccaagaagatgtacccgcacaggccagtcctcatggtcatcagccatgcagccccccacggccctgaggattcagccccacaatattcacgcctcttcccaaacgcatctcagcacatcacgccgagctacaactacgcgcccaacccggacaaacactggatcatgcgctacacggggcccatgaagcccatccacatggaattcaccaacatgctccagcggaagcgcttgcagaccctcatgtcggtggacgactccatggagacgatttacaacatgctggttgagacgggcgagctggacaacacgtacatcgtatacaccgccgaccacggttaccacatcggccagtttggcctggtgaaagggaaatccatgccatatgagtttgacatcagggtcccgttctacgtgaggggccccaacgtggaagccggctgtctgaatccccacatcgtcctcaacattgacctggcccccaccatcctggacattgcaggcctggacatacctgcggatatggacgggaaatccatcctcaagctgctggacacggagcggccggtgaatcggtttcacttgaaaaagaagatgagggtctggcgggactccttcttggtggagagaggcaagctgctacacaagagagacaatgacaaggtggacgcccaggaggagaactttctgcccaagtaccagcgtgtgaaggacctgtgtcagcgtgctgagtaccagacggcgtgtgagcagctgggacagaagtggcagtgtgtggaggacgccacggggaagctgaagctgcataagtgcaagggccccatgcggctgggcggcagcagagccctctccaacctcgtgcccaagtactacgggcagggcagcgaggcctgcacctgtgacagcggggactacaagctcagcctggccggacgccggaaaaaactcttcaagaagaagtacaaggccagctatgtccgcagtcgctccatccgctcagtggccatcgaggtggacggcagggtgtaccacgtaggcctgggtgatgccgcccagccccgaaacctcaccaagcggcactggccaggggcccctgaggaccaagatgacaaggatggtggggacttcagtggcactggaggccttcccgactactcagccgccaaccccattaaagtgacacatcggtgctacatcctagagaacgacacagtccagtgtgacctggacctgtacaagtccctgcaggcctggaaagaccacaagctgcacatcgaccacgagattgaaaccctgcagaacaaaattaagaacctgagggaagtccgaggtcacctgaagaaaaagcggccagaagaatgtgactgtcacaaaatcagctaccacacccagcacaaaggccgcctcaagcacagaggctccagtctgcatcctttcaggaagggcctgcaagagaaggacaaggtgtggctgttgcgggagcagaagcgcaagaagaaactccgcaagctgctcaagcgcctgcagaacaacgacacgtgcagcatgccaggcctcacgtgcttcacccacgacaaccagcactggcagacggcgcctttctggacactggggcctttctgtgcctgcaccagcgccaacaataacacgtactggtgcatgaggaccatcaatgagactcacaatttcctcttctgtgaatttgcaactggcttcctagagtactttgatctcaacacagacccctaccagctgatgaatgcagtgaacacactggacagggatgtcctcaaccagctacacgtacagctcatggagctgaggagctgcaagggttacaagcagtgtaacccccggactcgaaacatggacctggatggaggaagctatgagcaatacaggcagtttcagcgtcgaaagtggccagaaatgaagagaccttcttccaaatcactgggacaactgtgggaaggctgggaaggttaagaaacaacagaggtggacctccaaaaacatagaggcatcacctgactgcacaggcaatgaaaaaccatgtgggtgatttccagcagacctgtggtattggccaggaggcctgagaaagcaagcacgcactctcagtcaacatgacagattctggaggataaccagcaggagcagagataacttcaggaagtccatttttgcccctgcttttgctttggattatacctcaccagctgcacaaaatgcattttttcgtatcaaaaagtcaccactaaccctcccccagaagctcacaaaggaaaacggagagagcgagcgagagagatttccttggaaatttctcccaagggcgaaagtcattggaatttttaaatcataggggaaaagcagtcctgttctaaatcctcttattcttttggtttgtcacaaagaaggaactaagaagcaggacagaggcaacgtggagaggctgaaaacagtgcagagacgtttgacaatgagtcagtagcacaaaagagatgacatttacctagcactataaaccctggttgcctctgaagaaactgccttcattgtatatatgtgactatttacatgtaatcaacatgggaacttttaggggaacctaataagaaatcccaattttcaggagtggtggtgtcaataaacgctctgtggccagtgtaaaagaaaatccctcgcagttgtggacatttctgttcctgtccagataccatttctcctagtatttctttgttatgtcccagaactgatgttttttttttaaggtactgaaaagaaatgaagttgatgtatgtcccaagttttgatgaaactgtatttgtaaaaaaaattttgtagtttaagtattgtcatacagtgttcaaaaccccagccaatgaccagcagttggtatgaagaacctttgacattttgtaaaaggccatttcttggga

SEQ ID NO: 71 - DNA, 6415 bp, Homo sapiens
  misc_feature (138)..(138): second gene starts at position 138
atggccgcgcaggtcgcccccgccgccgccagcagcctgggcaacccgccgccgccgccgccctcggagctgaagaaagccgagcagcagcagcgggaggaggcggggggcgaggcggcggcggcggcagcggccgagcgcggggaaatgaaggcagccgccgggcaggaaagcgagggccccgccgtggggccgccgcagccgctgggaaaggagctgcaggacggggccgagagcaatgggggtggcggcggcggcggagccggcagcggcggcgggcccggcgcggagccggacctgaagaactcgaacgggaacgcgggccctaggcccgccctgaacaataacctcacggagccgcccggcggcggcggtggcggcagcagcgatggggtgggggcgcctcctcactcagccgcggccgccttgccgcccccagcctacggcttcgggcaaccctacggccggagcccgtctgccgtcgccgccgccgcggccgccgtcttccaccaacaacatggcggacaacaaagccctggcctggcagcgctgcagagcggcggcggcgggggcctggagccctacgcggggccccagcagaactctcacgaccacggcttccccaaccaccagtacaactcctactaccccaaccgcagcgcctaccccccgcccgccccggcctacgcgctgagctccccgagaggtggcactccgggctccggcgcggcggcggctgccggctccaagccgcctccctcctccagcgcctccgcctcctcgtcgtcttcgtccttcgctcagcagcgcttcggggccatggggggaggcggcccctccgcggccggcgggggaactccccagcccaccgccacccccaccctcaaccaactgctcacgtcgcccagctcggcccggggctaccagggctaccccgggggcgactacagtggcgggccccaggacgggggcgccggcaagggcccggcggacatggcctcgcagtgttggggggctgcggcggcggcagctgcggcggcggccgcctcgggaggggcccaacaaaggagccaccacgcgcccatgagccccgggagcagcggcggcggggggcagccgctcgcccggacccctcaggatgtagtaactggagttagtcccctgctcttcaggaaactcagtaatcctgacatattttcatccactggaaaagttaaacttcagcgacaactgagtcaggatgattgtaagttatggagaggaaacctggccagctctctatcgggtaagcagctgctccctttgtccagcagtgtacatagcagtgtgggacaggtgacttggcagtcgtcaggagaagcatcaaacctggttcgaatgagaaaccagtcccttggacagtctgcaccttctcttactgctggcctgaaggagttgagccttccaagaagaggcagcttttgtcggacaagtaaccgcaagagcttgattgtgacctctagcacatcacctacactaccacggccacactcaccactccatggccacacaggtaacagtcctttggacagcccccggaatttctctccaaatgcacctgctcacttttcttttgttcctgcccgtaggactgatgggcggcgctggtctttggcctctttgccctcttcaggatatggaactaacactcctagctccactgtctcatcatcatgctcctcacaggaaaagctgcatcagttgcctttccagcctacagctgatgagctgcactttttgacgaagcatttcagcacagagagcgtaccagatgaggaaggacggcagtccccagccatgcggcctcgctcccggagcctcagtcccggacgatccccagtatcctttgacagtgaaataataatgatgaatcatgtttacaaagaaagattcccaaaggccaccgcacaaatggaagagcgactagcagagtttatttcctccaacactccagacagcgtgctgcccttggcagatggagccctgagctttattcatcatcaggtgattgagatggcccgagactgcctggataaatctcggagtggcctcattacatcacaatacttctacgaacttcaagataatttggagaaacttttacaagatgctcatgagcgctcagagagctcagaagtggcttttgtgatgcagctggtgaaaaagctgatgattatcattgcccgcccagcacgtctcctggaatgcctggagtttgaccctgaagagttctaccaccttttagaagcagctgagggccacgccaaagagggacaagggattaaatgtgacattccccgctacatcgttagccagctgggcctcacccgggatcccctagaagaaatggcccagttgagcagctgtgacagtcctgacactccagagacagatgattctattgagggccatggggcatctctgccatctaaaaagacaccctctgaagaggacttcgagaccattaagctcatcagcaatggcgcctatggggctgtatttctggtgcggcacaagtccacccggcagcgctttgccatgaagaagatcaacaagcagaacctgatcctacggaaccagatccagcaggccttcgtggagcgtgacatactgactttcgctgagaacccctttgtggtcagcatgttctgctcctttgataccaagcgccacttgtgcatggtgatggagtacgttgaagggggagactgtgccactctgctgaagaatattggggccctgcctgtggacatggtgcgtctatactttgcggaaactgtgctggccctggagtacttacacaactatggcatcgtgcaccgtgacctcaagcctgacaacctcctaattacatccatggggcacatcaagctcacggactttggactgtccaaaattggcctcatgagtctgacaacgaacttgtatgagggtcatattgaaaaggatgcccgggaattcctggacaagcaggtatgcgggaccccagaatacattgcgcctgaggtgatcctgcgccagggctatgggaagccagtggactggtgggccatgggcattatcctgtatgagttcctggtgggctgcgtccctttttttggagatactccggaggagctctttgggcaggtgatcagtgatgagattgtgtggcctgagggtgatgaggcactgcccccagacgcccaggacctcacctccaaactgctccaccagaaccctctggagagacttggcacaggcagtgcctatgaggtgaagcagcacccattctttactggtctggactggacaggacttctccgccagaaggctgaatttattcctcagttggagtcagaggatgatactagctattttgacacccgctcagagcgataccaccacatggactcggaggatgaggaagaagtgagtgaggatggctgccttgagatccgccagttctcttcctgctctccaaggttcaacaaggtgtacagcagcatggagcggctctcactgctcgaggagcgccggacaccacccccgaccaagcgcagcctgagtgaggagaaggaggaccattcagatggcctggcagggctcaaaggccgagaccggagctgggtgattggctcccctgagatattacggaagcggctgtcggtgtctgagtcatcccacacagagagtgactcaagccctccaatgacagtgcgacgccgctgctcaggcctcctggatgcgcctcggttcccggagggccctgaggaggccagcagcaccctcaggaggcaaccacaggagggtatatgggtcctgacacccccatctggagagggggtatctgggcctgtcactgaacactcaggggagcagcggccaaagctggatgaggaagctgttggccggagcagtggttccagtccagctatggagacccgaggccgtgggacctcacagctggctgagggagccacagccaaggccatcagtgacctggctgtgcgtagggcccgccaccggctgctctctggggactcaacagagaagcgcactgctcgccctgtcaacaaagtgatcaagtccgcctcagccacagccctctcactcctcattccttcggaacaccacacctgctccccgttggccagccccatgtccccacattctcagtcgtccaacccatcatcccgggactcttctccaagcagggacttcttgccagcccttggcagcatgaggcctcccatcatcatccaccgagctggcaagaagtatggcttcaccctgcgggccattcgcgtctacatgggtgactccgatgtctacaccgtgcaccatatggtgtggcacgtggaggatggaggtccggccagtgaggcagggcttcgtcaaggtgacctcatcacccatgtcaatggggaacctgtgcatggcctggtgcacacggaggtggtagagctgatcctgaagagtggaaacaaggtggccatttcaacaactcccctggagaacacatccattaaagtggggccagctcggaagggcagctacaaggccaagatggcccgaaggagcaagaggagccgcggcaaggatgggcaagaaagcagaaaaaggagctccctgttccgcaagatcaccaagcaagcatccctgctccacaccagccgcagcctttcttcccttaaccgctccttgtcatcaggggagagtgggccaggctctcccacacacagccacagcctttccccccgatctcccactcaaggctaccgggtgacccccgatgctgtgcattcagtgggagggaattcatcacagagcagctcccccagctccagcgtgcccagttccccagccggctctgggcacacacggcccagctccctccacggtctggcacccaagctccaacgccagtaccgctctccacggcgcaagtcagcaggcagcatcccactgtcaccactggcccacaccccttctcccccacccccaacagcttcacctcagcggtccccatcgcccctgtctggccatgtagcccaggcctttcccacaaagcttcacttgtcacctcccctgggcaggcaactctcacggcccaagagtgcggagccaccccgttcaccactactcaagagggtgcagtcggctgagaaactggcagcagcacttgccgcctctgagaagaagctagccacttctcgcaagcacagccttgacctgccccactctgaactaaagaaggaactgccgcccagggaagtgagccctctggaggtagttggagccaggagtgtgctgtctggcaagggggccctgccagggaagggggtgctgcagcctgctccctcacgggccctaggcaccctccggcaggaccgagccgaacgacgggagtcgctgcagaagcaagaagccattcgtgaggtggactcctcagaggacgacaccgaggaagggcctgagaacagccagggtgcacaggagctgagcttggcacctcacccagaagtgagccagagtgtggcccctaaaggagcaggagagagtggggaagaggatcctttcccgtccagagaccctaggagcctgggcccaatggtcccaagcctattgacagggatcacactggggcctcccagaatggaaagtcccagtggtccccacaggaggctcgggagcccacaagccattgaggaggctgccagctcctcctcagcaggccccaacctaggtcagtctggagccacagaccccatccctcctgaaggttgctggaaggcccagcacctccacacccaggcactaacagcactttctcccagcacttcgggactcacccccaccagcagttgctctcctcccagctccacctctgggaagctgagcatgtggtcctggaaatcccttattgagggcccagacagggcatccccaagcagaaaggcaaccatggcaggtgggctagccaacctccaggatttggaaaacacaactccagcccagcctaagaacctgtctcccagggagcaggggaagacacagccacctagtgcccccagactggcccatccatcttatgaggatcccagccagggctggctatgggagtctgagtgtgcacaagcagtgaaagaggatccagccctgagcatcacccaagtgcctgatgcctcaggtgacagaaggcaggacgttccatgccgaggctgccccctcacccagaagtctgagcccagcctcaggaggggccaagaaccagggggccatcaaaagcatcgggatttggcattggttccagatgagcttttaaagcaaacatagcagttgtttgccatttcttgcactcagacctgtgtaatatatgctcctggaaaccatc

SEQ ID NO: 72 - DNA, 6415 bp, Homo sapiens; identical to SEQ ID NO: 71
  misc_feature (138)..(138): second gene starts at position 138

SEQ ID NO: 73 - DNA, 5270 bp, Homo sapiens
  misc_feature (138)..(138): second gene starts at position 138
atggccgcgcaggtcgcccccgccgccgccagcagcctgggcaacccgccgccgccgccgccctcggagctgaagaaagccgagcagcagcagcgggaggaggcggggggcgaggcggcggcggcggcagcggccgagcgcggggaaatgaaggcagccgccgggcaggaaagcgagggccccgccgtggggccgccgcagccgctgggaaaggagctgcaggacggggccgagagcaatgggggtggcggcggcggcggagccggcagcggcggcgggcccggcgcggagccggacctgaagaactcgaacgggaacgcgggccctaggcccgccctgaacaataacctcacggagccgcccggcggcggcggtggcggcagcagcgatggggtgggggcgcctcctcactcagccgcggccgccttgccgcccccagcctacggcttcgggcaaccctacggccggagcccgtctgccgtcgccgccgccgcggccgccgtcttccaccaacaacatggcggacaacaaagccctggcctggcagcgctgcagagcggcggcggcgggggcctggagccctacgcggggccccagcagaactctcacgaccacggcttccccaaccaccagtacaactcctactaccccaaccgcagcgcctaccccccgcccgccccggcctacgcgctgagctccccgagaggtggcactccgggctccggcgcggcggcggctgccggctccaagccgcctccctcctccagcgcctccgcctcctcgtcgtcttcgtccttcgctcagcagcgcttcggggccatggggggaggcggcccctccgcggccggcgggggaactccccagcccaccgccacccccaccctcaaccaactgctcacgtcgcccagctcggcccggggctaccagggctaccccgggggcgactacagtggcgggccccaggacgggggcgccggcaagggcccggcggacatggcctcgcagtgttggggggctgcggcggcggcagctgcggcggcggccgcctcgggaggggcccaacaaaggagccaccacgcgcccatgagccccgggagcagcggcggcggggggcagccgctcgcccggacccctcagggtcactcaggatgtgtcaactgtctggagtggaatgagaaaggagacttgctggcctctggttccgatgaccagcacacgattgtgtgggacccgctgcaccacaagaagctgctctccatgcacacgggacacaccgcaaatatcttctctgtcaagttcctgcctcacgctggggaccgcatcttgatcacgggggcagccgactctaaggtgcatgtgcacgacctgacagtaaaggagaccatccacatgtttggagaccacacaaaccgggtgaagcgcatcgccacagcgcccatgtggcccaacacattctggagtgctgctgaggatgggcttatccgccagtatgaccttcgagagaacagcaaacactcggaggtgctgattgacctgacagagtactgtggccagctggtggaggccaagtgcctcactgtcaacccccaggacaacaactgcctggcagttggggccagcgggcccttcgtgaggctctatgacatccgcatgatccataaccacagaaagagcatgaagcagagcccttcagcgggtgtgcacaccttctgtgaccggcagaaaccccttccggacggtgcagcccagtattacgtagcaggtcacctgccagtgaagcttcctgactacaacaaccgtttgagagtgctggttgccacctatgtgaccttcagccccaatggcacagagctactagtcaacatggggggggaacaggtctatttgtttgacttgacttacaagcagcggccgtacaccttcctcttgcctagaaaatgccactcctcgggggtccagaatggcaagatgtccaccaacggtgtgtccaacggtgtgtccaatggcctgcaccttcatagcaatggcttccggctgccggagagtaggggacatgtcagcccccaagtagagctaccaccatacctggagcgtgtgaaacagcaagccaatgaggcttttgcctgccagcagtggacccaagccattcagctttacagcaaggctgtgcagagggcccctcacaatgccatgctttatggaaaccgagcagcagcctacatgaagcgcaagtgggatggtgaccactatgatgccctgagggactgcctcaaggccatctccctaaacccatgccacctgaaggcacactttcgcctggcccgctgcctctttgagctcaagtatgtggctgaagccctggagtgcctggacgacttcaaagggaaatttccggagcaggcccacagcagcgcttgtgatgcattgggccgcgacatcacagctgccctcttctctaaaaatgatggtgaggagaagaagggacctggtggcggcgccccagtccgcctccgcagcacgagccgcaaggactccatctcagaggatgaaatggtgctgcgggagcgaagctacgactatcagttccgctactgcggccactgcaacaccaccacggatatcaaagaggccaatttctttggcagcaacgctcagtatatcgtcagtggctctgacgatggctccttcttcatctgggaaaaggagaccaccaacctggtccgtgtgctccaaggggatgagtccattgtcaactgcctgcagccacaccccagctactgcttcctggccaccagtggcatcgatcctgttgtgcggctctggaacccccgaccagagagtgaagacctcacaggccgagtcgtggaagatatggagggtgcttcacaggccaaccagcggcgcatgaatgcagacccgttggaggtgatgctgctcaacatgggctaccggatcacgggcctgagcagtgggggtgccggggcctctgatgatgaggacagctctgagggccaggtgcagtgccggcccagctagaccctccagccctggtccccagcccctgctactggctggaccctctgccctgggcaggaggtcaggggattctgttttggtttgtcttccccaccacccttttttttcatttcccctgttttgtttgttagtttggcgttaggggtggaggttgctacaacttgctggctttcggactctgggctgattgtcccctgactatccccagccctgaaaaaaagagcaggaggggacacccctccatatgcccccccccatctcctgctttcatgtccctggagggctctggcctgcctcaaaaccccttctgcctcaggtggggaggaacaagctgaactgtcttcagggactgtcctgccctttagctggcagcagcaggaggagtgggattcccaattggtaagggctcgccttggcctgttgccactcttgctccctagcctgcaaggctagctcccctgtggtcttcaggaaaggttttgaaaaaggatgggtcccaccctccctccagagccaccagtgttagagcggagcccaaaggaaggatgggagccctggagtgggcaagaccaggccacctgctgaggtcgctgtggagcaccctcgctcctctcctggctactagctctggccctgcacctactctcactggccacctctggaggctctgcctttcccaagggccctggcagagggtggggcactgcaccttaccccacccatccatgccagcacttctgcactacggccattctcctcttgggcgctcctcagcctcactgtgacctttctgccagagctcccagccaggcctactctgctgaggtggcgcttcctgctaagggcccttctctgccctttctgccctccttcccatcccacatgctgagccgccacaaagaccaaagaagtgatggcttttctctgtcccctgctgctctgaggggagaggggtgggtctcctgagccactcagatgggaaagtcccttactcggcccctccctccccagcagccccaagctttacactggatgcagcgatcaacccaccactcaccaggcctctcctcccctctgcccccggctcttagctccagctgctccaggtagttggttcatccttccccctctctccctccctgcttccccttcagtgcttacttggctccagccctccagctgcagcccctggggaaaagcagcctcccttctcctctccctccactccctcgctccctccctcagcccctgtctctgccaggtgcctcctctcagtcaggcttcagagcagccctggagacaggagggccatgttaaaagctttttcacagttttaagaagacaagtggagggtgaggatagtggtggggggtctggcaccatctcattgctttaatcccagcaacacaggtggcagcttctcccccttccttcccaccccagtccctcttcccacccctctcttctagcttggtaatgaagtatatttattggtgaaggaaacagctgctgctgcttctcctgctgctgggacctgctcccctgtctcttctccgtgacctttctctagccagggagaagggagagcaggagtattggggctgggccctggggcccaaggaccagctgggtcccctttgctttcttgtgttccagccacctgccatttcctccctgcctcccaccctccctccctgccccctgtcctgcttcccaccccctgcctgcccagcctgggccctgcagtgtggagagacacataagccttactgtcctctgggggcaggagccgagcctttttgttgctccgctcccaggagagtgagggtgacgcaattgattaaaaccattttgttctaggtgtggctggtggcatttgtggggtgcagatgggtcttggaaccaaagtgagggcacctggtccctcacctctgtagctctatgacttagtaaccacacctctactggacagaatgaggcctgccttgaagggtcaccgtgagcagcggccacccagcccagcagggctgagtgcagagcccagctctcatggctgtgatttgtaatcatcagctttcactctctggctgttttctcatcagtaaaataagggacttggaatcttagtggtttttcaaaccattttacattgtgacccaatatacacatgattacttgtagatatgtgtgtgtgtatatatatataaaaaaaatgaacaaaagttttacacaat

SEQ ID NO: 74 - DNA, 5270 bp, Homo sapiens; identical to SEQ ID NO: 73
  misc_feature (138)..(138): second gene starts at position 138

SEQ ID NO: 75 - DNA, 2093 bp, Homo sapiens
  misc_feature (52)..(52): second gene starts at position 52
atgaaaatggaggaaatgtctttgtctggcctggataacagcaaactagaggtgcccgctcccagcccttggtgcagttccagcgccgggctgcccgcctgcctgtcagctccacctacagccagctctgggcgtcacttacgcctgccagcacccagcaggaaatgcgggctttccctgccttcctgggcactgaggcctccagctcaggcaatggctcctggctggagctgatgcccctgactgctgtgagcgtgcacctgctgacaggtaatgggacagaggtgccgctctcaggccccattcacctgtccctgcccgtgccctccgagactcgtgccctcaccgtgggcaccagcattccagcctggagatttgaccccaagagtgggctgtgggtgcgcaatggcactggtgtaatccggaaggaaggccggcagctctactggaccttcgtctccccccagctggggtactgggtggccgccatggcctcccccacggctgggctggtcaccatcacgtcgggcatccaggacatcggcacctaccacaccatcttcttgctcaccatcctggcagccctggccctgctggtgcttatcctgctgtgtctgctcatctactactgccggaggcgctgcctgaagccgaggcaacagcaccgcaagctgcagctctcggggccctctgacggtaacaaacgagaccaggccacctcgatgtcccagctccacctcatctgtgggggacccctggaacccgccccgtcgggggaccccgaggctccgcctccaggccccctccactcggccttctccagctcccgggacttggcctcctcccgggatgacttcttccgcaccaagccgcgctctgccagccgcccggccgccgagccttcgggtgcccgcgggggcgagagcgccgggctcaagggcgctcgctcggccgagggccccggcgggctggagcccggcctagaggagcaccggcgggggccctcgggggctgcggccttcctgcacgagccgccctcgccgccgccgcccttcgaccactacctgggccacaagggggcggccgagggcaagacccccgacttcctgctgtcgcagtcggtggaccagctggcgcggccgccgtcgctgggccaggcggggcagctcatcttctgcggctccatcgaccacctcaaggacaacgtctaccgcaacgtcatgcccaccctggtgatccccgcgcactacgtgcgcctcggcggcgaggcgggcgccgccggcgtgggcgacgagccggccccgccggagggcacggcacccggcccggcgcgcgcttttccccagcccgacccccagcgcccgcagatgccgggccactcgggcccggggggcgagggcggcgggggcggcggcgagggctggggggccgggcgcgcggcgcccgtcagtggctcagtcaccatccctgtgctattcaacgagtccaccatggcgcagctcaacggggagctgcaggccctgaccgagaagaagctgctggaactgggcgtgaagccgcacccgcgcgcctggttcgtgtccctcgacgggcgctccaactcgcaagtgcgccactcttacatcgacctgcaggcgggcggcggggcacgcagcaccgacgccagcctggactcgggcgtagatgtccacgaggcgcggcccgcgcgccgccggcccgcgagggaggagcgggagcgcgccccgcctgccgcgccgccgccgccgcccgcgcccccgcgcctggcgctcagcgaggacacggagcccagcagcagcgagagccgcacgggcctctgctctccggaggacaactcgctgacgccgctgctggacgaggtggcggcgcccgagggccgggcggccacggtaccccgggggcggggccgcagccgcggggacagctcccgcagcagcgccagcgagctgcggcgcgactcgctcaccagcccggaggacgagctgggggcggaggtgggcgacgaggcgggagacaagaagagcccgtggcagcggcgggaggagcggccgctgatggtgttcaacgtcaagtag

SEQ ID NO: 76 - DNA, 2093 bp, Homo sapiens; identical to SEQ ID NO: 75
  misc_feature (52)..(52): second gene starts at position 52

SEQ ID NO: 77 - DNA, 1210 bp, Homo sapiens
  misc_feature (181)..(181): second gene starts at position 181
atgcagcggaccgggggcggggctccgaggcccgggcgcaaccacgggctcccaggcagcctccgccagccggaccccgtcgccctcctgatgctgctcgtggacgctgatcagccggagcccatgcgcagcggggcgcgcgagctcgcgctcttcctgacccccgagcctggggccgaggtacctttgacaggagcgtgaccctgctggaggtgtgcgggagctggcctgagggcttcgggctgcggcacatgtcctccatggagcacacggaggagggcctccgggagcgacttgccgacgccatggccgagtcacctagccgggacgtcgtgggatccggaacagaacttcagcgagagggaagcatcgagactctgagtaacagctcaggctccaccagcggcagcataccaagaaactttgatggctaccgatctccgctgcccaccaatgagagccagcccctcagcctcttcccgactggcttcccgtaggtaccagcaacctgcttctgactggccagccccctcccctgctggaggaggggagaagccccgctctggtcctacccttcagtctctgctcttccttcatcaaccaccttccccaagcttagtgacagcagccgcccatcctacctggatggagaagagacccttctccaagcacctcagcgcacttgccctctgccacacctgtcggtggaggctgtggccaggagagactgtagaagctcggtccctgtgtatgtttgcatatgacatcctgcattggatccgcttttgtattttttaaccatacccacggtggggcgggtggggggagcctggaacagtgaccagatctgggggcctgagtggggacagagttgatcgtccacctggccattttgaccctgagtggacagtcacagcctcagctcatgtctggctgtgacacacactgcccccagcttcccttggtcagccccactccagcacggggtgaacggaggcccagagtactagggaaggaggaagggaggacatgcctcttcttcctcctttctttccccatctgttcatgggaagagtttgtctttcttatctttaagcccctttaccctggtcctgtactgatcagtgaaggaaaccgtggttactgaggccctgttgaaaagtgcacgtcttgtccaataaatcacgctgcagttggtgtccatccctga

SEQ ID NO: 78 - DNA, 1210 bp, Homo sapiens; identical to SEQ ID NO: 77
  misc_feature (181)..(181): second gene starts at position 181

SEQ ID NO: 79 - DNA, 1210 bp, Homo sapiens; identical to SEQ ID NO: 77
  misc_feature (181)..(181): second gene starts at position 181

SEQ ID NO: 80 - DNA, 1210 bp, Homo sapiens; identical to SEQ ID NO: 77
  misc_feature (181)..(181): second gene starts at position 181

SEQ ID NO: 81 - DNA, 1210 bp, Homo sapiens; identical to SEQ ID NO: 77
  misc_feature (181)..(181): second gene starts at position 181

SEQ ID NO: 82 - DNA, 1210 bp, Homo sapiens; identical to SEQ ID NO: 77
  misc_feature (181)..(181): second gene starts at position 181

SEQ ID NO: 83 - DNA, 5735 bp, Homo sapiens
  misc_feature (681)..(681): second gene starts at position 681
atgtccccagaagtggccttgaaccgaatatctccaatgctctcccctttcatatctagcgtggtccggaatggaaaagtgggactggatgctacaaactgtttgaggataactgacttaaaatctggctgcacatcattgactcctgggcccaactgtgaccgatttaaactgcacataccatatgctggagagacattaaagtgggatatcattttcaatgcccaatacccagaactgcctcccgattttatctttggagaagatgctgaattcctgccagacccctcagctttgcagaatcttgcctcctggaatccttcaaatcctgaatgtctcttacttgtggtgaaggaacttgtgcaacaatatcaccaattccaatgtagccgcctccgggagagctcccgcctcatgtttgaataccagacattactggaggagccacagtatggagagaacatggaaatttatgctgggaaaaaaaacaactggactggtgaattttcagctcgtttccttttgaagctgcccgtagatttcagcaatatccccacataccttctcaaggatgtaaatgaagaccctggagaagatgtggccctcctctctgttagttttgaggacactgaagccacccaggtgtaccccaagctgtacttgtcacctcgaattgagcagaacatgcttgccaactcagccagcgtgaggatcctcatcaagggaggcaaggtggtgaacgatgactgcacccacgaggctgacgtctacatcgagaatggcatcatccagcaggtgggccgcgagctcatgatccctggcggggccaaggtgattgatgccacaggaaaactggtgatccctggtggcatcgacaccagcacccacttccaccagaccttcatgaatgccacgtgcgtggacgacttctaccatgggaccaaggcagcactcgtcggaggcaccaccatgatcatcggccacgtcctgcccgacaaggagacctcccttgtggacgcttatgagaagtgccgaggtctggccgaccccaaggtctgctgtgattacgccctccacgtggggatcacctggtgggcacccaaggtgaaagcagaaatggagacactggtgagggagaagggtgtcaactcgttccagatgttcatgacctacaaggacctgtacatgcttcgagacagtgagctgtaccaagtgttgcacgcttgcaaggacattggggcaatcgcccgcgtccatgctgaaaatggggagcttgtggccgagggtgctaaggaggcactggatttggggatcacaggcccagaaggaatcgagatcagccgtccagaggagctggaagctgaagccactcatcgtgttatcaccattgcaaacaggactcactgtccaatctacctggtcaacgtgtccagtatctcggctggtgacgttatcgcagctgctaagatgcaagggaaggttgtgctggcggagaccaccactgcacatgccacgctgacaggcttacactactaccaccaggactggtcccacgcggctgcctatgtcacggtgcctcccctgagactggacaccaacacctcaacctacctcatgagcctgctggccaatgacactctgaacatcgtggcatcagatcaccggcctttcaccacaaagcagaaagctatgggcaaggaagacttcaccaagatcccacatggagtgagtggcgtgcaggaccgcatgagcgtcatctgggagagaggagtggttggaggaaagatggatgagaaccgttttgtggccgttaccagttccaacgcagctaagcttctgaacctgtatccccgcaagggccgcattattcccggagccgatgctgatgtggtggtgtgggacccagaagccacaaagaccatctcagccagcacgcaggtccagggaggagacttcaacctgtatgagaacatgcgctgccacggcgtgccactggtcaccatcagccgggggcgcgtcgtgtatgagaacggcgtcttcatgtgcgccgagggcaccggcaagttctgtcccctgaggtccttcccagacactgtctacaagaagctggtccagagagagaagactttaaaggttagaggagtggaccgcactccctacctgggggatgtcgctgttgtcgtgcaccctgggaaaaaagagatgggaaccccactcgcagacactcctacccggcccgtcacccggcatgggggcatgagggaccttcacgaatccagcttcagcctctctggctctcagatcgatgaccatgttccaaagcgagcttcagctcggatcctcgctcctcccggaggcaggtcgagtggcatttggtaaaggcattgccaagccccccgagtgaggacgcaccgccgccaccagcccgcaactctccagccgaagctgcaggggcaggagaggctgggctgggtggcacaccacccgaggggggccccgggacccacggagccctccctatgtctgcaaagtgattcactgtgcttcgagccaactctaacaggcactttgagatgtgttcctcctgctgtagtcctttctgccttggcctcggcgggcttttctggggcccaggaagcccacactatgcacagagcccaatgcatagagccctggccagcccttcctctcactcctgcctccgctggctttgggaaagcccagactttagtgccctgccccctggctgactggccagttgcccagagcactttagcagatgtggtttcaaagtaaaggcctcctcccccaccccttaggccccgtggtgacatttcccaagtcagacagatgtcagcttcccagccatgcccaggacgtcctatctcccccaacccacctctggccctgtgtaggggcagggatgggggtggctgggactcctggtgcccctcgccagcttctcctgcgccccgcccacaccctcggggggtcacaggcccagaagggtagctgggcggggctcgaggctggtgccaggcgcgtgtaaatggttttgttttgcacgtttggtttgcgcagtagtttggtttgacttgtttgtgcatcctgtgaaaaataacggtgcttgtgtcactagcatagaatagcgacaggaatagatgtggtccttaggagacgctgcacttgacaccaaccagacagcacagggcaggggtggtggagggggctgggctcacaggcctctcttttccccgcctgcagtcttctgggctgcgggaggccctggccctttccccttcccctcccctccttgtctagtttcccacattccaaaagggggcctgggatgctagccccagagatgccagcccttcaggaagcaggtgtcctttcccctctctgcccctgatcactcccagcactccccttgccttcccctgtcttcacctgccaccacacacacacacacacacacacacacacacacacacgcacggcttcctataacttcttcctgctggacagagactcagcgctcctcctgtgtgactggcaagaggcctcatgcctgctgagagaggaggagtgggagaggggcttgccagacaccagagagggagaccccaggcccacaggacctggctgtcgaacccgcattgctgctcaggtgccgtgatctcccgtggtcggcaccaggcccttgccagctcatggcctcatcttctcccctgtccatccaggtgggccctccctgcttctaaagccccacagaagttcccatggaaacactagaggccgggtgtctccttccacctccagtgatctgggaagtgacccagccgcctgcccttgttaagcctggtctgccccgtgggaagtgacttcatgttgcacatgtgatttcagcccccgaggcttgcgcgaggcttctggaccctcggttaaaggtcagcccctggccgggtgcggtggctcacgcctgtaatcccagcactttgggaggccaaggcgggtggatcatggagtcaggagatcgagaccatcctggctaacacggtgaaaccccgtctctactaaaaatacaaaaattacccaggcgtggtggcgggcgcctgtagtcccagctactgaggaggctgaggcaggagaatagcgtgaacccgggaggcggagcttgcagtgagccaagatcacgccactgcacttcagcctggacgacagagtgagactccatctcaaaaaacagacaaacaaaaaagtcagcccctgcacatctctgtagtgcttttcatgtattcaaaccacttccgtatatgacctctcacttagtcctcatgacaatggagcacttattattcttcccattttacagatgaggaaactaagacccagaaagttcaggtcctctgaccccagaagtgtctgtgatgaccctcccaaccttggctatctaccccacctgtggagaggaggtctggggtgacatctattgtagatcccacctgagagtttaaccaatgagaagacttactttcctggtaggcagcctgctttgttttgcacaggaagatagattttttttctcatctttcttataaacaacctcatgcacattctgtgtttgagccaagactagtcacccattgggggctaaccgtgcagtgtgagctgcgtccacaccctcacttctcccttcactccccctttcctcactcaggggctgagaggacagaggtggtcagccggggagcagaggtggcgaaggggctcatggcaagtggcagccattggaacaggggtgaggacccaggcctgggaaagccaccagggatgggggaaaccatgacgccgcctcctggtgcagtgcacaccatctctatccctgtcagccctcactgggtcatgggccttgggcagatgtcaaagagcccagcagcagcggtggtggccagctgggcagagcatccttgcttgggctaggaaagctttaccttctctgagtgcctccgcctgagagatgtgtgacccgtggcaccagggaaccacgtcttggagtggtccactgtaggccatgcgcttcatccacccccagtccctacataggccctacccttgcccgggagcttctagatagaaatcagaaagagattcaaggagccaaatgagcggtcagcccccaccatgcactccttgccccgtgcagagctccagccagcttcgtcaccagccccactggctcctggttggaacgaaagggtctctggttgcactgaatgcagctctcaaactggtcttgtacttgctgaataaatactgttgttcttgccttagctgctctctaggtttgtggggttaagttgccagaaaattgtgctactgtgtgtgcgtgtgcgtgcgtgtgtgtagtgctaggagtccacagtaggtctctgtcaagccgatgtcgtgatgagggcttttctgatactgacccagaagccacagaaccacaaggaaacccaaaccccctccagctgctgaggcgcaggcacagcctggggtcggatggagcctccagcaccccagcacccaggtgacttccccactcccctgtaaatgtcatggtgctaagactgtgtcaaccccaagacgacacatggtcctgtgctttggccaccgtttgaggcaaaaactaaacagcccgacacgttgtgttctggtgcaggtttgtattaaactgtagctacttctca

SEQ ID NO: 84 - DNA, 5735 bp, Homo sapiens; identical to SEQ ID NO: 83
  misc_feature (681)..(681): second gene starts at position 681

SEQ ID NO: 85 - DNA, 5735 bp, Homo sapiens; identical to SEQ ID NO: 83
  misc_feature (681)..(681): second gene starts at position 681

SEQ ID NO: 86 - DNA, 5735 bp, Homo sapiens; identical to SEQ ID NO: 83
  misc_feature (681)..(681): second gene starts at position 681

SEQ ID NO: 87 - DNA, 5735 bp, Homo sapiens; identical to SEQ ID NO: 83
  misc_feature (681)..(681): second gene starts at position 681

SEQ ID NO: 88 - DNA, 1194 bp, Homo sapiens
  misc_feature (206)..(206): second gene starts at position 206
atgtcttcaatgtggtctgaatatacaattggtggggtgaagatttactttccttataaagcttacccgtcacagcttgctatgatgaattctattctcagaggattaaacagcaagcaacattgtttgttggagagtcccacaggaagtggaaaaagcttagccttactttgttctgctttagcatggcaacaatctcttagtgaaaatttttgttataataacattcagcaagcacatagtggagcaaatggtggctttcattggtgctgtccccggcataggtccatctctgcagaagccatttcaggagtacctggaggctcaacggcagaagcttcaccacaaaagcgaaatgggcacaccacagggagaaaactggttgtcctggatgtttgaaaagttggtcgttgtcatggtgtgttacttcatcctatctatcattaactccatggcacaaagttatgccaaacgaatccagcagcggttgaactcagaggagaaaactaaataagtagagaaagttttaaactgcagaaattggagtggatgggttctgccttaaattgggaggactccaagccgggaaggaaaattcccttttccaacctgtatcaatttttacaacttttttcctgaaagcagtttagtccatactttgcactgacatactttttccttctgtgctaaggtaaggtatccaccctcgatgcaatccaccttgtgttttcttagggtggaatgtgatgttcagcagcaaacttgcaacagactggccttctgtttgttactttcaaaaggcccacatgatacaattagagaattcccaccgcacaaaaaaagttcctaagtatgttaaatatgtcaagctttttaggcttgtcacaaatgattgctttgttttcctaagtcatcaaaatgtatataaattatctagattggataacagtcttgcatgtttatcatgttacaatttaatattccatcctgcccaacccttcctctcccatcctcaaaaaagggccattttatgatgcattgcacaccctctggggaaattgatctttaaattttgagacagtataaggaaaatctggttggtgtcttacaagtgagctgacaccattttttattctgtgtatttagaatgaagtcttgaaaaaaactttataaagacatctttaatcattccaa

SEQ ID NO: 89 - DNA, 654 bp, Homo sapiens
  misc_feature (352)..(352): second gene starts at position 352
atgggtgagttcaacgagaagaagacaacatgtggcaccgtttgcctcaagtacctgctgtttacctacaattgctgcttctggctggctggcctggctgtcatggcagtgggcatctggacgctggccctcaagagtgactacatcagcctgctggcctcaggcacctacctggccacagcctacatcctggtggtggcgggcactgtcgtcatggtgactggggtcttgggctgctgcgccaccttcaaggagcgtcggaacctgctgcgcctgtacttcatcctgctcctcatcatctttctgctggagatcatcgctggtatcctcgcctacgcctactaccagcaggggccttcctgctgtgctggacgcccttcttcgtggtgcacatcacgcaggcgctgtgtcctgcctgctccgtgcccccgcggctggtcagcgccgtcacctggctgggctacgtcaacagcgccctcaaccccgtcatctacactgtcttcaacgccgagttccgcaacgtcttccgcaaggccctgcgtgcctgctgctgagccgggcacccccggacgccccccggcctgatggccaggcctcagggaccaaggagatggggagggcgcttttgtacgttaattaaacaaattccttccc

SEQ ID NO: 90 - DNA, 654 bp, Homo sapiens; identical to SEQ ID NO: 89
  misc_feature (352)..(352): second gene starts at position 352

SEQ ID NO: 91 - DNA, 654 bp, Homo sapiens; identical to SEQ ID NO: 89
  misc_feature (352)..(352): second gene starts at position 352

SEQ ID NO: 92 - DNA, 654 bp, Homo sapiens; identical to SEQ ID NO: 89
  misc_feature (352)..(352): second gene starts at position 352

SEQ ID NO: 93 - DNA, 2365 bp, Homo sapiens
  misc_feature (1832)..(1832): second gene starts at position 1832
atggaggagcccggggttacccctcaaccgtatttggggctgctcctggaggagctacgcagggttgtggcagcactgcctgaaggtatgagaccagattctaatctttatggttttccatgggaattggtgatatgtgcagctgttgttggattttttgctgttctcttttttttgtggagaagttttagatcggttaggagtcggctttatgtgggacgagagaaaaagcttgctctaatgctttctggactaattgaagaaaaaagtaaactacttgaaaaatttagccttgttcaaaaagagtatgaaggctatgaagtagagtcatctttaaaggatgccagctttgagaaggaggcaacagaagcacaaagtttggaggcaacctgtgaaaagctgaacaggtccaattctgaacttgaggatgaaatactctgtctagaaaaagagttaaaagaagagaaatccaaacattctgaacaagatgaattgatggcggatatttcaaaaaggatacagtctctagaagatgagtcaaaatccctcaaatcacaagtagctgaagccaaaatgaccttcaagatatttcaaatgaatgaagaacgactgaagatagcaataaaagatgctttgaatgaaaattctcaacttcaggaaagccagaaacagcttttgcaagaagctgaagtatggaaagaacaagtgagtgaacttaataaacagaaagtaacatttgaagactccaaagtacatgcagaacaagttctaaatgataaagaaagtcacatcaagactctgactgaacgcttgttaaagatgaaagattgggctgctatgcttggagaagacataacggatgatgataacttggaattagaaatgaacagtgaatcggaaaatggtgcttacttagataatcctccaaaaggagctttgaagaaactgattcatgctgctaagttaaatgcttctttaaaaaccttagaaggagaaagaaaccaaatttatattcagttgtctgaagttgataaaacaaaggaagagcttacagagcatattaaaaatcttcagactgaacaagcatctttgcagtcagaaaacacacattttgaaaatgagaatcagaagcttcaacagaaacttaaagtaatgactgaattatatcaagaaaatgaaatgaaactccacaggaaattaacagtagaggaaaattatcggttagagaaagaagagaaactttctaaagtagatgaaaagatcagccatgccactgaagagctggagacctatagaaagcgagccaaagatcttgaagaagaattggagagaactattcattcttatcaagggcagattatttcccatgagaaaaaagcacatgataattggttggcagctcggaatgctgaaagaaacctcaatgatttaaggaaagaaaatgctcacaacagacaaaaattaactgaaacagagcttaaatttgaacttttagaaaaagatccttatgcactcgatgttccaaatacagcatttggcagagagcattccccatatggtccctcaccattgggttggccttcatctgaaacaagagcttttctctctcctccaactttgttggagggtccactcagactctcacctttgcttccagggggaggaggaagaggctcacgaggcccagggaatcctctggaccatcagattaccaatgaaagaggagaatcaagctgtgataggttaaccgatcctcatagggctccctctgacactgggtctctgtcacctccatgggaccaggaccgtaggatgatgtttcctccgccaggtattttgaccaacgtgatttagctgatgagccatcttgatgtagctgatctctcagggatagaagatatttctcatgaaggcagcctaactctgaggaaaacaatgccaattcaagtacagatttcaacacatcttcaacactatgtgaagggttcacatcttaacctgtgcaattcagattgatactcagaatatgggttgatttgaatatctgaaatatcaatggaaaatcccactcagtttttgatgaacagtttgaacagttttctgtaatcaagcagcttgcatagaaattgtatgatgaaattttacataggttcttggtgctgttttgttctttttttgttttttgttgttttgttatttacttatatacatataaaattttattgaaaatatgttttggttactaaaattttgtttgactcctaacaaaagacaatggatggccttagcatcagaattaaaataatctggattaaatggcaatgtgttcatagtcagcaataaaattaaacatttttccctttaa

SEQ ID NO: 94 - DNA, 2365 bp, Homo sapiens; identical to SEQ ID NO: 93
  misc_feature (1832)..(1832): second gene starts at position 1832

SEQ ID NO: 95 - DNA, 2365 bp, Homo sapiens; identical to SEQ ID NO: 93
  misc_feature (1832)..(1832): second gene starts at position 1832

SEQ ID NO: 96 - DNA, 2329 bp, Homo sapiens
  misc_feature (1796)..(1796): second gene starts at position 1796
atggaattgaaaagtccagaggaagaggttgtggcagcactgcctgaaggtatgagaccagattctaatctttatggttttccatgggaattggtgatatgtgcagctgttgttggattttttgctgttctcttttttttgtggagaagttttagatcggttaggagtcggctttatgtgggacgagagaaaaagcttgctctaatgctttctggactaattgaagaaaaaagtaaactacttgaaaaatttagccttgttcaaaaagagtatgaaggctatgaagtagagtcatctttaaaggatgccagctttgagaaggaggcaacagaagcacaaagtttggaggcaacctgtgaaaagctgaacaggtccaattctgaacttgaggatgaaatactctgtctagaaaaagagttaaaagaagagaaatccaaacattctgaacaagatgaattgatggcggatatttcaaaaaggatacagtctctagaagatgagtcaaaatccctcaaatcacaagtagctgaagccaaaatgaccttcaagatatttcaaatgaatgaagaacgactgaagatagcaataaaagatgctttgaatgaaaattctcaacttcaggaaagccagaaacagcttttgcaagaagctgaagtatggaaagaacaagtgagtgaacttaataaacagaaagtaacatttgaagactccaaagtacatgcagaacaagttctaaatgataaagaaagtcacatcaagactctgactgaacgcttgttaaagatgaaagattgggctgctatgcttggagaagacataacggatgatgataacttggaattagaaatgaacagtgaatcggaaaatggtgcttacttagataatcctccaaaaggagctttgaagaaactgattcatgctgctaagttaaatgcttctttaaaaaccttagaaggagaaagaaaccaaatttatattcagttgtctgaagttgataaaacaaaggaagagcttacagagcatattaaaaatcttcagactgaacaagcatctttgcagtcagaaaacacacattttgaaaatgagaatcagaagcttcaacagaaacttaaagtaatgactgaattatatcaagaaaatgaaatgaaactccacaggaaattaacagtagaggaaaattatcggttagagaaagaagagaaactttctaaagtagatgaaaagatcagccatgccactgaagagctggagacctatagaaagcgagccaaagatcttgaagaagaattggagagaactattcattcttatcaagggcagattatttcccatgagaaaaaagcacatgataattggttggcagctcggaatgctgaaagaaacctcaatgatttaaggaaagaaaatgctcacaacagacaaaaattaactgaaacagagcttaaatttgaacttttagaaaaagatccttatgcactcgatgttccaaatacagcatttggcagagagcattccccatatggtccctcaccattgggttggccttcatctgaaacaagagcttttctctctcctccaactttgttggagggtccactcagactctcacctttgcttccagggggaggaggaagaggctcacgaggcccagggaatcctctggaccatcagattaccaatgaaagaggagaatcaagctgtgataggttaaccgatcctcatagggctccctctgacactgggtctctgtcacctccatgggaccaggaccgtaggatgatgtttcctccgccaggtattttgaccaacgtgatttagctgatgagccatcttgatgtagctgatctctcagggatagaagatatttctcatgaaggcagcctaactctgaggaaaacaatgccaattcaagtacagatttcaacacatcttcaacactatgtgaagggttcacatcttaacctgtgcaattcagattgatactcagaatatgggttgatttgaatatctgaaatatcaatggaaaatcccactcagtttttgatgaacagtttgaacagttttctgtaatcaagcagcttgcatagaaattgtatgatgaaattttacataggttcttggtgctgttttgttctttttttgttttttgttgttttgttatttacttatatacatataaaattttattgaaaatatgttttggttactaaaattttgtttgactcctaacaaaagacaatggatggccttagcatcagaattaaaataatctggattaaatggcaatgtgttcatagtcagcaataaaattaaacatttttccctttaa

SEQ ID NO: 97 - DNA, 2329 bp, Homo sapiens; identical to SEQ ID NO: 96
  misc_feature (1796)..(1796): second gene starts at position 1796

SEQ ID NO: 98 - DNA, 2329 bp, Homo sapiens; identical to SEQ ID NO: 96
  misc_feature (1796)..(1796): second gene starts at position 1796

SEQ ID NO: 99 - DNA, 2236 bp, Homo sapiens
  misc_feature (1703)..(1703): second gene starts at position 1703
atggaggagcccggggttacccctcaaccgtatttggggctgctcctggaggagctacgcagggttgtggcagcactgcctgaaggtatgagaccagattctaatctttatggttttccatgggaattggtgatatgtgcagctgttgttggattttttgctgttctcttttttttgtggagaagttttagatcggttaggagtcggctttatgtgggacgagagaaaaagcttgctctaatgctttctggactaattgaagaaaaaagtaaactacttgaaaaatttagccttgttcaaaaagagtatgaaggctatgaagtagagtcatctttaaaggatgccagctttgagaaggaggcaacagaagcacaaagtttggaggcaacctgtgaaaagctgaacaggtccaattctgaacttgaggatgaaatactctgtctagaaaaagagttaaaagaagagaaatccaaacattctgaacaagatgaattgatggcggatatttcaaaaaggatacagtctctagaagatgagtcaaaatccctcaaatcacaagtagctgaagccaaaatgaccttcaagatatttcaaatgaatgaagaacgactgaagatagcaataaaagatgctttgaatgaaaattctcaacttcaggaaagccagaaacagcttttgcaagaagctgaagtatggaaagaacaagtgagtgaacttaataaacagaaagtaacatttgaagactccaaagtacatgcagaacaagttctaaatgataaagaaagtcacatcaagactctgactgaacgcttgttaaagatgaaagattgggctgctatgcttggagaagacataacggatgatgataacttggaattagaaatgaacagtgaatcggaaaatggtgcttacttagataatcctccaaaaggagctttgaagaaactgattcatgctgctaagttaaatgcttctttaaaaaccttagaaggagaaagaaaccaaatttatattcagttgtctgaagttgataaaacaaaggaagagcttacagagcatattaaaaatcttcagactgaacaagcatctttgcagtcagaaaacacacattttgaaaatgagaatcagaagcttcaacagaaacttaaagtaatgactgaattatatcaagaaaatgaaatgaaactccacaggaaattaacagtagaggaaaattatcggttagagaaagaagagaaactttctaaagtagatgaaaagatcagccatgccactgaagagctggagacctatagaaagcgagccaaagatcttgaagaagaattggagagaactattcattcttatcaagggcagattatttcccatgagaaaaaagcacatgataattggttggcagctcggaatgctgaaagaaacctcaatgatttaaggaaagaaaatgctcacaacagacaaaaattaactgaaacagagcttaaatttgaacttttagaaaaagatccttatgcactcgatgttccaaatacagcatttggcagaggctcacgaggcccagggaatcctctggaccatcagattaccaatgaaagaggagaatcaagctgtgataggttaaccgatcctcatagggctccctctgacactgggtctctgtcacctccatgggaccaggaccgtaggatgatgtttcctccgccaggtattttgaccaacgtgatttagctgatgagccatcttgatgtagctgatctctcagggatagaagatatttctcatgaaggcagcctaactctgaggaaaacaatgccaattcaagtacagatttcaacacatcttcaacactatgtgaagggttcacatcttaacctgtgcaattcagattgatactcagaatatgggttgatttgaatatctgaaatatcaatggaaaatcccactcagtttttgatgaacagtttgaacagttttctgtaatcaagcagcttgcatagaaattgtatgatgaaattttacataggttcttggtgctgttttgttctttttttgttttttgttgttttgttatttacttatatacatataaaattttattgaaaatatgttttggttactaaaattttgtttgactcctaacaaaagacaatggatggccttagcatcagaattaaaataatctggattaaatggcaatgtgttcatagtcagcaataaaattaaacatttttccctttaa

SEQ ID NO: 100 - DNA, 2236 bp, Homo sapiens; identical to SEQ ID NO: 99
  misc_feature (1703)..(1703): second gene starts at position 1703

SEQ ID NO: 101 - DNA, 2236 bp, Homo sapiens; identical to SEQ ID NO: 99
  misc_feature (1703)..(1703): second gene starts at position 1703

SEQ ID NO: 102 - DNA, 2278 bp, Homo sapiens
  misc_feature (1745)..(1745): second gene starts at position 1745
atgagaccagattctaatctttatggttttccatgggaattggtgatatgtgcagctgttgttggattttttgctgttctcttttttttgtggagaagttttagatcggttaggagtcggctttatgtgggacgagagaaaaagcttgctctaatgctttctggactaattgaagaaaaaagtaaactacttgaaaaatttagccttgttcaaaaagagtatgaaggctatgaagtagagtcatctttaaaggatgccagctttgagaaggaggcaacagaagcacaaagtttggaggcaacctgtgaaaagctgaacaggtccaattctgaacttgaggatgaaatactctgtctagaaaaagagttaaaagaagagaaatccaaacattctgaacaagatgaattgatggcggatatttcaaaaaggatacagtctctagaagatgagtcaaaatccctcaaatcacaagtagctgaagccaaaatgaccttcaagatatttcaaatgaatgaagaacgactgaagatagcaataaaagatgctttgaatgaaaattctcaacttcaggaaagccagaaacagcttttgcaagaagctgaagtatggaaagaacaagtgagtgaacttaataaacagaaagtaacatttgaagactccaaagtacatgcagaacaagttctaaatgataaagaaagtcacatcaagactctgactgaacgcttgttaaagatgaaagattgggctgctatgcttggagaagacataacggatgatgataacttggaattagaaatgaacagtgaatcggaaaatggtgcttacttagataatcctccaaaaggagctttgaagaaactgattcatgctgctaagttaaatgcttctttaaaaaccttagaaggagaaagaaaccaaatttatattcagttgtctgaagttgataaaacaaaggaagagcttacagagcatattaaaaatcttcagactgaacaagcatctttgcagtcagaaaacacacattttgaaaatgagaatcagaagcttcaacagaaacttaaagtaatgactgaattatatcaagaaaatgaaatgaaactccacaggaaattaacagtagaggaaaattatcggttagagaaagaagagaaactttctaaagtagatgaaaagatcagccatgccactgaagagctggagacctatagaaagcgagccaaagatcttgaagaagaattggagagaactattcattcttatcaagggcagattatttcccatgagaaaaaagcacatgataattggttggcagctcggaatgctgaaagaaacctcaatgatttaaggaaagaaaatgctcacaacagacaaaaattaactgaaacagagcttaaatttgaacttttagaaaaagatccttatgcactcgatgttccaaatacagcatttggcagagagcattccccatatggtccctcaccattgggttggccttcatctgaaacaagagcttttctctctcctccaactttgttggagggtccactcagactctcacctttgcttccagggggaggaggaagaggctcacgaggcccagggaatcctctggaccatcagattaccaatgaaagaggagaatcaagctgtgataggttaaccgatcctcatagggctccctctgacactgggtctctgtcacctccatgggaccaggaccgtaggatgatgtttcctccgccaggtattttgaccaacgtgatttagctgatgagccatcttgatgtagctgatctctcagggatagaagatatttctcatgaaggcagcctaactctgaggaaaacaatgccaattcaagtacagatttcaacacatcttcaacactatgtgaagggttcacatcttaacctgtgcaattcagattgatactcagaatatgggttgatttgaatatctgaaatatcaatggaaaatcccactcagtttttgatgaacagtttgaacagttttctgtaatcaagcagcttgcatagaaattgtatgatgaaattttacataggttcttggtgctgttttgttctttttttgttttttgttgttttgttatttacttatatacatataaaattttattgaaaatatgttttggttactaaaattttgtttgactcctaacaaaagacaatggatggccttagcatcagaattaaaataatctggattaaatggcaatgtgttcatagtcagcaataaaattaaacatttttccctttaa

SEQ ID NO: 103 - DNA, 2278 bp, Homo sapiens; identical to SEQ ID NO: 102
  misc_feature (1745)..(1745): second gene starts at position 1745

SEQ ID NO: 104 - DNA, 2278 bp, Homo sapiens; identical to SEQ ID NO: 102
  misc_feature (1745)..(1745): second gene starts at position 1745

SEQ ID NO: 105 - DNA, 1712 bp, Homo sapiens
  misc_feature (23)..(23): second gene starts at position 23
atggaggaggacgacagctacgaaacaagagttgaaataaaagaatctgttcgtggccaagatattttcattatacagacaatacccagagatgtgaatacagctgtgatggagttgctcatcatggcttacgcactgaagactgcctgtgccaggaacattattggggtcatcccctacttcccctacagcaagcagagcaagatgaggaagaggggttccattgtgtgcaagctgctagcatccatgctggcgaaagcaggtttaactcacattatcactatggatcttcatcaaaaggaaatacaaggctttttcagctttcctgtggacaaccttagagcctcacctttcctgcttcagtatatccaggaagaaattccaaattacagaaatgcagtcattgtagctaagtctcctgatgctgcaaagagggcccagtcctatgcggagagactgcgtctgggtttggccgtcattcacggggaagctcagtgcacggaactggacatggacgatggtcgtcactccccgcctatggtcaaaaatgctactgtgcacccaggcctggagttgccattgatgatggccaaagagaagccaccgataactgtagttggagatgttggaggccgcatcgcaatcatcgtggatgacattattgacgatgtggagagttttgttgctgccgcggagatcctgaaagagagaggcgcctataagatctatgttatggccacccacggcatcctgtctgcagaggcccctcgcctgattgaggagtcctccgtagacgaggtggtggtgacgaatactgtccctcatgaggttcagaagctgcaatgtcccaagataaagactgtggatatcagtttgattctttctgaagccattcggagaatccacaatggagagtccatggcctaccttttccgaaacatcactgtggatgactagctttcacgagggtctcgaccctggacctcctgagggaaacatggaaaaagcagtgccatgagtgatacagtgtttccttgcaagggaggactcgaaacagcctggagttagatatcttcttttgcccggattgatggggaggagggattaaaagagtcaggaagaagacagagctaatggataaatatcataacatggccttacatgtctgctgtcatcagccctgttccttaaaagttctagctgctttcttaaaaataatctgaaaatcttattgatactaaagaggagttaaaggcacataaagtcttaactctataatgttcatttagttgtttcagctccagggaaatggaggtattgatgttgaacctggttagggaagctgagcgcctgtggccctattactatccagttggcctctcccaaatcaacttcaagtcttttatagagaatcgtatttttctttcagaaattgttatgcctacagccattgaaaaatgaagcattcatgttgttacatcttccaaggatgtcagattagaaaatagcatcccacctctgggtatctgagtggctctgaagttgcaaataaaataatttgttgtcttgctagtcttttcattagacagcagaagaccatggatacagaacagcagtcaggtctgtggctggacacaaacactttcccaggttccaccctcttcctaagtgttgaagctaaatccttgttgaatactgtattttaaatcttt

SEQ ID NO: 106 - DNA, 1712 bp, Homo sapiens; identical to SEQ ID NO: 105
  misc_feature (23)..(23): second gene starts at position 23

SEQ ID NO: 107 - DNA, 2254 bp, Homo sapiens
  misc_feature (500)..(500): second gene starts at position 500
atggcgatgtttgagcagatgagagccaacgtgggcaagttgctcaagggtatcgacaggtacaatcctgagaacctggccaccctggagcgctatgtagagacgcaggccaaggaaaatgcctatgatctggaagccaacctggctgtcctgaagctgtaccagttcaacccagccttctttcagaccacggtcaccgcccagatcctgctgaaggccctcaccaacttgccgcacacagacttcaccctgtgcaagtgcatgatcgaccaggcacatcaagaagaacggccaatccgacagattttgtacctcggggacctgctggagacctgccatttccaggccttctggcaagccctggatgaaaacatggacctcttggaaggtataactggctttgaagactctgtccgaaagtttatctgccatgttgtgggtatcacttaccagcacattgaccgctggctgctggccgagatgctcggggatctgtcggcatcaattccaaagaatgtctttttagcactgcatgaaaaactctatattatgttgaaagggaaaatggggactgtcaatctccatcagtttactgggcaactgactgaagaattacatgaacaactggagaatttaggcactcatgggacaatggacctgaacaacttagtaagacatctcctttatccagtcacagtgaatatgctctttaataaaagtttgttttccacaaacaagaaaaaaatcaaggagttccatcagtattttcaagtttatgatgaagattttgagtatgggtcccagttgccagagtgtcttctaagaaactggtcaaaatccaaaaagtggttcctggaactgtttgagaaaaacattccagatataaaagcatgtaaatctgcaaaagataattccatgacattattgcaagctacgctggatattgtagagacggaaacaagtaaggaaaactcacccaattatgggctcttactgctttgggcttctctgtctaatgctgttcctgttgcattttggacacttgcatacgtcctttctcatcctgatatccacaaggccattatggaaggcatatcttctgtgtttggcaaagcaggcaaagataagattaaagtgtctgaggatgacctggagaatctccttctaattaaatggtgtgttttggaaaccattcgtttaaaagctcctggtgtcattactagaaaagtggtgaagcctgtggaaattttgaattacatcattccttctggtgacttgttgatgttgtctccattttggctgcatagaaatccaaagtattttcctgagcctgaattgttcaaacctgaacgttggaaaaaggcaaatttagagaagcactctttcttggactgcttcatggcatttggaagcgggaagttccagtgtcctgcaaggtggtttgctctgttagaggttcagatgtgtattattttaatactttataaatatgactgtagtcttctggacccattacccaaacagagttatctccatttggtgggtgtcccccagccggaagggcaatgccgaattgaatataaacaaagaatatgacatctgttgggcctcacaaggaccagggccttctggaggagtggcactaccccacctggcagcacctagacctgagctctacaaaaacacactgcttcactttgttttaggacttagttcaagaacacattcaaatggtgcatgtgtttggtatcttcaacagtagaccaagaatctaacatcactctcagtaatatagagaccggaatacatggtttataggaaatgatcaaatgatccaaaaaaactccacattttttaagaagttggaatttgatttcatgcataactgtattaaaacattaaatagaaataatgtcatttgaatgaaaatcttatcacattaaattcactgtgaaggcagcatacttaaatttttattttgaaaagtctaaaaggcttagatttttaaaatttaataattatttctacaaattttctatttttcttgaggtgattctcaactagcaattggaactcctaggctctattaacataattctttattgtaaacgtatctaatgctaaaagtaataaaatggtagttttctgagacctgtgaggacaggaatggtgtcttacattcatttctacactttattatgctcaggattgcaccttctttacagagtatattcaataaatgtatgttgattga

SEQ ID NO: 108 - DNA, 3858 bp, Homo sapiens
  misc_feature (641)..(641): second gene starts at position 641
atgattcccccacaggaggcatccgctcgacggcgggagattgaggacaagctgaagcaggaggaggagactctgtccttcatccgagacagcctggagaagagcgaccagctcactaagaacatggtgtctatcttatcatcctttgagagccgccttatgaagctggagaactccatcatccctgtgcacaagcagacggagaatctgcagcggctgcaggagaatgttgagaagacgctgtcctgcctggaccatgtcatcagctactaccatgtggccagtgacactgagaagatcatcagagagggccccacaggtaggctggaagagtacctgggaagcatggccaagattcagaaggcagtggagtatttccaggacaacagcccagacagcccggaactcaacaaagtgaaactgctctttgagcgcgggaaggaggccctggagtccgaatttcgcagcctgatgacgcggcacagtaaggtcgtctcgcccgtgctcatcttggatctgatcagtggtgacgatgatctggaggcccaggaggacgtgaccctggagcacctgcccgagagcgtgctccaggatgtcattcgcatctcccgctggctggtggaatatggccgcaaccaagttcccagtgacctgacagcagaggagcgtcaagaactggagaacatccgacggagaaaacaggagctgctggctgacattcagaggctgaaggatgagatagcagaagtagctaatgaaattgaaaacctgggatccacagaggaaaggaaaaacatgcagaggaacaaacaggtagccatgggcaggaaaaaatttaatatggaccctaaaaaggggatccagttcttaatagagaacgacctcctgaagaacacttgtgaagacattgcccagttcttatataaaggcgaagggctcaacaagacagccatcggcgactacctaggggagagagatgagtttaatatccaggttcttcatgcatttgtggagctgcatgagttcactgatcttaatctcgtccaggcactacggcagttcctgtggagcttccggctacccggagaggcccagaagatcgaccggatgatggaggcgtttgcccagcgatattgtcagtgcaataatggcgtgttccagtccacggatacttgttacgtcctctcctttgccatcatcatgttgaacaccagtctgcacaaccccaatgtcaaagataagcccactgtggagaggttcattgccatgaaccgaggcatcaatgatgggggagacctgccggaggagctcctccggaatctctatgagagcataaaaaatgaaccctttaaaatcccagaagacgacgggaatgacctcactcacactttcttcaatccagaccgagaaggctggctattgaaactcggaggtggcagggtaaagacttggaagagacgctggttcattctgactgacaactgcctttactactttgagtataccacggataaggagccccgtggaatcatccctttagagaatctgagtatccgggaagtggaggactccaaaaaaccaaactgctttgagctttatatccccgacaataaagaccaagttatcaaggcctgcaagaccgaggctgacgggcgggtggtggaggggaaccacactgtttaccggatctcagctccgacgcccgaggagaaggaggagtggattaagtgcattaaagcagccatcagcagggaccctttctacgaaatgctcgcagcacggaaaaagaaggtctcctccacgaagcgacactgagcgtgcagccaagggcgttggtctgcgggggccttggagctcctgctcttctcccgcacctccatggatgcactgctgccgagcagagcgtcctctgccaggccccgccctggattcctagagactagcttcagcttttgctattttttttaagtgggagaagggtgggcagttatcactggggaagagaggaccggccacctgtccagcatgggctccagagccttcctctctcacagggcagagctcttgtcggcagggcagcctcctggccagtttctctgctcagtgttctggtagcagagctcagagccaactgtttacctcttggttgtccccgtgaagaagccttcaaaccctgcaccataaatacatgtgtccatatattattatatgttaagagaaaaaggtggaaaggaagagaagccacatactataaagatctatttttttttttttaagagagaacgtagggctgttcaggtgcattctgccctggctgcgctggggagcttctccctggagaagagcacctggggctgcggccaaggggcatcagcctgggcccgcggcagggcctggcctgcctctcctgtgctgtgggagctcgctgcctggtgcttgtctgggcgagatggacaggtgaggtcgaggacgcagagggcagaggcccagtggagcctcagacggcacagtcagagtcgggggcctgccctggccggggtcgcagtcggcagcagcgtgcagtccggcatctcccgcggatgcttttccatcccaagtgcctgcggagcgccgaggagaggagagagctgactggacgcttacgttattttcctccttcagaatccaagttcttgttgggctttaaagtagaaagtcagcattttccttgagctaaatacctaataaccaaaactgtgaggaaggttatcgggacagaggttccggataacctgtttcattttgggttttcttcctcttccccagactccagtcctcgttctagaggaaggagtaggacttccccgatccccgtagggcttcagctttttctgcctcaaaaccagccctaactggactactctggatgcattttgtggtgggccccctagaggggaagatgggcctttatctgctccgtggggtgcactggagtgaggggggtggccgggctgcctctcgcatctctgtcttcccctgcaggcgctgtgtgagctggccctgcccctcctcattacagtatgaagggagccgtgacacgcagcattttcctgccgttctctcagggactctcagggcagctcctgccactccgccagggccagcatgccagtccaggcagagcaggtggctggctgtctggccgtctcgccccgcccctccacaggaccctggaccagggcggtgcagggcgcagccctgaggaggcaggtggaggagctgcgggttttcacagggccgcgtcgccacggctcctctgatcctttagggttggcgagcatctctggaaatagcttttgcagaggagtggtgggaggaatagagggggacagtctgtcacctccctccccgccactttgtgtagatcctacctggagggaatggctttaggcacttttgtgccagagcttgtgagggtgacagaagagggtccaggctggaaacctgaactttctgggtgggagaaccaggtggtgcctgccgaggtctgggcgtgtttgggccggtgctggagcctgtccagctggcccgggccctggcctggttctcaagtgtttcctagacagagaggcacctgggtcagtattagtctatttatcagaggtgtaaataatctatgtatagtttttctccttttagattattttgtatttgtttaaaagaagttttgtcaaaatacaaaaatataaagaaatgactgaaagttgttgacagggtttttaagaaataattattctaattgtttttgtttgtttgtttttgccttgtaaactagcgccaaggaactgcagcaaataaactccaactctgcccaagcca

SEQ ID NO: 109 - DNA, 3855 bp, Homo sapiens
  misc_feature (641)..(641): second gene starts at position 641
atgattcccccacaggaggcatccgctcgacggcgggagattgaggacaagctgaagcaggaggaggagactctgtccttcatccgagacagcctggagaagagcgaccagctcactaagaacatggtgtctatcttatcatcctttgagagccgccttatgaagctggagaactccatcatccctgtgcacaagcagacggagaatctgcagcggctgcaggagaatgttgagaagacgctgtcctgcctggaccatgtcatcagctactaccatgtggccagtgacactgagaagatcatcagagagggccccacaggtaggctggaagagtacctgggaagcatggccaagattcagaaggcagtggagtatttccaggacaacagcccagacagcccggaactcaacaaagtgaaactgctctttgagcgcgggaaggaggccctggagtccgaatttcgcagcctgatgacgcggcacagtaaggtcgtctcgcccgtgctcatcttggatctgatcagtggtgacgatgatctggaggcccaggaggacgtgaccctggagcacctgcccgagagcgtgctccaggatgtcattcgcatctcccgctggctggtggaatatggccgcaaccaagttcccagtgacctgacagcagaggagcgtcaagaactggagaacatccgacggagaaaacaggagctgctggctgacattcagaggctgaaggatgagatagcagaagtagctaatgaaattgaaaacctgggatccacagaggaaaggaaaaacatgcagaggaacaaacaggtagccatgggcaggaaaaaatttaatatggaccctaaaaaggggatccagttcttaatagagaacgacctcctgaagaacacttgtgaagacattgcccagttcttatataaaggcgaagggctcaacaagacagccatcggcgactacctaggggagagagatgagtttaatatccaggttcttcatgcatttgtggagctgcatgagttcactgatcttaatctcgtccaggcactacggcagttcctgtggagcttccggctacccggagaggcccagaagatcgaccggatgatggaggcgtttgcccagcgatattgtcagtgcaataatggcgtgttccagtccacggatacttgttacgtcctctcctttgccatcatcatgttgaacaccagtctgcacaaccccaatgtcaaagataagcccactgtggagaggttcattgccatgaaccgaggcatcaatgatgggggagacctgccggaggagctcctccggaatctctatgagagcataaaaaatgaaccctttaaaatcccagaagacgacgggaatgacctcactcacactttcttcaatccagaccgagaaggctggctattgaaactcggtggcagggtaaagacttggaagagacgctggttcattctgactgacaactgcctttactactttgagtataccacggataaggagccccgtggaatcatccctttagagaatctgagtatccgggaagtggaggactccaaaaaaccaaactgctttgagctttatatccccgacaataaagaccaagttatcaaggcctgcaagaccgaggctgacgggcgggtggtggaggggaaccacactgtttaccggatctcagctccgacgcccgaggagaaggaggagtggattaagtgcattaaagcagccatcagcagggaccctttctacgaaatgctcgcagcacggaaaaagaaggtctcctccacgaagcgacactgagcgtgcagccaagggcgttggtctgcgggggccttggagctcctgctcttctcccgcacctccatggatgcactgctgccgagcagagcgtcctctgccaggccccgccctggattcctagagactagcttcagcttttgctattttttttaagtgggagaagggtgggcagttatcactggggaagagaggaccggccacctgtccagcatgggctccagagccttcctctctcacagggcagagctcttgtcggcagggcagcctcctggccagtttctctgctcagtgttctggtagcagagctcagagccaactgtttacctcttggttgtccccgtgaagaagccttcaaaccctgcaccataaatacatgtgtccatatattattatatgttaagagaaaaaggtggaaaggaagagaagccacatactataaagatctatttttttttttttaagagagaacgtagggctgttcaggtgcattctgccctggctgcgctggggagcttctccctggagaagagcacctggggctgcggccaaggggcatcagcctgggcccgcggcagggcctggcctgcctctcctgtgctgtgggagctcgctgcctggtgcttgtctgggcgagatggacaggtgaggtcgaggacgcagagggcagaggcccagtggagcctcagacggcacagtcagagtcgggggcctgccctggccggggtcgcagtcggcagcagcgtgcagtccggcatctcccgcggatgcttttccatcccaagtgcctgcggagcgccgaggagaggagagagctgactggacgcttacgttattttcctccttcagaatccaagttcttgttgggctttaaagtagaaagtcagcattttccttgagctaaatacctaataaccaaaactgtgaggaaggttatcgggacagaggttccggataacctgtttcattttgggttttcttcctcttccccagactccagtcctcgttctagaggaaggagtaggacttccccgatccccgtagggcttcagctttttctgcctcaaaaccagccctaactggactactctggatgcattttgtggtgggccccctagaggggaagatgggcctttatctgctccgtggggtgcactggagtgaggggggtggccgggctgcctctcgcatctctgtcttcccctgcaggcgctgtgtgagctggccctgcccctcctcattacagtatgaagggagccgtgacacgcagcattttcctgccgttctctcagggactctcagggcagctcctgccactccgccagggccagcatgccagtccaggcagagcaggtggctggctgtctggccgtctcgccccgcccctccacaggaccctggaccagggcggtgcagggcgcagccctgaggaggcaggtggaggagctgcgggttttcacagggccgcgtcgccacggctcctctgatcctttagggttggcgagcatctctggaaatagcttttgcagaggagtggtgggaggaatagagggggacagtctgtcacctccctccccgccactttgtgtagatcctacctggagggaatggctttaggcacttttgtgccagagcttgtgagggtgacagaagagggtccaggctggaaacctgaactttctgggtgggagaaccaggtggtgcctgccgaggtctgggcgtgtttgggccggtgctggagcctgtccagctggcccgggccctggcctggttctcaagtgtttcctagacagagaggcacctgggtcagtattagtctatttatcagaggtgtaaataatctatgtatagtttttctccttttagattattttgtatttgtttaaaagaagttttgtcaaaatacaaaaatataaagaaatgactgaaagttgttgacagggtttttaagaaataattattctaattgtttttgtttgtttgtttttgccttgtaaactagcgccaaggaactgcagcaaataaactccaactctgcccaagcca

SEQ ID NO: 110 - DNA, 3858 bp, Homo sapiens; identical to SEQ ID NO: 108
  misc_feature (641)..(641): second gene starts at position 641

SEQ ID NO: 111 - DNA, 3855 bp, Homo sapiens; identical to SEQ ID NO: 109
  misc_feature (641)..(641): second gene starts at position 641

SEQ ID NO: 112 - DNA, 3858 bp, Homo sapiens; identical to SEQ ID NO: 108
  misc_feature (641)..(641): second gene starts at position 641

SEQ ID NO: 113 - DNA, 3855 bp, Homo sapiens; identical to SEQ ID NO: 109

SEQ ID NO: 114 - DNA, 3858 bp, Homo sapiens; identical to SEQ ID NO: 108
  misc_feature (641)..(641): second gene starts at position 641

SEQ ID NO: 115 - DNA, 3855 bp, Homo sapiens; identical to SEQ ID NO: 109
  misc_feature (641)..(641): second gene starts at position 641

SEQ ID NO: 116 - DNA, 3858 bp, Homo sapiens; identical to SEQ ID NO: 108
  misc_feature (641)..(641): second gene starts at position 641

SEQ ID NO: 117 - DNA, 3855 bp, Homo sapiens; identical to SEQ ID NO: 109
  misc_feature (641)..(641): second gene starts at position 641

SEQ ID NO: 118 - DNA, 725 bp, Homo sapiens
  misc_feature (726)..(726): second gene starts at position 726
gattgtctactcatggaggaggcaggggtgggagggagcgcacccagcgaggagatggggttgggggctaggccgtggggttgggacgcagtggtctcctttagcttctggtttctggtgatgtcctccccttgcctgcccccaggaggaggagactctgtccttcatccgagacagcctggagaagagcgaccagctcactaagaacatggtgtctatcttatcatcctttgagagccgccttatgaagctggagaactccatcatccctgtgcacaagcagacggagaatctgcagcggctgcaggagaatgttgagaagacgctgtcctgcctggaccatgtcatcagctactaccatgtggccagtgacactgagaagatcatcagagagggccccacaggtaggctggaagagtacctgggaagcatggccaagattcagaaggcagtggagtatttccaggacaacagcccagacagcccggaactcaacaaagtgaaactgctctttgagcgcgggaaggaggccctggagtccgaatttcgcagcctgatgacgcggcacagtaaggtcgtctcgcccgtgctcatcttggatctgatcagtggtgacgatgatctggaggcccaggaggacgtgaccctggagcacctgcccgagagcgtgctccaggatgtcattcgcatctcccgctggctggtggaatatggccgcaaccaag

SEQ ID NO: 119 - DNA, 725 bp, Homo sapiens; identical to SEQ ID NO: 118
  misc_feature (726)..(726): second gene starts at position 726

SEQ ID NO: 120 - DNA, 2520 bp, Homo sapiens
  misc_feature (147)..(147): second gene starts at position 147
atggctttcttgatgaagaagaagaaattcaaattccaaactactttcaccctggaggagctgactgcggttcccttcgtgaacggggtcctcttctgcaaggtccggctgctggatggaggggattttgtcagcttgtcgtcaaggactggaccagtttgcaatgccaccagccacgtatgacactgccggtctcaccatgcccacagcaacactgggtaacctccgaggctatggcatggcatccccaggcctcgcagcccccagcctcacacccccacaactggccactccaaatttgcaacagttctttccccaggccactcgccagtccttgctgggacctcctcctgttggggtccccatgaacccttcccagttcaacctttcaggacggaacccccagaaacaggcccggacctcctcctctaccacccccaatcgaaaggattcttcttctcagacaatgcctgtggaagacaagtcagaccccccagaggggtctgaggaagccgcagagccccggatggacacaccagaagaccaagatttaccgccctgcccagaggacatcgccaaggaaaaacgcactccagcacctgagcctgagccttgtgaggcgtccgagctgccagcaaagagattgaggagctcagaagagcccacagagaaggaacctccagggcagttacaggtgaaggcccagccgcaggcccggatgacagtaccgaaacagacacagacaccagacctgctgcctgaggccctggaagcccaagtgctgccacgattccagccacgggtcctgcaggtccaggcccaggtgcagtcacagactcagccgcggataccatccacagacacccaggtgcagccaaagctgcagaagcaggcgcaaacacagacctctccagagcacttagtgctgcaacagaagcaggtgcagccacagctgcagcaggaggcagagccacagaagcaggtgcagccacaggtccacacacaggcacagccaagcgtccagccacaggagcatcctccagcgcaggtgtcagtacagccaccagagcagacccatgagcagcctcacacccagccgcaggtgtcgttgctggctccagagcaaacaccagttgtggttcatgtctgcgggctggagatgccacctgatgcagtagaagctggtggaggcatggaaaagaccttgccagagcctgtgggcacccaagtcagcatggaagagattcagaatgagtcggcctgtggcctagatgtgggagaatgtgaaaacagagcgagagagatgccaggggtatggggcgccgggggctccctgaaggtcaccattctgcagagcagtgacagccgggcctttagcactgtacccctgacacctgtcccccgccccagtgactccgtctcctccacccctgcggctaccagcactccctctaagcaggccctccagttcttctgctacatctgcaaggccagctgctccagccagcaggagttccaggaccacatgtcggagcctcagcaccagcagcggctaggggagatccagcacatgagccaagcctgcctcctgtccctgctgcccgtgccccgggacgtcctggagacagaggatgaggagcctccaccaaggcgctggtgcaacacctgccagctctactacatgggggacctgatccaacaccgcaggacacaggaccacaagattgccaaacaatccttgcgacccttctgcaccgtttgcaaccgctacttcaaaacccctcgcaagtttgtggagcacgtgaagtcccaggggcataaggacaaagccaaggagctgaagtcgcttgagaaagaaattgctggccaagatgaggaccacttcattacagtggacgctgtgggttgcttcgagggtgatgaagaagaggaagaggatgatgaggatgaagaagagatcgaggttgaggaggaactctgcaagcaggtgaggtccagagatatatccagagaggagtggaagggctcggagacctacagccccaatactgcatatggtgtggacttcctggtgcccgtgatgggctatatctgccgcatctgccacaagttctatcacagcaactcaggggcacagctctcccactgcaagtccctgggccactttgagaacctgcagaaatacaaggcggccaagaaccccagccccaccacccgacctgtgagccgccggtgcgcaatcaacgcccggaacgctttgacagccctgttcacctccagcggccgcccaccctcccagcccaacacccaggacaaaacacccagcaaggtgacggctcgaccctcccagcccccactacctcggcgctcaacccgcctcaaaacctgatagagggacctccctgtccctggcctgcctgggtccagatctgctaatgctttttaggagtctgcctggaaactttgacatggttcatgtttttactcaaaatccaataaaacaaggtagtttggctgtgc

SEQ ID NO: 121 - DNA, 2448 bp, Homo sapiens
  misc_feature (147)..(147): second gene starts at position 147
atggctttcttgatgaagaagaagaaattcaaattccaaactactttcaccctggaggagctgactgcggttcccttcgtgaacggggtcctcttctgcaaggtccggctgctggatggaggggattttgtcagcttgtcgtcaaggtaacctccgaggctatggcatggcatccccaggcctcgcagcccccagcctcacacccccacaactggccactccaaatttgcaacagttctttccccaggccactcgccagtccttgctgggacctcctcctgttggggtccccatgaacccttcccagttcaacctttcaggacggaacccccagaaacaggcccggacctcctcctctaccacccccaatcgaaaggattcttcttctcagacaatgcctgtggaagacaagtcagaccccccagaggggtctgaggaagccgcagagccccggatggacacaccagaagaccaagatttaccgccctgcccagaggacatcgccaaggaaaaacgcactccagcacctgagcctgagccttgtgaggcgtccgagctgccagcaaagagattgaggagctcagaagagcccacagagaaggaacctccagggcagttacaggtgaaggcccagccgcaggcccggatgacagtaccgaaacagacacagacaccagacctgctgcctgaggccctggaagcccaagtgctgccacgattccagccacgggtcctgcaggtccaggcccaggtgcagtcacagactcagccgcggataccatccacagacacccaggtgcagccaaagctgcagaagcaggcgcaaacacagacctctccagagcacttagtgctgcaacagaagcaggtgcagccacagctgcagcaggaggcagagccacagaagcaggtgcagccacaggtccacacacaggcacagccaagcgtccagccacaggagcatcctccagcgcaggtgtcagtacagccaccagagcagacccatgagcagcctcacacccagccgcaggtgtcgttgctggctccagagcaaacaccagttgtggttcatgtctgcgggctggagatgccacctgatgcagtagaagctggtggaggcatggaaaagaccttgccagagcctgtgggcacccaagtcagcatggaagagattcagaatgagtcggcctgtggcctagatgtgggagaatgtgaaaacagagcgagagagatgccaggggtatggggcgccgggggctccctgaaggtcaccattctgcagagcagtgacagccgggcctttagcactgtacccctgacacctgtcccccgccccagtgactccgtctcctccacccctgcggctaccagcactccctctaagcaggccctccagttcttctgctacatctgcaaggccagctgctccagccagcaggagttccaggaccacatgtcggagcctcagcaccagcagcggctaggggagatccagcacatgagccaagcctgcctcctgtccctgctgcccgtgccccgggacgtcctggagacagaggatgaggagcctccaccaaggcgctggtgcaacacctgccagctctactacatgggggacctgatccaacaccgcaggacacaggaccacaagattgccaaacaatccttgcgacccttctgcaccgtttgcaaccgctacttcaaaacccctcgcaagtttgtggagcacgtgaagtcccaggggcataaggacaaagccaaggagctgaagtcgcttgagaaagaaattgctggccaagatgaggaccacttcattacagtggacgctgtgggttgcttcgagggtgatgaagaagaggaagaggatgatgaggatgaagaagagatcgaggttgaggaggaactctgcaagcaggtgaggtccagagatatatccagagaggagtggaagggctcggagacctacagccccaatactgcatatggtgtggacttcctggtgcccgtgatgggctatatctgccgcatctgccacaagttctatcacagcaactcaggggcacagctctcccactgcaagtccctgggccactttgagaacctgcagaaatacaaggcggccaagaaccccagccccaccacccgacctgtgagccgccggtgcgcaatcaacgcccggaacgctttgacagccctgttcacctccagcggccgcccaccctcccagcccaacacccaggacaaaacacccagcaaggtgacggctcgaccctcccagcccccactacctcggcgctcaacccgcctcaaaacctgatagagggacctccctgtccctggcctgcctgggtccagatctgctaatgctttttaggagtctgcctggaaactttgacatggttcatgtttttactcaaaatccaataaaacaaggtagtttggctgtgc

SEQ ID NO: 122 - DNA, 2688 bp, Homo sapiens
  misc_feature (147)..(147): second gene starts at position 147
atggctttcttgatgaagaagaagaaattcaaattccaaactactttcaccctggaggagctgactgcggttcccttcgtgaacggggtcctcttctgcaaggtccggctgctggatggaggggattttgtcagcttgtcgtcaaggactggaccagtttgcaatgccaccagccacgtatgacactgccggtctcaccatgcccacagcaacactgggtaacctccgaggctatggcatggcatccccaggcctcgcagcccccagcctcacacccccacaactggccactccaaatttgcaacagttctttccccaggccactcgccagtccttgctgggacctcctcctgttggggtccccatgaacccttcccagttcaacctttcaggacggaacccccagaaacaggcccggacctcctcctctaccacccccaatcgaaaggattcttcttctcagacaatgcctgtggaagacaagtcagaccccccagaggggtctgaggaagccgcagagccccggatggacacaccagaagaccaagatttaccgccctgcccagaggacatcgccaaggaaaaacgcactccagcacctgagcctgagccttgtgaggcgtccgagctgccagcaaagagattgaggagctcagaagagcccacagagaaggaacctccagggcagttacaggtgaaggcccagccgcaggcccggatgacagtaccgaaacagacacagacaccagacctgctgcctgaggccctggaagcccaagtgctgccacgattccagccacgggtcctgcaggtccaggcccaggtgcagtcacagactcagccgcggataccatccacagacacccaggtgcagccaaagctgcagaagcaggcgcaaacacagacctctccagagcacttagtgctgcaacagaagcaggtgcagccacagctgcagcaggaggcagagccacagaagcaggtgcagccacaggtacagccacaggcacattcacagggcccaaggcaggtgcagctgcagcaggaggcagagccgctgaagcaggtgcagccacaggtgcagccccaggcacattcacagcccccaaggcaggtgcagctgcagctgcagaagcaggtccagacacagacatatccacaggtccacacacaggcacagccaagcgtccagccacaggagcatcctccagcgcaggtgtcagtacagccaccagagcagacccatgagcagcctcacacccagccgcaggtgtcgttgctggctccagagcaaacaccagttgtggttcatgtctgcgggctggagatgccacctgatgcagtagaagctggtggaggcatggaaaagaccttgccagagcctgtgggcacccaagtcagcatggaagagattcagaatgagtcggcctgtggcctagatgtgggagaatgtgaaaacagagcgagagagatgccaggggtatggggcgccgggggctccctgaaggtcaccattctgcagagcagtgacagccgggcctttagcactgtacccctgacacctgtcccccgccccagtgactccgtctcctccacccctgcggctaccagcactccctctaagcaggccctccagttcttctgctacatctgcaaggccagctgctccagccagcaggagttccaggaccacatgtcggagcctcagcaccagcagcggctaggggagatccagcacatgagccaagcctgcctcctgtccctgctgcccgtgccccgggacgtcctggagacagaggatgaggagcctccaccaaggcgctggtgcaacacctgccagctctactacatgggggacctgatccaacaccgcaggacacaggaccacaagattgccaaacaatccttgcgacccttctgcaccgtttgcaaccgctacttcaaaacccctcgcaagtttgtggagcacgtgaagtcccaggggcataaggacaaagccaaggagctgaagtcgcttgagaaagaaattgctggccaagatgaggaccacttcattacagtggacgctgtgggttgcttcgagggtgatgaagaagaggaagaggatgatgaggatgaagaagagatcgaggttgaggaggaactctgcaagcaggtgaggtccagagatatatccagagaggagtggaagggctcggagacctacagccccaatactgcatatggtgtggacttcctggtgcccgtgatgggctatatctgccgcatctgccacaagttctatcacagcaactcaggggcacagctctcccactgcaagtccctgggccactttgagaacctgcagaaatacaaggcggccaagaaccccagccccaccacccgacctgtgagccgccggtgcgcaatcaacgcccggaacgctttgacagccctgttcacctccagcggccgcccaccctcccagcccaacacccaggacaaaacacccagcaaggtgacggctcgaccctcccagcccccactacctcggcgctcaacccgcctcaaaacctgatagagggacctccctgtccctggcctgcctgggtccagatctgctaatgctttttaggagtctgcctggaaactttgacatggttcatgtttttactcaaaatccaataaaacaaggtagtttggctgtgc

SEQ ID NO: 123 - DNA, 2616 bp, Homo sapiens
  misc_feature (147)..(147): second gene starts at position 147
atggctttcttgatgaagaagaagaaattcaaattccaaactactttcaccctggaggagctgactgcggttcccttcgtgaacggggtcctcttctgcaaggtccggctgctggatggaggggattttgtcagcttgtcgtcaaggtaacctccgaggctatggcatggcatccccaggcctcgcagcccccagcctcacacccccacaactggccactccaaatttgcaacagttctttccccaggccactcgccagtccttgctgggacctcctcctgttggggtccccatgaacccttcccagttcaacctttcaggacggaacccccagaaacaggcccggacctcctcctctaccacccccaatcgaaaggattcttcttctcagacaatgcctgtggaagacaagtcagaccccccagaggggtctgaggaagccgcagagccccggatggacacaccagaagaccaagatttaccgccctgcccagaggacatcgccaaggaaaaacgcactccagcacctgagcctgagccttgtgaggcgtccgagctgccagcaaagagattgaggagctcagaagagcccacagagaaggaacctccagggcagttacaggtgaaggcccagccgcaggcccggatgacagtaccgaaacagacacagacaccagacctgctgcctgaggccctggaagcccaagtgctgccacgattccagccacgggtcctgcaggtccaggcccaggtgcagtcacagactcagccgcggataccatccacagacacccaggtgcagccaaagctgcagaagcaggcgcaaacacagacctctccagagcacttagtgctgcaacagaagcaggtgcagccacagctgcagcaggaggcagagccacagaagcaggtgcagccacaggtacagccacaggcacattcacagggcccaaggcaggtgcagctgcagcaggaggcagagccgctgaagcaggtgcagccacaggtgcagccccaggcacattcacagcccccaaggcaggtgcagctgcagctgcagaagcaggtccagacacagacatatccacaggtccacacacaggcacagccaagcgtccagccacaggagcatcctccagcgcaggtgtcagtacagccaccagagcagacccatgagcagcctcacacccagccgcaggtgtcgttgctggctccagagcaaacaccagttgtggttcatgtctgcgggctggagatgccacctgatgcagtagaagctggtggaggcatggaaaagaccttgccagagcctgtgggcacccaagtcagcatggaagagattcagaatgagtcggcctgtggcctagatgtgggagaatgtgaaaacagagcgagagagatgccaggggtatggggcgccgggggctccctgaaggtcaccattctgcagagcagtgacagccgggcctttagcactgtacccctgacacctgtcccccgccccagtgactccgtctcctccacccctgcggctaccagcactccctctaagcaggccctccagttcttctgctacatctgcaaggccagctgctccagccagcaggagttccaggaccacatgtcggagcctcagcaccagcagcggctaggggagatccagcacatgagccaagcctgcctcctgtccctgctgcccgtgccccgggacgtcctggagacagaggatgaggagcctccaccaaggcgctggtgcaacacctgccagctctactacatgggggacctgatccaacaccgcaggacacaggaccacaagattgccaaacaatccttgcgacccttctgcaccgtttgcaaccgctacttcaaaacccctcgcaagtttgtggagcacgtgaagtcccaggggcataaggacaaagccaaggagctgaagtcgcttgagaaagaaattgctggccaagatgaggaccacttcattacagtggacgctgtgggttgcttcgagggtgatgaagaagaggaagaggatgatgaggatgaagaagagatcgaggttgaggaggaactctgcaagcaggtgaggtccagagatatatccagagaggagtggaagggctcggagacctacagccccaatactgcatatggtgtggacttcctggtgcccgtgatgggctatatctgccgcatctgccacaagttctatcacagcaactcaggggcacagctctcccactgcaagtccctgggccactttgagaacctgcagaaatacaaggcggccaagaaccccagccccaccacccgacctgtgagccgccggtgcgcaatcaacgcccggaacgctttgacagccctgttcacctccagcggccgcccaccctcccagcccaacacccaggacaaaacacccagcaaggtgacggctcgaccctcccagcccccactacctcggcgctcaacccgcctcaaaacctgatagagggacctccctgtccctggcctgcctgggtccagatctgctaatgctttttaggagtctgcctggaaactttgacatggttcatgtttttactcaaaatccaataaaacaaggtagtttggctgtgc

SEQ ID NO: 124 - DNA, 2505 bp, Homo sapiens
  misc_feature (147)..(147): second gene starts at position 147
atggctttcttgatgaagaagaagaaattcaaattccaaactactttcaccctggaggagctgactgcggttcccttcgtgaacggggtcctcttctgcaaggtccggctgctggatggaggggattttgtcagcttgtcgtcaaggactggaccagtttgcaatgccaccagccacgtatgacactgccggtctcaccatgcccacagcaacactgggtaacctccgaggctatggcatggcatccccaggcctcgcagcccccagcctcacacccccacaactggccactccaaatttgcaacagttctttccccaggccactcgccagtccttgctgggacctcctcctgttggggtccccatgaacccttcccagttcaacctttcaggacggaacccccagaaacaggcccggacctcctcctctaccacccccaatcgaaagacaatgcctgtggaagacaagtcagaccccccagaggggtctgaggaagccgcagagccccggatggacacaccagaagaccaagatttaccgccctgcccagaggacatcgccaaggaaaaacgcactccagcacctgagcctgagccttgtgaggcgtccgagctgccagcaaagagattgaggagctcagaagagcccacagagaaggaacctccagggcagttacaggtgaaggcccagccgcaggcccggatgacagtaccgaaacagacacagacaccagacctgctgcctgaggccctggaagcccaagtgctgccacgattccagccacgggtcctgcaggtccaggcccaggtgcagtcacagactcagccgcggataccatccacagacacccaggtgcagccaaagctgcagaagcaggcgcaaacacagacctctccagagcacttagtgctgcaacagaagcaggtgcagccacagctgcagcaggaggcagagccacagaagcaggtgcagccacaggtccacacacaggcacagccaagcgtccagccacaggagcatcctccagcgcaggtgtcagtacagccaccagagcagacccatgagcagcctcacacccagccgcaggtgtcgttgctggctccagagcaaacaccagttgtggttcatgtctgcgggctggagatgccacctgatgcagtagaagctggtggaggcatggaaaagaccttgccagagcctgtgggcacccaagtcagcatggaagagattcagaatgagtcggcctgtggcctagatgtgggagaatgtgaaaacagagcgagagagatgccaggggtatggggcgccgggggctccctgaaggtcaccattctgcagagcagtgacagccgggcctttagcactgtacccctgacacctgtcccccgccccagtgactccgtctcctccacccctgcggctaccagcactccctctaagcaggccctccagttcttctgctacatctgcaaggccagctgctccagccagcaggagttccaggaccacatgtcggagcctcagcaccagcagcggctaggggagatccagcacatgagccaagcctgcctcctgtccctgctgcccgtgccccgggacgtcctggagacagaggatgaggagcctccaccaaggcgctggtgcaacacctgccagctctactacatgggggacctgatccaacaccgcaggacacaggaccacaagattgccaaacaatccttgcgacccttctgcaccgtttgcaaccgctacttcaaaacccctcgcaagtttgtggagcacgtgaagtcccaggggcataaggacaaagccaaggagctgaagtcgcttgagaaagaaattgctggccaagatgaggaccacttcattacagtggacgctgtgggttgcttcgagggtgatgaagaagaggaagaggatgatgaggatgaagaagagatcgaggttgaggaggaactctgcaagcaggtgaggtccagagatatatccagagaggagtggaagggctcggagacctacagccccaatactgcatatggtgtggacttcctggtgcccgtgatgggctatatctgccgcatctgccacaagttctatcacagcaactcaggggcacagctctcccactgcaagtccctgggccactttgagaacctgcagaaatacaaggcggccaagaaccccagccccaccacccgacctgtgagccgccggtgcgcaatcaacgcccggaacgctttgacagccctgttcacctccagcggccgcccaccctcccagcccaacacccaggacaaaacacccagcaaggtgacggctcgaccctcccagcccccactacctcggcgctcaacccgcctcaaaacctgatagagggacctccctgtccctggcctgcctgggtccagatctgctaatgctttttaggagtctgcctggaaactttgacatggttcatgtttttactcaaaatccaataaaacaaggtagtttggctgtgc

SEQ ID NO: 125 - DNA, 2433 bp, Homo sapiens
  misc_feature (147)..(147): second gene starts at position 147
atggctttcttgatgaagaagaagaaattcaaattccaaactactttcaccctggaggagctgactgcggttcccttcgtgaacggggtcctcttctgcaaggtccggctgctggatggaggggattttgtcagcttgtcgtcaaggtaacctccgaggctatggcatggcatccccaggcctcgcagcccccagcctcacacccccacaactggccactccaaatttgcaacagttctttccccaggccactcgccagtccttgctgggacctcctcctgttggggtccccatgaacccttcccagttcaacctttcaggacggaacccccagaaacaggcccggacctcctcctctaccacccccaatcgaaagacaatgcctgtggaagacaagtcagaccccccagaggggtctgaggaagccgcagagccccggatggacacaccagaagaccaagatttaccgccctgcccagaggacatcgccaaggaaaaacgcactccagcacctgagcctgagccttgtgaggcgtccgagctgccagcaaagagattgaggagctcagaagagcccacagagaaggaacctccagggcagttacaggtgaaggcccagccgcaggcccggatgacagtaccgaaacagacacagacaccagacctgctgcctgaggccctggaagcccaagtgctgccacgattccagccacgggtcctgcaggtccaggcccaggtgcagtcacagactcagccgcggataccatccacagacacccaggtgcagccaaagctgcagaagcaggcgcaaacacagacctctccagagcacttagtgctgcaacagaagcaggtgcagccacagctgcagcaggaggcagagccacagaagcaggtgcagccacaggtccacacacaggcacagccaagcgtccagccacaggagcatcctccagcgcaggtgtcagtacagccaccagagcagacccatgagcagcctcacacccagccgcaggtgtcgttgctggctccagagcaaacaccagttgtggttcatgtctgcgggctggagatgccacctgatgcagtagaagctggtggaggcatggaaaagaccttgccagagcctgtgggcacccaagtcagcatggaagagattcagaatgagtcggcctgtggcctagatgtgggagaatgtgaaaacagagcgagagagatgccaggggtatggggcgccgggggctccctgaaggtcaccattctgcagagcagtgacagccgggcctttagcactgtacccctgacacctgtcccccgccccagtgactccgtctcctccacccctgcggctaccagcactccctctaagcaggccctccagttcttctgctacatctgcaaggccagctgctccagccagcaggagttccaggaccacatgtcggagcctcagcaccagcagcggctaggggagatccagcacatgagccaagcctgcctcctgtccctgctgcccgtgccccgggacgtcctggagacagaggatgaggagcctccaccaaggcgctggtgcaacacctgccagctctactacatgggggacctgatccaacaccgcaggacacaggaccacaagattgccaaacaatccttgcgacccttctgcaccgtttgcaaccgctacttcaaaacccctcgcaagtttgtggagcacgtgaagtcccaggggcataaggacaaagccaaggagctgaagtcgcttgagaaagaaattgctggccaagatgaggaccacttcattacagtggacgctgtgggttgcttcgagggtgatgaagaagaggaagaggatgatgaggatgaagaagagatcgaggttgaggaggaactctgcaagcaggtgaggtccagagatatatccagagaggagtggaagggctcggagacctacagccccaatactgcatatggtgtggacttcctggtgcccgtgatgggctatatctgccgcatctgccacaagttctatcacagcaactcaggggcacagctctcccactgcaagtccctgggccactttgagaacctgcagaaatacaaggcggccaagaaccccagccccaccacccgacctgtgagccgccggtgcgcaatcaacgcccggaacgctttgacagccctgttcacctccagcggccgcccaccctcccagcccaacacccaggacaaaacacccagcaaggtgacggctcgaccctcccagcccccactacctcggcgctcaacccgcctcaaaacctgatagagggacctccctgtccctggcctgcctgggtccagatctgctaatgctttttaggagtctgcctggaaactttgacatggttcatgtttttactcaaaatccaataaaacaaggtagtttggctgtgc

SEQ ID NO: 126 - DNA, 487 bp, Homo sapiens
  misc_feature (147)..(147): second gene starts at position 147
atggctttcttgatgaagaagaagaaattcaaattccaaactactttcaccctggaggagctgactgcggttcccttcgtgaacggggtcctcttctgcaaggtccggctgctggatggaggggattttgtcagcttgtcgtcaagaaatacaaggcggccaagaaccccagccccaccacccgacctgtgagccgccggtgcgcaatcaacgcccggaacgctttgacagccctgttcacctccagcggccgcccaccctcccagcccaacacccaggacaaaacacccagcaaggtgacggctcgaccctcccagcccccactacctcggcgctcaacccgcctcaaaacctgatagagggacctccctgtccctggcctgcctgggtccagatctgctaatgctttttaggagtctgcctggaaactttgacatggttcatgtttttactcaaaatccaataaaacaaggtagtttggctgtgc

SEQ ID NO: 127 - DNA, 2448 bp, Homo sapiens; identical to SEQ ID NO: 121
  misc_feature (147)..(147): second gene starts at position 147

SEQ ID NO: 128 - DNA, 2689 bp, Homo sapiens
  misc_feature (147)..(147): second gene starts at position 147
atggctttcttgatgaagaagaagaaattcaaattccaaactactttcaccctggaggagctgactgcggttcccttcgtgaacggggtcctcttctgcaaggtccggctgctggatggaggggattttgtcagcttgtcgtcaaggactggaccagtttgcaatgccaccagccacgtatgacactgccggtctcaccatgcccacagcaacactgggtaacctccgaggctatggcatggcatccccaggcctcgcagcccccagcctcacacccccacaactggccactccaaatttgcaacagttctttccccaggccactcgccagtccttgctgggacctcctcctgttggggtccccatgaacccttcccagttcaacctttcaggacggaacccccagaaacaggcccggacctcctcctctaccacccccaatcgaaaggattcttcttctcagacaatgcctgtggaagacaagtcagaccccccagaggggtctgaggaagccgcagagccccggatggacacaccagaagaccaagatttaccgccctgcccagaggacatcgccaaggaaaaacgcactccagcacctgagcctgagccttgtgaggcgtccgagctgccagcaaagagattgaggagctcagaagagcccacagagaaggaacctccagggcagttacaggtgaaggcccagccgcaggcccggatgacagtaccgaaacagacacagacaccagacctgctgcctgaggccctggaagcccaagtgctgccacgattccagccacgggtcctgcaggtccaggcccaggtgcagtcacagactcagccgcggataccatccacagacacccaggtgcagccaaagctgcagaagcaggcgcaaacacagacctctccagagcacttagtgctgcaacagaagcaggtgcagccacagctgcagcaggaggcagagccacagaagcaggtgcagccacaggtacagccacaggcacattcacagggcccaaggcaggtgcagctgcagcaggaggcagagccgctgaagcaggtgcagccacaggtgcagccccaggcacattcacagcccccaaggcaggtgcagctgcagctgcagaagcaggtccagacacagacatatccacaggtccacacacaggcacagccaagcgtccagccacaggagcatcctccagcgcaggtgtcagtacagccaccagagcagacccatgagcagcctcacacccagccgcaggtgtcgttgctggctccagagcaaacaccagttgtggttcatgtctgcgggctggagatgccacctgatgcagtagaagctggtggaggcatggaaaagaccttgccagagcctgtgggcacccaagtcagcatggaagagattcagaatgagtcggcctgtggcctagatgtgggagaatgtgaaaacagagcgagagagatgccaggggtatggggcgccgggggctccctgaaggtcaccattctgcagagcagtgacagccgggcctttagcactgtacccctgacacctgtcccccgccccagtgactccgtctcctccacccctgcggctaccagcactccctctaagcaggccctccagttcttctgctacatctgcaaggccagctgctccagccagcaggagttccaggaccacatgtcggagcctcagcaccagcagcggctaggggagatccagcacatgagccaagcctgcctcctgtccctgctgcccgtgccccgggacgtcctggagacagaggatgaggagcctccaccaaggcgctggtgcaacacctgccagctctactacatgggggacctgatccaacaccgcaggacacaggaccacaagattgccaaacaatccttgcgacccttctgcaccgtttgcaaccgctacttcaaaacccctcgcaagtttgtggagcacgtgaagtcccaggggcataaggacaaagccaaggagctgaagtcgcttgagaaagaaattgctggccaagatgaggaccacttcattacagtggacgctgtgggttgcttcgagggtgatgaagaagaggaagaggatgatgaggatgaagaagagatcgaggttgaggaggaactctgcaagcaggtgaggtccagagatatatccagagaggagtggaagggctcggagacctacagccccaatactgcatatggtgtggacttcctggtgcccgtgatgggctatatctgccgcatctgccacaagttctatcacagcaactcaggggcacagctctcccactgcaagtccctgggccactttgagaacctgcagaaatacaaggcggccaagaaccccagccccaccacccgacctgtgagccgccggtgcgcaatcaacgcccggaacgctttgacagccctgttcacctccagcggccgcccaccctcccagcccaacacccaggacaaaacacccagcaaggtgacggctcgaccctcccagcccccactacctcggcgctcaacccgcctcaaaacctgatagagggacctccctgtccctggcctgcctgggtccagatctgctaatgctttttaggagtctgcctggaaactttgacatggttcatgtttttactcaaaatccaataaaacaaggtagtttggctgtgca

SEQ ID NO: 129 - DNA, 2617 bp, Homo sapiens
  misc_feature (147)..(147): second gene starts at position 147
atggctttcttgatgaagaagaagaaattcaaattccaaactactttcaccctggaggagctgactgcggttcccttcgtgaacggggtcctcttctgcaaggtccggctgctggatggaggggattttgtcagcttgtcgtcaaggtaacctccgaggctatggcatggcatccccaggcctcgcagcccccagcctcacacccccacaactggccactccaaatttgcaacagttctttccccaggccactcgccagtccttgctgggacctcctcctgttggggtccccatgaacccttcccagttcaacctttcaggacggaacccccagaaacaggcccggacctcctcctctaccacccccaatcgaaaggattcttcttctcagacaatgcctgtggaagacaagtcagaccccccagaggggtctgaggaagccgcagagccccggatggacacaccagaagaccaagatttaccgccctgcccagaggacatcgccaaggaaaaacgcactccagcacctgagcctgagccttgtgaggcgtccgagctgccagcaaagagattgaggagctcagaagagcccacagagaaggaacctccagggcagttacaggtgaaggcccagccgcaggcccggatgacagtaccgaaacagacacagacaccagacctgctgcctgaggccctggaagcccaagtgctgccacgattccagccacgggtcctgcaggtccaggcccaggtgcagtcacagactcagccgcggataccatccacagacacccaggtgcagccaaagctgcagaagcaggcgcaaacacagacctctccagagcacttagtgctgcaacagaagcaggtgcagccacagctgcagcaggaggcagagccacagaagcaggtgcagccacaggtacagccacaggcacattcacagggcccaaggcaggtgcagctgcagcaggaggcagagccgctgaagcaggtgcagccacaggtgcagccccaggcacattcacagcccccaaggcaggtgcagctgcagctgcagaagcaggtccagacacagacatatccacaggtccacacacaggcacagccaagcgtccagccacaggagcatcctccagcgcaggtgtcagtacagccaccagagcagacccatgagcagcctcacacccagccgcaggtgtcgttgctggctccagagcaaacaccagttgtggttcatgtctgcgggctggagatgccacctgatgcagtagaagctggtggaggcatggaaaagaccttgccagagcctgtgggcacccaagtcagcatggaagagattcagaatgagtcggcctgtggcctagatgtgggagaatgtgaaaacagagcgagagagatgccaggggtatggggcgccgggggctccctgaaggtcaccattctgcagagcagtgacagccgggcctttagcactgtacccctgacacctgtcccccgccccagtgactccgtctcctccacccctgcggctaccagcactccctctaagcaggccctccagttcttctgctacatctgcaaggccagctgctccagccagcaggagttccaggaccacatgtcggagcctcagcaccagcagcggctaggggagatccagcacatgagccaagcctgcctcctgtccctgctgcccgtgccccgggacgtcctggagacagaggatgaggagcctccaccaaggcgctggtgcaacacctgccagctctactacatgggggacctgatccaacaccgcaggacacaggaccacaagattgccaaacaatccttgcgacccttctgcaccgtttgcaaccgctacttcaaaacccctcgcaagtttgtggagcacgtgaagtcccaggggcataaggacaaagccaaggagctgaagtcgcttgagaaagaaattgctggccaagatgaggaccacttcattacagtggacgctgtgggttgcttcgagggtgatgaagaagaggaagaggatgatgaggatgaagaagagatcgaggttgaggaggaactctgcaagcaggtgaggtccagagatatatccagagaggagtggaagggctcggagacctacagccccaatactgcatatggtgtggacttcctggtgcccgtgatgggctatatctgccgcatctgccacaagttctatcacagcaactcaggggcacagctctcccactgcaagtccctgggccactttgagaacctgcagaaatacaaggcggccaagaaccccagccccaccacccgacctgtgagccgccggtgcgcaatcaacgcccggaacgctttgacagccctgttcacctccagcggccgcccaccctcccagcccaacacccaggacaaaacacccagcaaggtgacggctcgaccctcccagcccccactacctcggcgctcaacccgcctcaaaacctgatagagggacctccctgtccctggcctgcctgggtccagatctgctaatgctttttaggagtctgcctggaaactttgacatggttcatgtttttactcaaaatccaataaaacaaggtagtttggctgtgca

SEQ ID NO: 130 - DNA, 2217 bp, Homo sapiens
  misc_feature (122)..(122): second gene starts at position 122
atggcggcggacacgcaggtttccgagacactaaagcgttttgcagggaaggtgacaacagccagtgtaaaggaacggagagaaatcctcagtgaacttgggaagtgtgttgctggaaaagccattcctctcactgcctacggaccaatggcggcggcagcggcggcagcggctgtggttcgagggacaggctctcacccctggacgatggctccccctccaggttcgactcccagccgcacagggggcttcctggggaccaccagccccggccccatggccgagctctacggggcggccaaccaggactcgggggtcagcagttacatcagcgccgccagccctgcccccagcaccggcttcggccacagtcttgggggccctttgattgccacagccttcaccaatgggtaccactgaagcaggggacggtggcaggagcgccccagcctgcagctgactgaggaccacgagtgagccagcgagggggcgggagacctcagccgcagccgccgccccctcccctgcagcgactcggacccgctactgcctgcccccaactccccgggcccggcccctgccctgctgcccccaacagcgtctggctcccctactaacgtccccctcttcgcccttgcccccatccccacccgcccctctcccggccctgcttttatttattttggattagccggttgcccaccccagccctctggtccatccctccctccgtgccgcgcccccctaggaccgccccctccccaaaaggcttttggatttgtgcatagctggagtgaaggcggagggagcctgctacaggccgcagcccaacccctgttttttattcagatttcccctcctttaccctttccctttttttttttttttttttttttaaagaaaccttttttaaactatttctaggtttgtgaatgtgaagccccaggccgcagggggcaaggggccaggtgccccccaccagctgagaacaaagtgtctatctgggtgtgggcccctggccgcctccctccagccctggagaggagggcagggctgcggggaggccaggccgagcccctggaaccatcccgtcctgtatcatatgtaaatactgtgaggtgatgtgcccacccctctctaagacccctcgggggtgaggggctcccccctcccctgtttctgtcccctcagacaccgttactgtaagcttgcaggcctcagctgtggccacggcaggcccgctctctcaggccctcagggtcaaggccttggttggacctgcccactccaaaaacccagtgtgggggcaaagggcgtgggaagagcagggcttgcccagcgacactgctggacaggaattaactctccaaaggtctcccctgctccctacctaggttggggcttcatggtttctgctcagtctgtcccccttccccctcgacccccgcaatgagtgggcaccaggggacgctctggcgagggcagaccccaggggaaagcaaagggcgtctcagggaacccccacattctctcactgaagtttcccaccaggatgaccccacagccagagtcccttggcagcccctcaccccagaccccccttctaaggaaaaagagaggttcagagcgttggaccttcatgaacagtggcctggctggcgtggcagggccaaggcccacccactgccatcccccttctgtgtgtccctctcccccagttatgaggcccagggcctgagctctcttccccagcattgcccccacccggaaaccccacctttggagagttaattgtctgtgtgaggtgcttaacctatcagccctgagaacacaaagcaataatctttgttactgagatgcgcggctgttcgtgttttgggttttttttttttttaatgtttcctaataaaagagaagctgcattttattggtttttatttttaattttctacacgtttgagctgagtcctgagacacttagcttccctctccctcattcccggacccttccaccccactgggcccaaccatgggctcaggaccctggaattccgttttctgatttgctttgggattttttttttttttaagatgttacatggtgtttcgaagccagcaagttaccatcctccggtgtctcttctctccacatctgtaacttctttttccaggttttattttcagttttaaattcctaataaattatttgaaaacgtt

SEQ ID NO: 131 - DNA, 2690 bp, Homo sapiens
  misc_feature (1735)..(1735): second gene starts at position 1735
atgccggggttcctggttcgcatcctccctctgttgctggttctgctgcttctgggccctacgcgcggcttgcgcaatgccacccagaggatgtttgaaattgactatagccgggactccttcctcaaggatggccagccatttcgctacatctcaggaagcattcactactcccgtgtgccccgcttctactggaaggaccggctgctgaagatgaagatggctgggctgaacgccatccagacgtatgtgccctggaactttcatgagccctggccaggacagtaccagttttctgaggaccatgatgtggaatattttcttcggctggctcatgagctgggactgctggttatcctgaggcccgggccctacatctgtgcagagtgggaaatgggaggattacctgcttggctgctagagaaagagtctattcttctccgctcctccgacccagattacctggcagctgtggacaagtggttgggagtccttctgcccaagatgaagcctctcctctatcagaatggagggccagttataacagtgcaggttgaaaatgaatatggcagctactttgcctgtgattttgactacctgcgcttcctgcagaagcgctttcgccaccatctgggggatgatgtggttctgtttaccactgatggagcacataaaacattcctgaaatgtggggccctgcagggcctctacaccacggtggactttggaacaggcagcaacatcacagatgctttcctaagccagaggaagtgtgagcccaaaggacccttgatcaattctgaattctatactggctggctagatcactggggccaacctcactccacaatcaagaccgaagcagtggcttcctccctctatgatatacttgcccgtggggcgagtgtgaacttgtacatgtttataggtgggaccaattttgcctattggaatggggccaactcaccctatgcagcacagcccaccagctacgactatgatgccccactgagtgaggctggggacctcactgagaagtattttgctctgcgaaacatcatccagaagtttgaaaaagtaccagaaggtcctatccctccatctacaccaaagtttgcatatggaaaggtcactttggaaaagttaaagacagtgggagcagctctggacattctgtgtccctctgggcccatcaaaagcctttatcccttgacatttatccaggtgaaacagcattatgggtttgtgctgtaccggacaacacttcctcaagattgcagcaacccagcacctctctcttcacccctcaatggagtccacgatcgagcatatgttgctgtggatgggatcccccagggagtccttgagcgaaacaatgtgatcactctgaacataacagggaaagctggagccactctggaccttctggtagagaacatgggacgtgtgaactatggtgcatatatcaacgattttaagggtttggtttctaacctgactctcagttccaatatcctcacggactggacgatctttccactggacactgaggatgcagtgtgcagccacctggggggctggggacaccgtgacagtggccaccatgatgaagcctgggcccacaactcatccaactacacgctcccggccttttatatggggaacttctccattcccagtgggatcccagacttgccccaggacacctttatccagtttcctggatggaccaaggtcaccctgctgattgccttcatctgtgtgcggagctccctgtggaccaactacagcgcctacagctactttgaagtggtcaccatttgcgacttgataatgatcctcgccttttacctggtccacctcttccgcttctaccgcgtgctcacctgtatcagctggcccctgtcggaacttctgcactatttaatcggtaccctgctcctcctcatcgcctccattgtggcagcttccaagagttacaaccagagcggactggtagccggagcgatctttggtttcatggccaccttcctctgcatggcaagcatatggctgtcctataagatctcgtgtgtaacccagtccacagatgcagccgtctgatgaggccacaacccctaggcccctcaggagctttgcagagaggaggacgtgtactccaggcgaggcctctggacctgtgttcctgtgccaaagtcctgtcaggctggtgggcaccaggaaaggcctgcaccctcttcctgctctcccaggaagccagctccctgagctcctgagccagccggaaactcttcctccagccttccggggagaacatccctcccattctgggaaaggaaagcagcctccagggaaatgttttctgccttcctgcttctagaaccacctcaggtactgatgaaccccacttagcacagctgaaggggtttgtgaatactcccgcctaaatcccttctacttcactcctcaggggagtgaagtgccttaagaaacaaagccctgtcctaatttatctagcttgtcagtccggtcttagagataccctctttcctgaagtgaggcgtgcctgtagaaacactatgtggtcagcctgtccccaaggagatcttgtgtctcctctccatctctgcctttgttaccagtgtgcatgtgtttgtgtgttttttaataaaatattgactcggccagtt

SEQ ID NO: 132 - DNA, 2591 bp, Homo sapiens
  misc_feature (1735)..(1735): second gene starts at position 1735
atgccggggttcctggttcgcatcctccctctgttgctggttctgctgcttctgggccctacgcgcggcttgcgcaatgccacccagaggatgtttgaaattgactatagccgggactccttcctcaaggatggccagccatttcgctacatctcaggaagcattcactactcccgtgtgccccgcttctactggaaggaccggctgctgaagatgaagatggctgggctgaacgccatccagacgtatgtgccctggaactttcatgagccctggccaggacagtaccagttttctgaggaccatgatgtggaatattttcttcggctggctcatgagctgggactgctggttatcctgaggcccgggccctacatctgtgcagagtgggaaatgggaggattacctgcttggctgctagagaaagagtctattcttctccgctcctccgacccagattacctggcagctgtggacaagtggttgggagtccttctgcccaagatgaagcctctcctctatcagaatggagggccagttataacagtgcaggttgaaaatgaatatggcagctactttgcctgtgattttgactacctgcgcttcctgcagaagcgctttcgccaccatctgggggatgatgtggttctgtttaccactgatggagcacataaaacattcctgaaatgtggggccctgcagggcctctacaccacggtggactttggaacaggcagcaacatcacagatgctttcctaagccagaggaagtgtgagcccaaaggacccttgatcaattctgaattctatactggctggctagatcactggggccaacctcactccacaatcaagaccgaagcagtggcttcctccctctatgatatacttgcccgtggggcgagtgtgaacttgtacatgtttataggtgggaccaattttgcctattggaatggggccaactcaccctatgcagcacagcccaccagctacgactatgatgccccactgagtgaggctggggacctcactgagaagtattttgctctgcgaaacatcatccagaagtttgaaaaagtaccagaaggtcctatccctccatctacaccaaagtttgcatatggaaaggtcactttggaaaagttaaagacagtgggagcagctctggacattctgtgtccctctgggcccatcaaaagcctttatcccttgacatttatccaggtgaaacagcattatgggtttgtgctgtaccggacaacacttcctcaagattgcagcaacccagcacctctctcttcacccctcaatggagtccacgatcgagcatatgttgctgtggatgggatcccccagggagtccttgagcgaaacaatgtgatcactctgaacataacagggaaagctggagccactctggaccttctggtagagaacatgggacgtgtgaactatggtgcatatatcaacgattttaagggtttggtttctaacctgactctcagttccaatatcctcacggactggacgatctttccactggacactgaggatgcagtgtgcagccacctggggggctggggacaccgtgacagtggccaccatgatgaagcctgggcccacaactcatccaactacacgctcccggccttttatatggggaacttctccattcccagtgggatcccagacttgccccaggacacctttatccagtttcctggatggaccaaggtcaccctgctgattgccttcatctgtgtgcggagctccctgtggaccaactacagcgcctacagctactttgaagtggtcaccatttgcgacttgataatgatcctcgccttttacctggtccacctcttccgcttctaccgcgtgctcacctgtatcagctggcccctgtcgatctttggtttcatggccaccttcctctgcatggcaagcatatggctgtcctataagatctcgtgtgtaacccagtccacagatgcagccgtctgatgaggccacaacccctaggcccctcaggagctttgcagagaggaggacgtgtactccaggcgaggcctctggacctgtgttcctgtgccaaagtcctgtcaggctggtgggcaccaggaaaggcctgcaccctcttcctgctctcccaggaagccagctccctgagctcctgagccagccggaaactcttcctccagccttccggggagaacatccctcccattctgggaaaggaaagcagcctccagggaaatgttttctgccttcctgcttctagaaccacctcaggtactgatgaaccccacttagcacagctgaaggggtttgtgaatactcccgcctaaatcccttctacttcactcctcaggggagtgaagtgccttaagaaacaaagccctgtcctaatttatctagcttgtcagtccggtcttagagataccctctttcctgaagtgaggcgtgcctgtagaaacactatgtggtcagcctgtccccaaggagatcttgtgtctcctctccatctctgcctttgttaccagtgtgcatgtgtttgtgtgttttttaataaaatattgactcggccagtt

SEQ ID NO: 133 - DNA, 2600 bp, Homo sapiens
  misc_feature (1645)..(1645): second gene starts at position 1645
atgtttgaaattgactatagccgggactccttcctcaaggatggccagccatttcgctacatctcaggaagcattcactactcccgtgtgccccgcttctactggaaggaccggctgctgaagatgaagatggctgggctgaacgccatccagacgtatgtgccctggaactttcatgagccctggccaggacagtaccagttttctgaggaccatgatgtggaatattttcttcggctggctcatgagctgggactgctggttatcctgaggcccgggccctacatctgtgcagagtgggaaatgggaggattacctgcttggctgctagagaaagagtctattcttctccgctcctccgacccagattacctggcagctgtggacaagtggttgggagtccttctgcccaagatgaagcctctcctctatcagaatggagggccagttataacagtgcaggttgaaaatgaatatggcagctactttgcctgtgattttgactacctgcgcttcctgcagaagcgctttcgccaccatctgggggatgatgtggttctgtttaccactgatggagcacataaaacattcctgaaatgtggggccctgcagggcctctacaccacggtggactttggaacaggcagcaacatcacagatgctttcctaagccagaggaagtgtgagcccaaaggacccttgatcaattctgaattctatactggctggctagatcactggggccaacctcactccacaatcaagaccgaagcagtggcttcctccctctatgatatacttgcccgtggggcgagtgtgaacttgtacatgtttataggtgggaccaattttgcctattggaatggggccaactcaccctatgcagcacagcccaccagctacgactatgatgccccactgagtgaggctggggacctcactgagaagtattttgctctgcgaaacatcatccagaagtttgaaaaagtaccagaaggtcctatccctccatctacaccaaagtttgcatatggaaaggtcactttggaaaagttaaagacagtgggagcagctctggacattctgtgtccctctgggcccatcaaaagcctttatcccttgacatttatccaggtgaaacagcattatgggtttgtgctgtaccggacaacacttcctcaagattgcagcaacccagcacctctctcttcacccctcaatggagtccacgatcgagcatatgttgctgtggatgggatcccccagggagtccttgagcgaaacaatgtgatcactctgaacataacagggaaagctggagccactctggaccttctggtagagaacatgggacgtgtgaactatggtgcatatatcaacgattttaagggtttggtttctaacctgactctcagttccaatatcctcacggactggacgatctttccactggacactgaggatgcagtgtgcagccacctggggggctggggacaccgtgacagtggccaccatgatgaagcctgggcccacaactcatccaactacacgctcccggccttttatatggggaacttctccattcccagtgggatcccagacttgccccaggacacctttatccagtttcctggatggaccaaggtcaccctgctgattgccttcatctgtgtgcggagctccctgtggaccaactacagcgcctacagctactttgaagtggtcaccatttgcgacttgataatgatcctcgccttttacctggtccacctcttccgcttctaccgcgtgctcacctgtatcagctggcccctgtcggaacttctgcactatttaatcggtaccctgctcctcctcatcgcctccattgtggcagcttccaagagttacaaccagagcggactggtagccggagcgatctttggtttcatggccaccttcctctgcatggcaagcatatggctgtcctataagatctcgtgtgtaacccagtccacagatgcagccgtctgatgaggccacaacccctaggcccctcaggagctttgcagagaggaggacgtgtactccaggcgaggcctctggacctgtgttcctgtgccaaagtcctgtcaggctggtgggcaccaggaaaggcctgcaccctcttcctgctctcccaggaagccagctccctgagctcctgagccagccggaaactcttcctccagccttccggggagaacatccctcccattctgggaaaggaaagcagcctccagggaaatgttttctgccttcctgcttctagaaccacctcaggtactgatgaaccccacttagcacagctgaaggggtttgtgaatactcccgcctaaatcccttctacttcactcctcaggggagtgaagtgccttaagaaacaaagccctgtcctaatttatctagcttgtcagtccggtcttagagataccctctttcctgaagtgaggcgtgcctgtagaaacactatgtggtcagcctgtccccaaggagatcttgtgtctcctctccatctctgcctttgttaccagtgtgcatgtgtttgtgtgttttttaataaaatattgactcggccagtt

SEQ ID NO: 134 - DNA, 2501 bp, Homo sapiens
  misc_feature (1645)..(1645): second gene starts at position 1645
atgtttgaaattgactatagccgggactccttcctcaaggatggccagccatttcgctacatctcaggaagcattcactactcccgtgtgccccgcttctactggaaggaccggctgctgaagatgaagatggctgggctgaacgccatccagacgtatgtgccctggaactttcatgagccctggccaggacagtaccagttttctgaggaccatgatgtggaatattttcttcggctggctcatgagctgggactgctggttatcctgaggcccgggccctacatctgtgcagagtgggaaatgggaggattacctgcttggctgctagagaaagagtctattcttctccgctcctccgacccagattacctggcagctgtggacaagtggttgggagtccttctgcccaagatgaagcctctcctctatcagaatggagggccagttataacagtgcaggttgaaaatgaatatggcagctactttgcctgtgattttgactacctgcgcttcctgcagaagcgctttcgccaccatctgggggatgatgtggttctgtttaccactgatggagcacataaaacattcctgaaatgtggggccctgcagggcctctacaccacggtggactttggaacaggcagcaacatcacagatgctttcctaagccagaggaagtgtgagcccaaaggacccttgatcaattctgaattctatactggctggctagatcactggggccaacctcactccacaatcaagaccgaagcagtggcttcctccctctatgatatacttgcccgtggggcgagtgtgaacttgtacatgtttataggtgggaccaattttgcctattggaatggggccaactcaccctatgcagcacagcccaccagctacgactatgatgccccactgagtgaggctggggacctcactgagaagtattttgctctgcgaaacatcatccagaagtttgaaaaagtaccagaaggtcctatccctccatctacaccaaagtttgcatatggaaaggtcactttggaaaagttaaagacagtgggagcagctctggacattctgtgtccctctgggcccatcaaaagcctttatcccttgacatttatccaggtgaaacagcattatgggtttgtgctgtaccggacaacacttcctcaagattgcagcaacccagcacctctctcttcacccctcaatggagtccacgatcgagcatatgttgctgtggatgggatcccccagggagtccttgagcgaaacaatgtgatcactctgaacataacagggaaagctggagccactctggaccttctggtagagaacatgggacgtgtgaactatggtgcatatatcaacgattttaagggtttggtttctaacctgactctcagttccaatatcctcacggactggacgatctttccactggacactgaggatgcagtgtgcagccacctggggggctggggacaccgtgacagtggccaccatgatgaagcctgggcccacaactcatccaactacacgctcccggccttttatatggggaacttctccattcccagtgggatcccagacttgccccaggacacctttatccagtttcctggatggaccaaggtcaccctgctgattgccttcatctgtgtgcggagctccctgtggaccaactacagcgcctacagctactttgaagtggtcaccatttgcgacttgataatgatcctcgccttttacctggtccacctcttccgcttctaccgcgtgctcacctgtatcagctggcccctgtcgatctttggtttcatggccaccttcctctgcatggcaagcatatggctgtcctataagatctcgtgtgtaacccagtccacagatgcagccgtctgatgaggccacaacccctaggcccctcaggagctttgcagagaggaggacgtgtactccaggcgaggcctctggacctgtgttcctgtgccaaagtcctgtcaggctggtgggcaccaggaaaggcctgcaccctcttcctgctctcccaggaagccagctccctgagctcctgagccagccggaaactcttcctccagccttccggggagaacatccctcccattctgggaaaggaaagcagcctccagggaaatgttttctgccttcctgcttctagaaccacctcaggtactgatgaaccccacttagcacagctgaaggggtttgtgaatactcccgcctaaatcccttctacttcactcctcaggggagtgaagtgccttaagaaacaaagccctgtcctaatttatctagcttgtcagtccggtcttagagataccctctttcctgaagtgaggcgtgcctgtagaaacactatgtggtcagcctgtccccaaggagatcttgtgtctcctctccatctctgcctttgttaccagtgtgcatgtgtttgtgtgttttttaataaaatattgactcggccagtt

SEQ ID NO: 135 - DNA, 2297 bp, Homo sapiens
  misc_feature (1342)..(1342): second gene starts at position 1342
atgccggggttcctggttcgcatcctccctctgttgctggttctgctgcttctgggccctacgcgcggcttgcgcaatgccacccagaggatgtttgaaattgactatagccgggactccttcctcaaggatggccagccatttcgctacatctcaggaagcattcactactcccgtgtgccccgcttctactggaaggaccggctgctgaagatgaagatggctgggctgaacgccatccagacattacctggcagctgtggacaagtggttgggagtccttctgcccaagatgaagcctctcctctatcagaatggagggccagttataacagtgcaggcagcaacatcacagatgctttcctaagccagaggaagtgtgagcccaaaggacccttgatcaattctgaattctatactggctggctagatcactggggccaacctcactccacaatcaagaccgaagcagtggcttcctccctctatgatatacttgcccgtggggcgagtgtgaacttgtacatgtttataggtgggaccaattttgcctattggaatggggccaactcaccctatgcagcacagcccaccagctacgactatgatgccccactgagtgaggctggggacctcactgagaagtattttgctctgcgaaacatcatccagaagtttgaaaaagtaccagaaggtcctatccctccatctacaccaaagtttgcatatggaaaggtcactttggaaaagttaaagacagtgggagcagctctggacattctgtgtccctctgggcccatcaaaagcctttatcccttgacatttatccaggtgaaacagcattatgggtttgtgctgtaccggacaacacttcctcaagattgcagcaacccagcacctctctcttcacccctcaatggagtccacgatcgagcatatgttgctgtggatgggatcccccagggagtccttgagcgaaacaatgtgatcactctgaacataacagggaaagctggagccactctggaccttctggtagagaacatgggacgtgtgaactatggtgcatatatcaacgattttaagggtttggtttctaacctgactctcagttccaatatcctcacggactggacgatctttccactggacactgaggatgcagtgtgcagccacctggggggctggggacaccgtgacagtggccaccatgatgaagcctgggcccacaactcatccaactacacgctcccggccttttatatggggaacttctccattcccagtgggatcccagacttgccccaggacacctttatccagtttcctggatggaccaaggtcaccctgctgattgccttcatctgtgtgcggagctccctgtggaccaactacagcgcctacagctactttgaagtggtcaccatttgcgacttgataatgatcctcgccttttacctggtccacctcttccgcttctaccgcgtgctcacctgtatcagctggcccctgtcggaacttctgcactatttaatcggtaccctgctcctcctcatcgcctccattgtggcagcttccaagagttacaaccagagcggactggtagccggagcgatctttggtttcatggccaccttcctctgcatggcaagcatatggctgtcctataagatctcgtgtgtaacccagtccacagatgcagccgtctgatgaggccacaacccctaggcccctcaggagctttgcagagaggaggacgtgtactccaggcgaggcctctggacctgtgttcctgtgccaaagtcctgtcaggctggtgggcaccaggaaaggcctgcaccctcttcctgctctcccaggaagccagctccctgagctcctgagccagccggaaactcttcctccagccttccggggagaacatccctcccattctgggaaaggaaagcagcctccagggaaatgttttctgccttcctgcttctagaaccacctcaggtactgatgaaccccacttagcacagctgaaggggtttgtgaatactcccgcctaaatcccttctacttcactcctcaggggagtgaagtgccttaagaaacaaagccctgtcctaatttatctagcttgtcagtccggtcttagagataccctctttcctgaagtgaggcgtgcctgtagaaacactatgtggtcagcctgtccccaaggagatcttgtgtctcctctccatctctgcctttgttaccagtgtgcatgtgtttgtgtgttttttaataaaatattgactcggccagtt

SEQ ID NO: 136 - DNA, 2198 bp, Homo sapiens
  misc_feature (1342)..(1342): second gene starts at position 1342
atgccggggttcctggttcgcatcctccctctgttgctggttctgctgcttctgggccctacgcgcggcttgcgcaatgccacccagaggatgtttgaaattgactatagccgggactccttcctcaaggatggccagccatttcgctacatctcaggaagcattcactactcccgtgtgccccgcttctactggaaggaccggctgctgaagatgaagatggctgggctgaacgccatccagacattacctggcagctgtggacaagtggttgggagtccttctgcccaagatgaagcctctcctctatcagaatggagggccagttataacagtgcaggcagcaacatcacagatgctttcctaagccagaggaagtgtgagcccaaaggacccttgatcaattctgaattctatactggctggctagatcactggggccaacctcactccacaatcaagaccgaagcagtggcttcctccctctatgatatacttgcccgtggggcgagtgtgaacttgtacatgtttataggtgggaccaattttgcctattggaatggggccaactcaccctatgcagcacagcccaccagctacgactatgatgccccactgagtgaggctggggacctcactgagaagtattttgctctgcgaaacatcatccagaagtttgaaaaagtaccagaaggtcctatccctccatctacaccaaagtttgcatatggaaaggtcactttggaaaagttaaagacagtgggagcagctctggacattctgtgtccctctgggcccatcaaaagcctttatcccttgacatttatccaggtgaaacagcattatgggtttgtgctgtaccggacaacacttcctcaagattgcagcaacccagcacctctctcttcacccctcaatggagtccacgatcgagcatatgttgctgtggatgggatcccccagggagtccttgagcgaaacaatgtgatcactctgaacataacagggaaagctggagccactctggaccttctggtagagaacatgggacgtgtgaactatggtgcatatatcaacgattttaagggtttggtttctaacctgactctcagttccaatatcctcacggactggacgatctttccactggacactgaggatgcagtgtgcagccacctggggggctggggacaccgtgacagtggccaccatgatgaagcctgggcccacaactcatccaactacacgctcccggccttttatatggggaacttctccattcccagtgggatcccagacttgccccaggacacctttatccagtttcctggatggaccaaggtcaccctgctgattgccttcatctgtgtgcggagctccctgtggaccaactacagcgcctacagctactttgaagtggtcaccatttgcgacttgataatgatcctcgccttttacctggtccacctcttccgcttctaccgcgtgctcacctgtatcagctggcccctgtcgatctttggtttcatggccaccttcctctgcatggcaagcatatggctgtcctataagatctcgtgtgtaacccagtccacagatgcagccgtctgatgaggccacaacccctaggcccctcaggagctttgcagagaggaggacgtgtactccaggcgaggcctctggacctgtgttcctgtgccaaagtcctgtcaggctggtgggcaccaggaaaggcctgcaccctcttcctgctctcccaggaagccagctccctgagctcctgagccagccggaaactcttcctccagccttccggggagaacatccctcccattctgggaaaggaaagcagcctccagggaaatgttttctgccttcctgcttctagaaccacctcaggtactgatgaaccccacttagcacagctgaaggggtttgtgaatactcccgcctaaatcccttctacttcactcctcaggggagtgaagtgccttaagaaacaaagccctgtcctaatttatctagcttgtcagtccggtcttagagataccctctttcctgaagtgaggcgtgcctgtagaaacactatgtggtcagcctgtccccaaggagatcttgtgtctcctctccatctctgcctttgttaccagtgtgcatgtgtttgtgtgttttttaataaaatattgactcggccagtt

SEQ ID NO: 137 - DNA, 950 bp, Homo sapiens
  misc_feature (677)..(677): second gene starts at position 677
atgccctccatgttggaacgcattagcaaaaatttggtcaaagagattggaagcaaagacctgacacctgtcaaatacctattgagtgccaccaaattacgtcagtttgttatattacgaaagaagaaggattctcgttcatcattttgggaacaatctgactatgttccagttgaattctccctcaatgacatcctggagccaagttcttcagtcctagaaactgttgtgacaggaccgttccacttcagtgacattatgatccagaagcataaggctgacatgggtgtgaatgttggtatagaagtgagtgtgtcaggggaggcctctgtggaccatggatgctccctcgagtttcaaattgttaccatcccatcaccaaacctggaagactttcaaaaaaggaaactgttggatccagagccatcatttctgaaggagtgccggaggagaggggacaacctgtacgtggtgacagaggctgttgaactgatcaacaatactgtgctgtacgatagcagtagtgtgaatattttagggaaaattgctctttggattacctatggcaagggtcaaggccaaggagagagtctcagagtgaagaagaaggcgctgactcttcagaaaggcatggtgatggcttataagagaaagcagctggttatcaaggagaaaggttttttgcatgtctgacacccatgactccacctggaccttatggctccacccagaagcaattcagcccaacaggaggacagcttcaacccattacgatttcatctctgccccaaccactcagcagcaagcacctgttacctgtccacccccaccccttcccccaaactgcctttgaaaaatccctaacctatgagctttgaataagatgagtacgaacttcatcgcccacgtggcgtggccggcctcgtgtctattaaattctttttctacta

SEQ ID NO: 138 - DNA, 655 bp, Homo sapiens
  misc_feature (88)..(88): second gene starts at position 88
atgtcgcgatccaaccggcagaaggagtacaaatgcggggacctggtgttcgccaagatgaagggctacccacactggccggcccgggcttcaacggaccacaccaaaatgccatctcaaatggaacacgccatggaaaccatgatgtttacatttcacaaattcgctggggataaaggctacttaacaaaggaggacctgagagtactcatggaaaaggagttccctggatttttggaaaatcaaaaagaccctctggctgtggacaaaataatgaaggacctggaccagtgtagagatggcaaagtgggcttccagagcttcttttccctaattgcgggcctcaccattgcatgcaatgactattttgtagtacacatgaagcagaagggaaagaagtaggcagaaatgagcagttcgctcctccctgataagagttgtcccaaagggtcgcttaaggaatctgccccacagcttcccccatagaaggatttcatgagcagatcaggacacttagcaaatgtaaaaataaaatctaactctcatttgacaagcagagaaagaaaagttaaataccagataagcttttgatttttgtattgtttgcatccccttgccctcaataaataaagttcttttttagttccaaatttga

SEQ ID NO: 139 - DNA, 4311 bp, Homo sapiens
  misc_feature (1911)..(1911): second gene starts at position 1911
atgaaccgggccaagcccaccacggtgcgccggcccagcgccgcggccaaaccctcagggcaccctcccccaggagacttcattgctctgggctcaaagggtcaggccaatgaatcgaaaacggcgtccaccctgctgaagccagccccttccggcctgccttctgagcgcaagcgggatgcggcggccgcgttgtccagtgcctcggccctcaccggtctcaccaaacgccccaaactctcctccacaccccctctgagtgccctggggcgcctggctgaggctgcagtggcagaaaaacgagccatttctccgtcgattaaagagccatctgtggtgccaattgaagtgctgcccacggtgctgctggatgagatcgaggcggccgagctggagggcaacgatgacaggatcgagggcgtgctgtgcggggccgtgaagcagctgaaggtcacccgcgccaagcctgacagcaccctctacctgagcctcatgtacctggccaagatcaagcccaacatcttcgccactgagggcgtcattgaggctctgtgtagcctcctgcggcgggacgcctccatcaacttcaaggccaaggggaacagcctggtgtctgtgctggcctgtaacctcctcatggccgcctacgaggaggacgagaactggcccgagatctttgtcaaggtgtacatcgaggactccctgggggagcggatctgggtggacagccctcactgtaagacgtttgtggacaacatccagacggccttcaacaccagaatgccccccaggagcgtgctgctgcagggggaggcgggccgcgttgcgggcgacctgggtgcagggagcagcccacacccctccctcacggaggaggaggacagccagacggagttgctgatcgcggaggagaagctgagccccgagcaggagggccagctcatgcccaggtacgaagagctcgcggagagcgtggaggagtatgtcctggacatgctgcgggaccagctgaaccggcgccagcccatcgacaacgtctccaggaacctcctgcggctcctcacctccacctgcggctataaggaggtgcggctgctggcggtgcagaagctggagatgtggctgcagaaccccaagctgacccggccggcccaggacctgctgatgtccgtctgcatgaactgcaacacgcacggttccgaagacatggacgtcatctcacacctgatcaagatccgcctcaagcccaaggtcctcctcaaccacttcatgctgtgcatcagggagctgctgagcgcgcacaaggacaacctgggcaccaccatcaagttggtgatcttcaatgagctctccagcgcccggaacccgaacaacatgcaggtcctctataccgcactgcagcacagctcagagctggcgcccaagttcctggccatggtgttccaggacctgctgaccaacaaggacgactacctgcgggcctcgcgggccctgctgcgggagatcatcaagcagaccaagcacgagatcaacttccaggccttctgcctggggctcatgcaggagcgcaaggagccgcagtacctggagatggagttcaaggagcgcttcgtggtgcacatcaccgacgtcctggccgtgtccatgatgctgggcatcacagcgcaggtgaaggaggccggcatcgcctgggacaaaggagaaaagaggaacctggaagtgctccgctcattccagaaccagattgccgccatccagcgggatgccgtctggtggctccacactgtggtcccctccatcagcaagctcgcccctaaggactacgtgcactgcctgcacaaggtgctgttcacagagcagccggagacctactacaagtgggacaactggccacccgagagtgaccgcaagaaggaagcagccaccctcgccatggcctccccgcccgcctgcccctcggaggaggacgagagcctgaagggctgtgagctgtacgtgcagctgcacgggatccagcaggtcctcaaagactgtatcgtccacctctgcatctccaagcccgaacgccccatgaagttcctccgggagcacttcgagaagctggagaaggaagaaaacaggcagattttggcgcggcaaaagtcaaactcacagtcggactcccatgatgaggaggtgtcgcccacccccccgaaccctgtggtgaaggcccgccgccggcgaggaggcgtgagtgccgaggtgtacaccgaggaggacgccgtgtcctacgtcaggaaggtgattcccaaggactacaaaaccatgactgcgctggccaaggccatctccaagaacgtgctcttcgctcacctggatgacaacgagaggagtgacatattcgatgccatgttccctgtcactcacatcgctggggagactgttatacagcaagggaatgaaggagacaacttctatgtcgttgatcaaggggaagtggatgtgtacgtgaacggagagtgggtgaccaacatcagcgagggaggcagcttcggggagctggcgctcatctacggcacccccagggctgcgaccgtgaaagccaagacggacctcaagctctgggggatcgaccgggacagctaccggcgcatccttatgggcagcacgctgaggaaacgcaagatgtacgaggagttcctcagcaaggtctccatcctagagtccctggagaagtgggagcgtctgaccgtggcggatgcgctggagcccgtccagtttgaagatggagagaaaattgtggtccagggagagcctggggacgacttttacatcatcacggagggcaccgcgtccgtgctgcagcgccggtcccccaatgaggagtacgtggaggtggggcgcctgggaccctctgactacttcggggagattgcactgctgctgaaccggccccgggcggccactgtcgtggcccgggggcccctcaagtgtgtgaagctggaccggccccgcttcgagcgtgtgctggggccctgctctgagatcctcaagaggaacattcagcgttacaacagcttcatctccctcaccgtctgagcacagctcccgccctgcagccccagctccccagtgtggtggccgtgccctgctcgtctgtgtcgggggcccgggagccgctgtgtgaggtgtgggccgggtggggctgggtcccggcagcgtgaggactgccccttccccggactcactttttggaataaatgatcaccttgtgcatttccaaatcaaaggacaagcggacaaaatgcatcccaagatcaaggaagggacaggccagcttcctccccacacgcctccccggctgcctctgtgggcttctcctggggggcccaccccacccctgccagtctcctggagatgcttgaggatcggtcctccccagaaccaggccaggacgttgcccctggggcctggtgaccctgtgaggtcaggtcccccagattgaggtctgagtgtgggcaagtgtgtcaaaaggggctgccccccaggggagatgaggctgagagcagggagttgaggccgaagaagtcaaggcccctcccgcaaatgtgtacccctgcccgcgccactgcaccccgccgcacccccacctcccccgggggccctgctgcggatgccggagtgggagagtctctgagctgtgagattgatcttgcccctaattggagaggaagccgggcgccaagacacacggggctcctgccttgggagccagggccgcggccgcaggtagaccccagtagggggggccgggctcgaagttcctttgggaggggctggcgggactccagcaggccgtcctcacctttcttagaaagtccacccagggcaagttgatgttgggggaaagcagaagtcaagccagccgcgggccccacacgccccgacccgctcaaccgacttgtcccttaaatgtgtcttggatcccgcagtgatgacgtgagccagccaggcccgaaagggtgaggccagtgcagagaagcttcccaggggattcctgggttcccccgaaagacaagcgaggtcattgcagttcacctgatgttgctcctgtcccgtgcgtcccggggaggctgtccttggtccgaggctgctcgttgcagcccctcccctgctggcggttacgatgcgtggggtccccctccccacccagccccggccacgtcgccgtgtcccgcctgtgcctgtgacgtccctgtggacctgtgagccatccccccccttatctctgctctgaatactgcatgaagcattaaacgtgcaatgaagtac

SEQ ID NO: 140 - DNA, 4311 bp, Homo sapiens; identical to SEQ ID NO: 139
  misc_feature (1911)..(1911): second gene starts at position 1911

SEQ ID NO: 141 - DNA, 4311 bp, Homo sapiens; identical to SEQ ID NO: 139
  misc_feature (1911)..(1911): second gene starts at position 1911

SEQ ID NO: 142 - DNA, 4311 bp, Homo sapiens; identical to SEQ ID NO: 139
  misc_feature (1911)..(1911): second gene starts at position 1911

SEQ ID NO: 143 - DNA, 4311 bp, Homo sapiens; identical to SEQ ID NO: 139
  misc_feature (1911)..(1911): second gene starts at position 1911

SEQ ID NO: 144 - DNA, 4311 bp, Homo sapiens; identical to SEQ ID NO: 139
  misc_feature (1911)..(1911): second gene starts at position 1911

SEQ ID NO: 145 - DNA, 4709 bp, Homo sapiens
  misc_feature (1098)..(1098): second gene starts at position 1098
atggctgatggcaacgaggatctgcgggctgacgacttgcctgggccagccttcgagagctatgagtccatggagcttgcctgccccgctgagcgcagcggccacgtagccgtcagcgacgggcgccacatgttcgtctggggcggctacaagagtaatcaagtcagaggattatatgacttttatctgcctagagaagaactatggatctacaacatggagactggaagatggaaaaaaatcaacactgaaggtgatgttcctccttctatgtcaggaagctgtgctgtgtgtgtagacagggtgctgtacttgtttggaggacaccattcaagaggcaataccaataagttctacatgctggattcaaggtctacagacagagtgttacagtgggaaagaattgattgccaaggaattcctccatcatcaaaggacaaacttggtgtctgggtatataaaaacaagttaatattttttggagggtatggatatttgcctgaagataaagtattgggaacttttgaattcgatgaaacatctttttggaattcaagtcatccaagaggatggaatgatcatgtacatattttagatactgaaacatttacctggagccagcctataactactggtaaagcaccttcacctcgtgctgcccatgcctgtgcaactgtcggaaatagaggcttcgtgtttggaggcagatatcgagatgctagaatgaatgatcttcactatcttaatctggatacatgggagtggaatgaattaattccacaaggcatatgcccagttggtcgatcttggcactcactaacaccagtttcttcagatcatctttttctctttggaggatttaccactgataaacagccactaagtgatgcctggacttactgcatcagtaaaaatgaatggatacaatttaatcatccatataccgaaaaaccaaggttatggcacacagcttgtgccagcgatgaaggagaagtaattgtttttggtggatgtgccaacaacttgcttgtccatcacagagctgcacacagtaatgaaatactaatattttcagttcaaccaaaatctcttgtacggctggtccattcaggtccaggaaagggatcaccccaggctggtgtggatctgtcctttgcaacgcgaactggtaccaggcaagggattgaaacacatctcttcagagcagagaccagcagggacctctcccactggacaaggagcatagtacagggttgccacaattctgctgaactcattgctgaaatcagcactgcttgcacctacaaaaaccaggagtgccgtttgaccatacattatgagaatggattttctattaccactgaaccacaggagggtgcctttcccaagaccatcatacagtctccttatgaaaagctcaaaatgtcttcagatgatggaatcaggatgctgtatttagattttggaggcaaagatggagagattcaactggaccttcattcctgccccaagccaattgttttcatcattcattccttcctgtcagctaagattacaagactgggcttggtggcctgaagacaggggtgacttgcctttgagaaaagaagggctgcaatgccaccagagaacgtgatgtcagacaccatctgtagtgagcagcgcaccagatgtagcgtgctacagtcagctttagctctcaagagtcgtatgtaactgtcccagactcctctgtcagtttcagcaactacaagggataccctgcgaaagtaccatgagaaatatcagagtaaaactttctagaacagtacaaggttaaagaggtgaggtgacgggaaatacacagcatagctttgaaataatgacaaccaaggacatgaccattagaacagcatgtgcagatcttaatcatcccagttcctaggcaacttgttcaccaggtacgcaagggccgaatagttgagaaatggacattcttacctactcctcctagccccctatccccagtaacagtgatcccttttcttattgtgatttatttcctaattcttgctgagttgactttcccttgtaggaaaagaaaaatatttcaaatagaaacccaccttttatttaagtatgaagcagctgttactttttaaaaaatgaattatctttcaatggtgtagaatgattccaaagtgtctccattagcatatactgagcaggaattaaataaagcatcagatactgatctgagctgtaagctggtagaatctgagccaaagtagactgcttaaattgataagctttgctaaagagttgtatgcacaaaggatgattaattctgggactatactcacaccaaggtctgctgtcttatagccaagaattacagctttatttatagagagtgaattatgggtattttttcagaaaatattgtcatctgatatacacataaaacaactcacattgttggagttaactaattatccccatttcatggttttcagtggcaacttactgacccttgtttttgcctgtgcttgtatgcatgcattttcaagcaagtaataaagcagcctcatttaattctggataatgctgggttttacatatagactgaatgctataatcaaatctattgacagtatctgcagttctttcagaattccagggaaataatataacgacctgatatctttctacaggaatattttcagacattatatagcacattactgatttaatgcttttacttttatctttcaaaacaaattcactaaaaataacacctattgattttgaagtcacttttctcaaaccttgaaaatgagctctaggatctctataaacatttctaacacttttcctgtagtttacatagacagacatctgttgttagacctgtgtgtttttaaagaatcatatgttaacaaatacccatgcaaagagcttcaaaaagtgaaaccgtgttaaaggaacacaatttttctcactcagacatatttgtttattgaattgcaaagttttattttaaatcagcatttccccaaagaatatatcatatgacgctagttccaaggggcttgactgagtggtgttttgctggggggagacaggggtttgttaatacactttactaaatactgagctgaaaaatgttaaatagatttcacgattgcctccttgaagattttaaagttcattgtggttcttcaaggcgaaatccggtgaaccattcctcacacttacctacaggactcttttctaatggagcatcttgtgaagctagtgggtttttttgttgttgttatttgttttttttttttaatgctttagaaaacacagctttaggatattgactttttgtttatttctattttcaaatgctgaaaagtcaagtcccagtttgaataccatagaaaagctttgatgcatttgtaaattatattgcactctttcactatatattttcaaaatcactggaatgttgttatacaagagaattataattgtgtattgtaaataacatattaaaatacatatattaatgccaatagttaaattcaacaatatgtaatctaaggtgctcggttctacatgaagtatgagttaactgctcataattaagttgccaagattctattatatatttatagacaaattaaaatgatcataattacaaatatgatttctttatcacttaagctttgggctgattaatatctgtgtgggggtcaatggaaactacattctctacatttataaacatttaatttaattatttatattttaggaaaatatatttgaataaaattaatgcattttctagagtaaattaaaatgttattagcaagaaatagaaaatttgactaagataattgtgtatatgaatcatttttcccccaagttaaaatgtatcataatagagaggctctaatgaatcaatttccaatactcatttctttcttattttgaattcaagttacaatgactttacactgtagattttaatcttgtctgatgtgtgctggtgtgtatgacacaaactcataagtctggatcatgcttgggtacagtcaatgaatcaaccgagtcactttgaggaatttgtttttgtccaatttgctctgtgctcaatcccatgaattattaaatttacaatgtttgtccccaaatgaaaaccaatataaatgaatgatgttttaatctgtactttatgggaagttgcctatttgtcagtagatgtggttaagtgagtcctctggtgcagtgacatccttttaagccatctcatagggatttaaagaaggccaataggaatatagatattggtttttctttctctgacttgaactaagtaggagaaaccaaaccataaacctattacaaactacccaggcagaggcatttacttaattcatcaactagtgcaattaaaaccctgaaaacacatgatccttgttgactctgcttggttgaagcaggaaagaatggtcttgatggtcagaaagttttaaaattaatgggcagggcctttctggaccctgttttccaaacacgttagatattccgtcttgaggggattggagtaggctacagtgagggggtaatttttggatgtatctggacttttaaaaaatgtgcctatatttatagcaccatgaatattatgtaaaatttatatatgaattaaataaatattcacctctgatttccagtgc

SEQ ID NO: 146 - DNA, 2313 bp, Homo sapiens
  misc_feature (194)..(194): second gene starts at position 194
atgtggctgctggggccgctgtgcctgctgctgagcagcgccgcggagagccagctgctccccgggaacaacttcaccaatgagtgcaacataccaggcaacttcatgtgcagcaatggacggtgcatcccgggcgcctggcagtgtgacgggctgcctgactgcttcgacaagagtgatgagaaggagtgcccttgaagaagagagtaaaggagattgtacataaagcgttttgggattgcttgagtgtgcagctaagtgaagatcccccagcatatgaccatgctatcaaacttgtaggagaaatcaaagagactctcttatctttcttgctgcctggtcatactagactgagaaaccagataacagaagtcttggatctggatctgataaagcaggaagcagagaatggggcgctagacatttccaagctggcagaattcattattggcatgatggggacactgtgtgcacctgctcgagatgaggaagttaagaaactaaaggacattaaggaaatagtgccccttttcagagaaattttttctgtgttggacctaatgaaagtggacatggccaactttgctatcagtagcatcaggcctcatctcatgcagcagtcagttgaatacgaaaggaagaagtttcaagagattttggagaggcaaccaaattccctggactttgtcacccagtggctggaagaagcctcagaggaccttatgactcagaagtataaacacgccctgccagtggggggaatggctgctggctctggggacatgcccaggctgagccctgttgctgtccagaattacgcttacctgaagcttctgaagtgggaccacctccagaggccgttccccgaaacagttttaatggaccagtctcgcttccacgagctccagttgcagctggaacaactgaccatcctgggggctgtgttgctggtcaccttcagcatggcagcgccaggaatttccagccaggccgactttgctgagaaactcaagatgattgtgaagattttgctaacagatatgcacctgccctccttccatctgaaggacgtcctcactaccatcggggagaaggtgtgcctggaggtgagcagctgcctctccctgtgtgggtcctctcccttcaccacggacaaggagaccgtgctcaagggccagatccaggccgtggccagtcccgatgaccccattcgcaggatcatggaatctcgaatcctgaccttcttagaaacctaccttgcctcgggtcatcagaagccattgcccacagtccctgggggactcagtccagttcagagagagctggaggaagttgctattaaatttgctcgcctggtcaactataacaagatggtcttctgtccctactacgatgcaatcctgagtaagatcctcgtccgatcctaacgtgtatgcaccctacagcagcagtattactcactagccacagaatacctgttctgtactctaatgttgcattggaaaatggctatatagtacatgtctatttaacagcaccgattccaaagggaagaatattgtgtatcactgttgaaaagacttgttgagaaatccactgaattctattttgagagattgtatttatgagtgcaagtttacaaatcaaagaagcattttgttctcgagttttacaggtaacactcagctgttgtctccactcctcccccatcatgtccttccaaggaggctgggacctctctcttctgcaatctgggtagttctttcagatgcctcatgctgagctgacggccatccaagcgcaaaagagaccaagccatggcctcacctcctgccctccctcagacagccttgtccctcacccctcccttctggtatttttgttagaagggctatataacgtcttattgccattttctccccctatttattgcttcctccctgcctggcctagccagggctcccaagcccttttttctagaggagagttatttgtctctctctctttttttttttactttcttttttgtatttaaacattcttttaaccttcccccaaagatacagttattggactttaaaaagcttgttcttttatacaaaattactcctgcatctggttgagagcagttatgacttatgagatctagtgaaaggaaagtctttgactttcaagccttgaaagtcaaggaggaaatgtattgaaaaatagtttactgtaatgtgaacgaagagaaatgtctggaattcttactgaaaaattgaccctgagacaatacacagatgtgatgattgaattaaattctggaattag

SEQ ID NO: 147 - DNA, 2313 bp, Homo sapiens; identical to SEQ ID NO: 146
  misc_feature (194)..(194): second gene starts at position 194

SEQ ID NO: 148 - DNA, 5475 bp, Homo sapiens
  misc_feature (631)..(631): second gene starts at position 631
atggaatcatctccatttaatagacggcaatggacctcactatcattgagggtaacagccaaagaactttctcttgtcaacaagaacaagtcatcggctattgtggaaatattctccaagtaccagaaagcagctgaagaaacaaacatggagaagaagagaagtaacaccgaaaatctctcccagcactttagaaaggggaccctgactgtgttaaagaagaagtgggagaacccagggctgggagcagagtctcacacagactctctacggaacagcagcactgagattaggcacagagcagaccatcctcctgctgaagtgacaagccacgctgcttctggagccaaagctgaccaagaagaacaaatccaccccagatctagactcaggtcacctcctgaagccctcgttcagggtcgatatccccacatcaaggacggtgaggatcttaaagaccactcaacagaaagtaaaaaaatggaaaattgtctaggagaatccaggcatgaagtagaaaaatcagaaatcagtgaaaacacagatgcttcgggcaaaatagagaaatataatgttccgctgaacaggcttaagatgatgtttgagaaaggtgaaccaactcaaactaaggccaagtcctgtatctgccatgtctgtggcgtccacctcaacaggctgcattcctgcctctactgtgtcttcttcggctgtttcacaaagaagcatattcacgagcatgcgaaggcgaagcggcacaacctggccattgatctgatgtacggaggcatctactgttttctgtgccaggactacatctatgacaaagacatggaaataatcgccaaggaggagcagcgaaaagcttggaaaatgcaaggcgttggagagaagttttcaacttgggaaccaaccaaacgggagcttgaactgctgaagcacaacccgaaaaggagaaagatcacctcgaactgcaccataggtctgcgtgggctgatcaaccttgggaacacatgcttcatgaactgcatcgtgcaggccctgacccacacgccacttctgcgggacttcttcctgtctgacaggcaccgctgtgagatgcagagccccagctcctgtctggtctgtgagatgtcctcactgtttcaggagttttactctggacaccggtcccctcacatcccgtataagttgctgcacctggtgtggacccacgcgaggcacctagcaggctacgagcagcaggacgcccacgagttcctcatcgcggccctggacgtgctccaccgacactgcaaaggtgatgacaatgggaagaaggccaacaaccccaaccactgcaactgcatcatagaccagatcttcacaggcgggttgcagtcagacgtcacctgccaagtctgccatggagtctccaccaccatcgaccccttctgggacatcagcttggatctccccggctcttccaccccattctggcccctgagcccagggagcgagggcaacgtggtaaacggggaaagccacgtgtcgggaaccaccacgctcacggactgcctgcgacgattcaccagaccagagcacttgggcagcagcgccaagatcaagtgcagcggttgccatagctaccaggagtccacaaagcagctcactatgaagaaactgcccatcgtagcctgttttcatctcaaacgatttgaacactcagccaagctgcggcggaagatcaccacgtatgtgtccttccccctggagctggacatgacccctttcatggcctccagcaaagagagcaggatgaatggacagtaccagcagcccacggacagtctcaacaatgacaacaagtattccctgtttgctgttgttaaccatcaagggaccttggagagtggccactacaccagctttatccggcagcacaaagaccagtggttcaagtgtgacgatgccatcatcaccaaggccagcatcaaggacgtcctggacagcgaagggtacttgctgttctatcacaaacagttcctggaatacgagtagccttatctgcagctggtcagaaaaacaaaggcaatgcattggcaagcctcacaaagtgatcctccctggcccccccctcccccaagtctcccgccgcctccccggcctggtgacaccacctcccatgcagatgtggcccctctgcacctgggacccatcgggtcgggatggaccacacggacggggaggctcctggagctgctttgaagatggatgagatgaggggtgtgctctgggtgggaggagcagcgtacacccgtcaccagaacatctcttgtgtcatgacatgggggtgcaacgggggcctcacagcacagagtgaccgctgcctggcgttccccagcactcggtgtggaaaggcccctacctgctgtaagattatgggtccatgaaagcagtaagctggacacagaggtgtagtgtgcgggacagagggccttgcagatgcctttctgttggtgttttagtgttaaaatacggagagtatggaactcttcacctccattttctcagcggctgtgaagcagcctcctagcttcggaagtacggacactacgtcgcgttttcaagcgtgtctgttctgcaggtaacagcatcaagctgcacgtggaagcatctcgcggttttctagaaacaggcattttcttatccctctcccgctcctttttccacaaaggtgaatttcataaatgtaatactagtaaagtgaatgaattactgagtttatacagaaatttaggtaacttctcctttagtctcaagagcgagtcttgctttttaatgggtgccgtttatgttgctgcccgccctgtgtgcctggctcctctgggtgccttggtgtctgctggtggctggcagtgggcgcagcggaggagagttgtgctgcagctcatacggtgtgtctgtcatctcagtctggagtaaatgcagtgtctgccggtgtctgatgggttctgtccctcgtattttctttgccttctatcccattgcctggctaccgctgcctggcagccaagggtgttggtcgcgaagctggagtggcctctggtggagcctgcatcttgtctcgtctgcctctgctttacatttggtgtactttcgggcgtggtggcagtaaaatgacaccgtgattgagcttgtcagcagagctgaaagagaaagtagaaggatgtgcattgtttcttgtaagatatcttgcatgtatctgtgtattcaaattcaaacagagatggtttgtccatttgtccactgagaaattagaaactagggacaagggggaggaaaagtactgaaatacagtttatgaagcaagtgtgtctcgggctgtgcttgtcccaggagccccagcagcatctgaactgaggcttcttcagtcctgcaggaacaggatcatctgtctcagcggtgggcagatgttttcatagacagccagggagtaaacactgttggctctgtgggctgtatggtctctgccataaatagtacagagatgtggctgtgtctagtacaacttttagacacagaaatctgaatgacatatattgttctgtgtcaagaaacttagattttttttttaactatttaaaaacgtgaaacctattcttagctcacaggccatggagaagctggtggggaccagacccagctccttagctggctgggctggggagggggtagtgacagtggcagctgctactcactgctcagtgtggaaaacacaggacttggcaatcacagcccgcagaaccatcatgtgtggcagaagcctgagggatgcggtttcttgcccacgtgctctgttcattttctgttgtttttctgcacttaaagaattcacatggaagcatgttttataaaatgaattaccagagaaacagagatgggccgagattttcagaaatggtcccatgtgaccaagttctgctgtttgggtgacagtgctttgaagatctcctttgaggatgtgcagtctttttttttttttttttgagatggagtttgttgcccaggctggagtgagtggcacagtctcggctcactgcaacctccacctcctgggttcaagcagttctcgtgccgcagcctcccaagtagctgggactacaggcatgcaccaccacgccaggctaatttttgtatttttagtagagatggggtttcaccatgtctcaaactcctgacctcaggcgatccacccacctcagcgtcccaaagtgctgggattataggcgtgagccaccgcacctggcctatgagtggtcttttaattaggaacaaatctaatggaaaggagagttgactgaagttggcccacaggattgtgagctgggcagtgccttcatgaaggcttgccaccttgggacgccccagtttactggggtgtcttgcggagtgcagaaggctttctggcagctgcctgggtttggccagaccctgcctcccctcccgccggccaacccctagtccccttcctgtctccacttgcattcaggggtggctgctgttctgagaacattagaactgggaagagagatggagtcacatggatttttggtgggcattattctaaactttcgtatccaagttagtcccccttattccactgtggcattgccgttctaagcagttacctgatgcctgctgctgaagagctgctcacaggaggcggcggcggccctggcactgccccttgcattaggtcttgtgtttgatgtgttcttgtgaatttactttgtcagaacaaaatatttacgcgttgggttcaggaatttcttttagctccccatctggctgtgaaattcaggaaacctcccgttgcctagtaatcaccccatgtaggtgtacattgtgacaaagtgcatctgaccactaaggggcccccttggtgaccccagcacattcacagcagtgttaaaatggcctgcattttggagatgctggctggcctttcagtgcctcccaggaagacacatggcctttccctcttcagatgcctgaagggagtgctttgaggcaggtgatgtgctgggagtgtgggcggcctccctctggccccggggccctctgtggaccttggctccctccgtggacctgggcttcgtggtgagcactgcagcctccctgggcattccctccagcgccagcaccactgcaacatatagacctgagtgctattgtattttggcttggtgtgtatgctcttcattgtgtaaaattgctgttcttttgacaatttaagtgattgttttgtttactgtaagtttgaaaataaaaatgaagaaaaaaattccaatgactgtgctgtggttggagactttatttaccaagatgtttactcttcctttccccttccattttgaggagctgtgtcactcctcctcccccccagtgctttgtagtctctcctatgtcataataaagctacattttctctgagaa

SEQ ID NO: 149 - DNA, 5475 bp, Homo sapiens; identical to SEQ ID NO: 148
  misc_feature (631)..(631): second gene starts at position 631

SEQ ID NO: 150 - DNA, 1004 bp, Homo sapiens
  misc_feature (27)..(27): second gene starts at position 27
atggtagctgggatgttagggctcagagctgaaatatgctaataccgtgatgcgctttgattacgtctggcttcgagaccactgccgctcagcatcgtgctacaactctaagactcaccagcgcagcctggatactgccagtgtggatttatgtatcaagccaaagaccattcgtctggatgagaccacactctttttcacttggccagatggtcatgtgactaaatatgatttgaattggctggtgaaaaacagctatgaagggcagaaacaaaaagtcatccagcctagaatactatggaatgctgaaatctaccagcaagcccaagttccatcggtagattgccagagcttcttagaaaccaacgagggactgaagaagtttctgcaaaactttctgctctatggaattgcattcgtagaaaatgtccctcccactcaagagcacacagagaagttggcagaaaggatcagcttaatcagagaaaccatttatgggaggatgtggtatttcacttcagacttctccagaggtgacactgcgtacaccaagctagctctggatcggcacactgacactacctattttcaagagccctgtggcattcaagtgtttcattgtcttaaacatgaaggaactggtggcaggacactgctagtagatggattctatgcagcagaacaggtacttcaaaaggcacctgaggaatttgaactcctcagtaaagtgccattgaagcatgaatatattgaagatgttggagaatgtcacaaccacatgattgggattgggccagtcttaaatatctacccatggaataaagagctgtatttgatcagattattcaaagaaaaacaaaacacggtcaacaggcagtggaactcctcactccaatgtgatattcctgagagaatattgacttatcgtcacttcgtctctgggacaagtattgaacataggggaagccttatataaaattgttcaataaacaaaagatgtcttt

SEQ ID NO: 151 - DNA, 3632 bp, Homo sapiens
  misc_feature (27)..(27): second gene starts at position 27
atggtagctgggatgttagggctcagagctgaaatatgctaataccgtgatgcgctttgattacgtctggcttcgagaccactgccgctcagcatcgtgctacaactctaagactcaccagcgcagcctggatactgccagtgtggatttatgtatcaagccaaagaccattcgtctggatgagaccacactctttttcacttggccagatggtcatgtgactaaatatgatttgaattggctggtgaaaaacagctatgaagggcagaaacaaaaagtcatccagcctagaatactatggaatgctgaaatctaccagcaagcccaagttccatcggtagattgccagagcttcttagaaaccaacgagggactgaagaagtttctgcaaaactttctgctctatggaattgcattcgtagaaaatgtccctcccactcaagagcacacagagaagttggcagaaaggatcagcttaatcagagaaaccatttatgggaggatgtggtatttcacttcagacttctccagaggtgacactgcgtacaccaagctagctctggatcggcacactgacactacctattttcaagagccctgtggcattcaagtgtttcattgtcttaaacatgaaggaactggtggcaggacactgctagtagatggattctatgcagcagaacaggtacttcaaaaggcacctgaggaatttgaactcctcagtaaagtgccattgaagcatgaatatattgaagatgttggagaatgtcacaaccacatgattgggattgggccagtcttaaatatctacccatggaataaagagctgtatttgatcaggtacaacaactatgaccgggctgtcatcaataccgttccttatgatgtcgtccatcgctggtatacagcacaccggactctaacgatagagttgaggagacctgagaatgagttttgggtcaaactaaagcctggcagggtcctatttatagacaactggcgtgtcctacatggcagggaatgcttcactggctaccgccaactgtgtggctgctatttaacaagagatgatgtattaaacactgctcgcctcttggggcttcaggcttaaaattgacagcatctggattatgaatacacctggcaccctggctaccagaatttcatatgggcagaataatattgtgtcaaactctacttcagattgtctccttatcccatcccacaaaacagaatctgtccgtttctctagtaagggagacttgttggagaggcgggactctgagttatctaatgtcagacatctagtggggcagctctcttcctcatgttataacatggatccacttgtttgatttaaaccttttaatataattttggtcagtctccttcagaaatataatctccatattgataggaaagcaataattgccatgaggtaacgatttttttcccaagtagatcagttagaaagaaatgcattctagaaataacaaaaatcctgataaagcaacaatttgcaaaatgtttggtcttaggacaccttaacactcttaaaagttattgaaggccccaaggagttcttgggtgtgggttctatctattgatactaattattttaggtattaagactgagaaatatttaaagctcaagaagaacacagaagcacacatccctcagctatgagagagatgacataaccatatgtcatgtagcctctggaaaagtcctctgtatcctcatgagataacgagagggggaaaaaaagctactactgcctttgtaacttccacttagcctactacagggctatgcacatcttagtttccaaaagtctgcttaatttcaaaagaaaaatgcctaattgaatgtaactcatcttggtgttattatacaaaataatttttaatctgcagacccacgaaaagggtctcagggactcctccaggggtcttcagaccatactttgagaacccatgggctagcgactaccttgagacagtcctttacctaggcctgtggattaaagggtttagctgaaaccctagattcttctctgtagtctaatagaactccaaacattgtaagaattgcttggtagcataagctcagggataaggtgggaattgagttcaaatatagtgttttatcttccacacaaatcatctctataggagttaaattaggaagtcacaacagcgcctgttgaacaaactcatcagtgtggtaatcctatgagggataattgcagaaaggttttagagacttgtgaggttccatatgataattctttacacctccccccccaagagaaagtacacagggctattctgtaatattgttcagggaaatcagcatgatagatgctgtgcctccagagagttctctggagattactacccaaatgtgtattttggcaatttggtggtatttaggatgtaatatgttttcctccatttctgctaattttctctctctctctctcataacatactatacatgctaattgccaagatttgaatgagtcaaatttagtagcttgctgcttttattttttaaatggcttcttttacgtattggcgggggcgggtggggggcagggtatgaggcttcttttccctcagctttcattgaaagtgaagctgtacaataaccacattgaccactgtagaatgatgaaagagaatataggctaggatgcacacaagaggggggaaaaggcattattagtgaagataggagttacaaagcaaagcaaagtcagtattcagatagagaatagagcctaatctgatgtttgcagggagttcctagatcacatttggcaatttacacattattttattgacctatccagtgctccaaaatgtgttccaaaatattttggcattttatttgtactacataggaatctttaggggagtccctgaaatttgttttcctcttaggtcaaaggactgataattaactttggttcttaaggagtatgccctttagcaataagaacagcaataacattttaccctgcagttttttctctatacctactattatgcactcctaaaatatgtcatcattagtcttcatgaggatgtttaccatttctgaagttttgcgtaaattagccttgaagattacactataactgaggtcatcagcattgacttatggccagcaaaggacatgctcatggccctggagagatgaggacacaaaacaaatcaatttccccacttactgaaggactccccttaccttctgtctctcctgagaccttgactcattaattattttactctcctttttggaaatttgcaaccggtccttctcaacaatgtgctccctttagtacactgaagaaaaagagaaggggattatttgagtcctgatcacgatgcattgaaaacttcctatgtgagatgtttctgtttttatatctcttccaggtgtccctgagtatataagcatgggtctatgtctaccaagctcactgtagagtcacttttaccttttgctatggtggaatgggatctgtagggtcaggaacacagcacctaacacagtgccttatggatagtagttttataatacagatgtgttggaagaataaatgaatgggtccttttcaaac

SEQ ID NO: 152 - DNA, 4375 bp, Homo sapiens
  misc_feature (26)..(26): second gene starts at position 26
atgaaagctcagggggaaaccgagggtttaccttatgggtgggaggaagcttacacagcagatggaatcaagtacttcatcaatcatgtaacacagactacatcctggatccatcccgtgatgagtgtcctgaatctatctcgctcagaggagaatgaagaggattgctctagagaactccccaaccagaaaagttgatggttttccttaggaagtggagctacatggatgatgtgagcagagacgcataacatccaattctgagatgaaacagtctaaaataggagtaaagcatgcactacttgttgaagtgtgaaatggagactctggactttgggtatttttgtaaaacttttgatatttctgtatacatttaaaaaatcaattgccactacagtagttccttaagaataatctagttatattttttgaaatcacatataattagactttataatatatatactttttcatatataattagatctttctttgtaatttcatatgtagttcttcatagggtctcagatacaatggtttttataattgacatattgaaaaagtatatgaacataatgaaacacctcatttatttgataattcactaatgttttatattcatatattaggaaagtgaacttagcaagctttttggaatttaaggatcacatttagacatctcatgggctgatgaatacagctggtatctttgtggagctttctaatttacaaaatgctttgtagaccccattgtctttaaaccatacaacatgcccgtgaagctgatctggtgggtatgtttattcttggttttcagtagggaaatagcagttcagagagaggaagctctctgtcccagcaccgagactcactcctaagtcttctgattccatgagcagtcccccttcccccataccctgctgtctccacggagggaggtcacagcccatcacgcaggacactgtgattgtgttgatgcagctggctccacagctgtgcattccacagagattcagaaggcacctcttcggtcaaacatggcccctctataaccccactattcttctcctataaacccttcccccttctctgcacccaagccttcgccaagtaggcgcactctttgtgatattgtttcagcagacttctttcagcagctcgtgtttttctaaagtgaaaggcatggtttgtcctgcttaggttgcccttcccagagggatggtttgaggggagctgatgagaagagaggtatctgttaaaacattactgctctactcgaaacaagatggaagcctaaagcccaagtcgagcagctcccagcactgctgtgcagacctagaggtccttagaacatagtctaagaaccattcattgtagccattttatagttgagtaaactgagatcttaagtctcctagtctactgaatttcatatggtgtataatacagatttatatggtaaagatatacatatacattgtgctcaactatacattcctgaatccatttaggatttgtgatttatgtcttgagtaataatataaagtcaactccagactgataggtagtcattagccatgagaaatgtttcaggatggctagggaagacttgtgttttgcctgacagccatttgaatgttaggaagcttcggggagacaagttttgagagaagccccagagggagctatttccttgcaccccccagaggtgaatgaggtattctataagttagtgtctataattgtgaaagtacaaacttcttgtttttgtcaaattaatggtatgaaatttctctccccctgcttgaagagttttctaattcgtttctagtgagcaaaacaaagaaggtgcttgagtcactgaaatcaaagtactcaggcacacagcccactgacaagagacacctcatccattaactgctgttttgtaccacttgccgccctgtttctgtcaaatacctagtgaaaaaggcctaaacaattgtaatgatattatttattgggcattttgtgccatacatggtgatgagcagtttgcatatatttatttatgatcttcttaaaaccattccatgaaataggaactgtaattatccccaattctaaaagaaaaaacttagttttagagagttagtaatctttgcctaagggtcacaaagcacctatgtgtagaagctagggttcaaggcagatctgtgattccagaagctgttctctaaaccactatggagaactgcttagattcattgtctatgggtacattttataaaaaggcagattctagttcagtgtcataaggaactttctagtaattagagctgataagaaaagaattccccaggagaaaatggaaacactatcccagcaatctgaattccttacttggggaatgttgctgaggaggttcagtgtgtgaatggactgaaccagttggccactctctcagattccctcttcataaagcttccgtgacttctaaaccatcaggtcggtgccataagagatgctcaaaaaagcatggtcagggcttagcaagaatccttttccagtgcaaatacgaccctcatattatgttttggcgagtagccagtctttctttaacatcaatcaaccgtagcaatgtggtcatcacgaagtcttcattgactcactggcttggattttagggttagaaaatctgaatgttcttatgtccttccgtctcactttactagagtgcccaagttgactcatccttactcactcattccctcaaaatatttattgagcaccaacaatgtcacaagcactgtgctaaacactgtggtgaagtagaacaattgctaatcatttcctgggttccacttactcttgatttaaaaaaaaaaaaacaacaaaagagtttgtgtgtggccaggactaaacagctgcttcttaatttttgaattttaaaactaatctattttatttaaaaaaaatcaagtactttggaagtgaataaagtaagagatagcctgtctcactttccagaggtagcagtcactaatactgtggtgagtgattttactcaaaggaaatcacactattaagcagcttggttttgacatgttatgttgtggtcatcttttcatgtcaatacatagattaatcttttatttcaaatgtctacataaaatatcactacccacataacctataatttgtgtggccagcaatttattgaacactaaaatgttttaagttttcttattgctaacaatgtcacagtgaacatttatatattcattaaatccttttcctcatgtatctttgcactcttgtgctagtatgtctatagtgtgaatacattcataaatttcttgatcaaagctaggtcaaagttacattcattttaattttggtacatatccataaattctccataaaagtaggaccaacttacattaccaccaatagtgtatgtgagccttatttttatgtatgataggactttttttagtccaaatgttcctatagattttctgggttttttttttttttttgtccttggaagaataaccttccttccaccaagtccaagaacctgagatttttaatcattaggttttagatttcctttagcagcagagactgacttgctgtatagagggaagtcaagtagtgactaactcactatatgtcaaacacatcattactcttctcttttcctactttacatgtaatggttgcgaggaccaactttcaaatgagctaacttgggtgagacgttcactaaagtaccaagcacaatacaaatgcatcttcgagttctttgggcctcactttccctatctgaataataaggatagtaatcccttgccttttctcaaaccagttcaactcagcaaacacttcctgagcacctgctacatgccaggcaaaatgtgaaatttgcatgctatgaggctaaatggtactgattctcaaaacaaggagctcatagtctaaaaccatttttctttcttttttttccccctaaacaacctcttaaaggggtaagaagttagggggttgtttattaagaacccctgaagagcaaccctttaccactctcttaaatttgaaaaattccaaaataatattaacacctcttgactagaaaaggaaaaaaaaggaacatgccgtatgaagagcctctccaataataaatgcaaagcagctgtcaaaatatagagtcaagtgatactttcataaagtgtttgcacaattagaaaatgttatcctttttctcgggagaaatgggacatttttattttctctgctaagtgaaatgcaactttttgaagaatcaacacgcttgacatttttacaatgtacataaagaactgaactattattaaaacaacttacacactcc

SEQ ID NO: 153 - DNA, 3728 bp, Homo sapiens
  misc_feature (1359)..(1359): second gene starts at position 1359
atgagcatagtgatcccattgggggttgatacagcagagacgtcatacttggaaatggctgcaggttcagaaccagaatccgtagaagctagccctgtggtagttgagaaatccaacagttatccccaccagttatataccagcagctcacatcattcacacagttacattggtttgccctatgcggaccataattatggtgctcgtcctcctccgacacctccggcttcccctcctccatcagtccttattagcaaaaatgaagtaggcatatttaccactcctaattttgatgaaacttccagtgctactacaatcagcacatctgaggatggaagttatggtactgatgtaaccaggtgcatatgtggttttacacatgatgatggatacatgatctgttgtgacaaatgcagcgtttggcaacatattgactgcatggggattgataggcagcatattcctgatacatatctatgtgaacgttgtcagcctaggaatttggataaagagagggcagtgctactacaacgccggaaaagggaaaatatgtcagatggtgataccagtgcaactgagagtggtgatgaggttcctgtggaattatatactgcatttcagcatactccaacatcaattactttaactgcttcaagagtttccaaagttaatgataaaagaaggaaaaaaagcggggagaaagaacaacacatttcaaaatgtaaaaaggcatttcgtgaaggatctaggaagtcatcaagagttaagggttcagctccagagattgatccttcatctgatggttcaaattttggatgggagacaaagatcaaagcatggatggatcgatatgaagaagcaaataacaaccagtacagtgagggtgttcagagggaggcacaaagaatagctctgagattaggcaatggaaatgacaaaaaagagatgaataaatccgatttgaataccaacaatttgctcttcaaacctcctgtagagagccatatacaaaagaataagaaaattcttaaatctgcaaaagatttgcctcctgatgcacttatcattgaatacagagggaagtttatgctgagagaacagtttgaagcaaatgggtatttctttaaaagaccatacccttttgtgttattctactctaaatttcatgggctagaaatgtgtgttgatgcaaggacttttgggaatgaggctcgattcatcaggcggtcttgtacacccaatgcagaggtgaggcatgaaattcaagatggaaccatacatctttatatttattctatacacagtattccaaagggaactgaaattactattgcctttgattttgactatggaaattgttctgctaagccaatattctctagaatgagcacaaaacaaatcgaataacagctaaacaaatcgaataacagctaaacgaatcgaataacagcttttgtacatcaacatcaagaaggaatacgcctgagagagatcagagtatatagatgaatatgaacaagaatggaacattcacttgtcaacgcactttctaaatctagatcagcagagatgggagtgattttctggaaagagatgtgatcatggattaaacaccagctcattggaaactcattggatgagatcagaaaacgttcatgaaaaatcatattcaggaaataaggaagaggaatataaatgctctagagttaacatgtaaaatatatacgtactgaggtttgtaaactgtcctttttaaatcaaactgaaaacaaaaagctttaacctttcaacagaatttttaaaaaggcagttagttctaaattattcctatctcaatagccaagaggctgatcaagcgtcatttattgaggaagcatcttagaaaatgcctctgaatgttttcataggagccgtgacctttggttcttcatctctaccattcatttacttcactgtgtaattagttacaaccactcagttattaagagacgtaacgcttcaaactttttaccaagtctgtgttctgtttaatctgtccatacaagttattactgagaaagtgtttatgccatatactattactccatcaagctgtatattacaggaagtacatctttacatcataggttcccaagcaacatagatttccctatctttcaggaaacagcatcaaggaactctgaaaaatatagaaaaagttcattttcaccttggaagctcacgtgtaatattataggctactatcaaataaacactttttttctaattctccctagtatatgcataggaatttaatatactttataaataagtatctaaaatgtctcctacttttttcctatttctttgccatacatgttatcagaaatccatgtcttctatttcccttactgatgggcactcatttttatttttttaaaaatcattccattaaacatatttctaaataatagtaagtggtactaacaaaataaataataatttaatagccttagaaataaatgactgtatacttatacaggttgaaaaaaactcggtaggaataagttacctttttgtttactaatgttggtttcaaaaatactcagattcattttagttggctgacatctggaagtagttaacaactaaccagtggacttcaacaatcatttgctcccaggcttcccccatcatcaccctcaccacatatcctgctaatatccaacaacaaacaaatatttaatattgaaatagcccattgcctgagaatgaacacaagctaaaatacatgcaagggtacttaatggaagccaaaccatgttctatacctaaggagaaaacatggacatgtagaatgcttttattcatgtattcaaaatcagaacaaatcagtgtatatcactagaacatcagatggaggataacacaagaagtgatacagatcagggttcacttctcttaccctctctctgttaggaccacattcctattttagccaaatgtttctggtacgggccatcttttcaccataaatggcattatgtttcaaatggctaaaagcatattatgggtatgctcaaaggagtaaaacccaattcacagagatgtggcttttctaaagaaccaaattaagggaatacttagtatctacaactaaagtattagtcattctgaggattatttgttgctttaagtattagctccctactacatccataacaccctacttactaaatttaattacacacaacttttcaagaattcgtattttatttgaagggaggtacctgtctactttatctacaataaaaacaaagggtattggctttctctaatccatgcaaactacaaattccatcgggagtcctacatcactaacagtggtatgaacaaaactaagaaagtacttcctatccacatgtgaatgttttaaaaaagtttttgccataaaacctaagtgtaatttagcataccacagtgctctgaagatgggtcattgacgatgtaccatttgtatataggtaatacacatgtaaatcactaattgttaattaaatataagaagtaggtttttatctttttaaaaaaaaaacaaaaaaggtgactccctttctcattctgttctgttgtattgcgtccaaaagttgtgtgtaatttttttaaggtccaagaaatgtaaagaaatttgttggaatacctgaatttctgtaaaaaaataaaaataaaaataagattttgttacttaa

SEQ ID NO: 154 - DNA, 3728 bp, Homo sapiens; identical to SEQ ID NO: 153
  misc_feature (1359)..(1359): second gene starts at position 1359

SEQ ID NO: 155 - DNA, 2006 bp, Homo sapiens
  misc_feature (213)..(213): second gene starts at position 213
gagggcggggcgggaaggcggcgaggagccgagctgggtgcggtgaggcgcgcagatcaccgcggttcctgggcagggcacggaaggctaagcaaggctgacctgctgcagctcccgcctcgtgcgctcgccccacccggccgccgcccgagcgctcgagaaagtcctctcgggagaagcagcgcctgttcccggggcagatccaggttcagattttggaagatggcaaagttcatgacacccgtgatccaggacaacccctcaggctggggtccctgtgcggttcccgagcagtttcgggatatgccctaccagccgttcagcaaaggagatcggctaggaaaggttgcagactggacaggagccacataccaagataagaggtacacaaataagtactcctctcagtttggtggtggaagtcaatatgcttatttccatgaggaggatgaaagtagcttccagctggtggatacagcgcgcacacagaagacggcctaccagcggaatcgaatgagatttgcccagaggaacctccgcagagacaaagatcgtcggaacatgttgcagttcaacctgcagatcctgcctaagagtgccaaacagaaagagagagaacgcattcgactgcagaaaaagttccagaaacaatttggggttaggcagaaatgggatcagaaatcacagaaaccccgagactcttcagttgaagttcgtagtgattgggaagtgaaagaggaaatggattttcctcagttgatgaagatgcgctacttggaagtatcagagccacaggacattgagtgttgtggggccctagaatactacgacaaagcctttgaccgcatcaccacgaggagtgagaagccactgcggagcatcaagcgcatcttccacactgtcaccaccacagacgaccctgtcatccgcaagctggcaaaaactcaggggaatgtgtttgccactgatgccatcctggccacgctgatgagctgtacccgctcagtgtattcctgggatattgtcgtccagagagttgggtccaaactcttctttgacaagagagacaactctgactttgacctcctgacagtgagtgagactgccaatgagccccctcaagatgaaggtaattccttcaattcaccccgcaacctggccatggaggcaacctacatcaaccacaatttctcccagcagtgcttgagaatggggaaggaaagatacaacttccccaacccaaacccgtttgtggaggacgacatggataagaatgaaatcgcctctgttgcgtaccgttaccgcaggtggaagcttggagatgatattgaccttattgtccgttgtgagcacgatggcgtcatgactggagccaacggggaagtgtccttcatcaacatcaagacactcaatgagtgggattccaggcactgtaatggcgttgactggcgtcagaagctggactctcagcgaggggctgtcattgccacggagctgaagaacaacagctacaagttggcccggtggacctgctgtgctttgctggctggatctgagtacctcaagcttggttatgtgtctcggtaccacgtgaaagactcctcacgccacgtcatcctaggcacccagcagttcaagcctaatgagtttgccagccagatcaacctgagcgtggagaatgcctggggcattttacgctgcgtcattgacatctgcatgaagctggaggagggcaaatacctcatcctcaaggaccccaacaagcaggtcatccgtgtctacagcctccctgatggcaccttcagctctgatgaagatgaggaggaagaggaggaggaagaagaggaagaagaagaggaagaaacttaaaccagtgatgtggagctggagtttgtccttccaccgagactacgagggcctttgatgcttagtggaatgtgtgtctaacttgctctctgacatttagcagatgaaataaaatatatatctgtttagtctttccctca

SEQ ID NO: 156 - DNA, 5410 bp, Homo sapiens
  misc_feature (560)..(560): second gene starts at position 560
atgtattctccgctctgtctcacccaggatgaatttcatcctttcatcgaagcacttctgccccacgtccgagcctttgcctacacatggttcaacctgcaggcccgaaaacgaaaatacttcaaaaaacatgaaaagcgtatgtcaaaagaagaagagagagccgtgaaggatgaattgctaagtgaaaaaccagaggtcaagcagaagtgggcatctcgacttctggcaaagttgcggaaagatatccgacccgaatatcgagaggattttgttcttacagttacagggaaaaaacctccatgttgtgttctttccaacccagaccagaaaggcaagatgcgaagaattgactgcctccgccaggcagataaagtctggaggttggaccttgttatggtgattttgtttaaaggtattccgctggaaagtactgatggcgagcgccttgtaaagtccccacaatgctctaatccagggctctgtgtccaaccccatcacataggggtttctgttaaggaactcgatttatatttggcatactttgtgcatgcagcagagccttccatcatgaacacctggaaagacgagaactatttatatgacaccaactatggtagcacagtagatttgttggacagcaaaactttctgccgggctcagatctccatgacaaccaccagtcaccttcctgttgcagagtcacctgatatgaaaaaggagcaagacccccctgccaagtgccacaccaaaaagcacaacccgagagggactcacttatgggaattcatccgcgacatcctcttgaacccagacaagaacccaggattaataaaatgggaagaccgatctgagggcgtcttcaggttcttgaaatcagaggcagtggctcagctatggggtaaaaagaagaacaacagcagcatgacctatgaaaagctcagccgagctatgagatattactacaaaagagaaattctggagcgtgtggatggacgaagactggtatataaatttgggaagaatgcccgaggatggagagaaaatgaaaactgaagctgccaatactttggacacaaaccaaaacacacaccaaataatcagaaacaaagaactcctggacgtaaatatttcaaagactacttttctctgatatttatgtaccatgaggggaacaagaaactacttctaacgggaagaagaaacactacggtcgattaaaaaaattattttgttacttcgaagtatgtcctatatggggaaaaaacgtacacagttttctgtgaaatatgatgctgtatgtggttgtgattttttttcacctctattgtgaattctttttcactgcaagagtaacaggatttgtagccttgtgcttcttgctaagagaaagaaaaacaaaatcagagggcattaaatgttttgtatgtgacatgatttagaaaaaggtgatgcatcctcctcacataagcatccatatggcttcgtcaagggaggtgaacattgttgctgagttaaattccagggtctcagatggttaggacaaagtggatggatgccgggaagtttaacctgagccttaggatccaatgagtggagaatggggacttccaaaacccaaggttggctataatctctgcataaccacatgacttggaatgcttaaatcagcaagaagaataatggtggggtctttatactcattcaggaatggtttatctgatgccagggctgtcttcctttctcccctttggatggttggtgaaatactttaattgccctgtctgctcacttctagctatttaagagagaacccagcttggttcttttttgctccaagtgcttaaaaataagttggaaaaaggagacggtggtgtggaaatggctgaagagtttgctcttgtatccctatagtccaaggtttctcaatctgcacaattgacatttttggccggagtgttctttgtggtgagggctttcctgtgcattgtaagatgttcagcagtatccactcatggtctctaaccacttgacaccagaaaccccccagctgtgataacgcaaaatgtctctagacatcaccaaatgttccctgggggtggcaaatttgcccttgattgagaaccaccagtttagctagtcaatatgaggatggtggtttattctcagaagaaaaagatatgtaaggtcttttagctccttagagtgaagcaaaagcaagacttcaacctcaacctatctttatgttttaaatgttagggacaataagttgaaatagctagaggagcttcttttcagaaccccagatgagagccaatgtcagataaagtaagcatagtaatgtagcaggaactacaatagaagacattttcactggaattacaaagcagaattaaaattatattgtagaaggaaacaccaagaaaagaatttccagggaaaatcctctttgcaggtattaattcttataattttttgtcttttggattatctgtttactgtctcatctgaactgatcccaggtgaacggtttattgcctagatttgtactcagaggaattttttttgttttgttttgtcttttaagaaaggaaagaaaggatgaaaaaaataaacagaaaactcagctcaggcacaattgtcaccaaggagttaaaagcttcttcttcaatagaggaattgttctgggggtcctggagacttaccattgagccatgcaatctgggaagcacaggaataagtagacactttgaaaatggatttgaatgttctcatcccttttgcagcttttctttttggctctctcatgtccttggcttgctcctctattctacctctctttctccagcaataatatgcaaatgaagacatgtatccataagaaggagtgctcttcatcaactaatagagcacctaccacagtgtcatacctggtagaggtgagcaattcatattcaaaggttgcaaagtgtttgtaatatattcatgaggctggaagtaagaagaattaaaaatttgtcctaattacaatgagaaccattctaggtagtgatcttggagcacacatgaataactttctgaaggtgcaaccaaatccatttttatttctgcctggcttggtcacttctgtaaaggtttaacttagtgttgtcaagtaacagttactgaaagagctgagaaaaagaacaatgaacagcaacgatcttgactgtgcaactcagacattcctgcagaaaagacatatgttgctttacaagaaggccaaagaactatggggccttcccagcatttgactgttcattgcatagaatgaattaaatatccagttacttgaatgggtataacgcatgaatatttgtgtgtctgtgtgtgtgtctgagttgtgtgattttattaggggcatctgccaattctctcactgtggttccttctctgactttgcctgttcatcatctaaggaggctagatccttcgctgacttcaccattcctcaaacctgtaagtttctcacttcttccaaattggctttggctctttctgcaacctttccattcaagagcaatctttgctaaggagtaagtgaatgtgaagagtaccaactacaacaattctacagataattagtggattgtgttgtttgttgagagtgaaggtttcttggcatctggtgcctgattaaggcttgagtattaagttctcagcatatctctctattgtcttgacttgagtttgctgcattttctatgtgctgttcgtgacttggagaacttaaagtaatcgagctatgccaacttggggtggtaacagagtacttcccaccacagtgttgaaagggagagcaaagtcttatggataaaccctcctttcttttggggacacatggctctcacttgagaagctcacctgtgctgaatgtccacatggtcactaaacatgttatccttaaaccccccgtatgcctgagttgaaagggctctctcttattaggttttcatgggaacatgaggcagcaaatctattgctaagactttaccaggctcaaatcatctgaggctgatagatatttgacttggtaagacttaagtaaggctctggctcccaggggcataagcaacagtttcttgaatgtgccatctgagaagggagacccaggttgtgagttttcctttgaacacattggtcttttctcaaagttcctgccttgctagactgttagctctttgaggacagggactatgtcttatcaatcactattattttcctgttacctagcatgggacaagtacacaacacatatttgttcaatgaatgaatgaatgtcttctaaaagactcctctgattgggagaccatatctataattgggatgtgaatcatttcttcagtggaataagagcacaacggcacaaccttcaaggacatattatctactatgaacattttactgtgagactctttattttgccttctacttgcgctgaaatgaaaccaaaacaggccgttgggttccacaagtcaatatatgttggatgaggattctgttgccttattgggaactgtgagacttatctggtatgagaagccagtaataaacctttgacctgttttaaccaatgaagattatgaatatgttaatatgatgtaaattgctatttaagtgtaaagcagttctaagttttagtatttgggggattggtttttattatttttttcctttttgaaaaatactgagggatcttttgataaagttagtaatgcatgttagattttagttttgcaagcatgttgtttttcaaatatatcaagtatagaaaaaggtaaaacagttaagaaggaaggcaattatattattcttctgtagttaagcaaacacttgttgagtgcctgctatgtgcacggcatgggcccatatgtgtgaggagcttgtctaattatgtaggaagcaatagatctcggtagttacgtattgggcagatacttactgtatgaatgaaagaacatcacagtaatcacaatatcagagctgaattatcctcagtgtagcttcttggaattcagtttctggaactagagatagagcatttattaaaaaaaactcctgttgagactgtgtcttatgaacctctgaaacgtacaagccttcacaagtttaactaaattgggattaatctttctgtagttatctgcataattcttgtttttctttccatctggctcctgggttgacaatttgtggaaacaactctattgctactatttaaaaaaaatcagaaatctttccctttaagctatgttaaattcaaactattcctgctattcctgttttgtcaaagaattatatttttcaaaatatgtttatttgtttgatgggtcccaggaaacactaataaaaaccacagagaccagcctgg

SEQ ID NO: 157 - DNA, 5386 bp, Homo sapiens
  misc_feature (536)..(536): second gene starts at position 536
atggatgaatttcatcctttcatcgaagcacttctgccccacgtccgagcctttgcctacacatggttcaacctgcaggcccgaaaacgaaaatacttcaaaaaacatgaaaagcgtatgtcaaaagaagaagagagagccgtgaaggatgaattgctaagtgaaaaaccagaggtcaagcagaagtgggcatctcgacttctggcaaagttgcggaaagatatccgacccgaatatcgagaggattttgttcttacagttacagggaaaaaacctccatgttgtgttctttccaacccagaccagaaaggcaagatgcgaagaattgactgcctccgccaggcagataaagtctggaggttggaccttgttatggtgattttgtttaaaggtattccgctggaaagtactgatggcgagcgccttgtaaagtccccacaatgctctaatccagggctctgtgtccaaccccatcacataggggtttctgttaaggaactcgatttatatttggcatactttgtgcatgcagcagagccttccatcatgaacacctggaaagacgagaactatttatatgacaccaactatggtagcacagtagatttgttggacagcaaaactttctgccgggctcagatctccatgacaaccaccagtcaccttcctgttgcagagtcacctgatatgaaaaaggagcaagacccccctgccaagtgccacaccaaaaagcacaacccgagagggactcacttatgggaattcatccgcgacatcctcttgaacccagacaagaacccaggattaataaaatgggaagaccgatctgagggcgtcttcaggttcttgaaatcagaggcagtggctcagctatggggtaaaaagaagaacaacagcagcatgacctatgaaaagctcagccgagctatgagatattactacaaaagagaaattctggagcgtgtggatggacgaagactggtatataaatttgggaagaatgcccgaggatggagagaaaatgaaaactgaagctgccaatactttggacacaaaccaaaacacacaccaaataatcagaaacaaagaactcctggacgtaaatatttcaaagactacttttctctgatatttatgtaccatgaggggaacaagaaactacttctaacgggaagaagaaacactacggtcgattaaaaaaattattttgttacttcgaagtatgtcctatatggggaaaaaacgtacacagttttctgtgaaatatgatgctgtatgtggttgtgattttttttcacctctattgtgaattctttttcactgcaagagtaacaggatttgtagccttgtgcttcttgctaagagaaagaaaaacaaaatcagagggcattaaatgttttgtatgtgacatgatttagaaaaaggtgatgcatcctcctcacataagcatccatatggcttcgtcaagggaggtgaacattgttgctgagttaaattccagggtctcagatggttaggacaaagtggatggatgccgggaagtttaacctgagccttaggatccaatgagtggagaatggggacttccaaaacccaaggttggctataatctctgcataaccacatgacttggaatgcttaaatcagcaagaagaataatggtggggtctttatactcattcaggaatggtttatctgatgccagggctgtcttcctttctcccctttggatggttggtgaaatactttaattgccctgtctgctcacttctagctatttaagagagaacccagcttggttcttttttgctccaagtgcttaaaaataagttggaaaaaggagacggtggtgtggaaatggctgaagagtttgctcttgtatccctatagtccaaggtttctcaatctgcacaattgacatttttggccggagtgttctttgtggtgagggctttcctgtgcattgtaagatgttcagcagtatccactcatggtctctaaccacttgacaccagaaaccccccagctgtgataacgcaaaatgtctctagacatcaccaaatgttccctgggggtggcaaatttgcccttgattgagaaccaccagtttagctagtcaatatgaggatggtggtttattctcagaagaaaaagatatgtaaggtcttttagctccttagagtgaagcaaaagcaagacttcaacctcaacctatctttatgttttaaatgttagggacaataagttgaaatagctagaggagcttcttttcagaaccccagatgagagccaatgtcagataaagtaagcatagtaatgtagcaggaactacaatagaagacattttcactggaattacaaagcagaattaaaattatattgtagaaggaaacaccaagaaaagaatttccagggaaaatcctctttgcaggtattaattcttataattttttgtcttttggattatctgtttactgtctcatctgaactgatcccaggtgaacggtttattgcctagatttgtactcagaggaattttttttgttttgttttgtcttttaagaaaggaaagaaaggatgaaaaaaataaacagaaaactcagctcaggcacaattgtcaccaaggagttaaaagcttcttcttcaatagaggaattgttctgggggtcctggagacttaccattgagccatgcaatctgggaagcacaggaataagtagacactttgaaaatggatttgaatgttctcatcccttttgcagcttttctttttggctctctcatgtccttggcttgctcctctattctacctctctttctccagcaataatatgcaaatgaagacatgtatccataagaaggagtgctcttcatcaactaatagagcacctaccacagtgtcatacctggtagaggtgagcaattcatattcaaaggttgcaaagtgtttgtaatatattcatgaggctggaagtaagaagaattaaaaatttgtcctaattacaatgagaaccattctaggtagtgatcttggagcacacatgaataactttctgaaggtgcaaccaaatccatttttatttctgcctggcttggtcacttctgtaaaggtttaacttagtgttgtcaagtaacagttactgaaagagctgagaaaaagaacaatgaacagcaacgatcttgactgtgcaactcagacattcctgcagaaaagacatatgttgctttacaagaaggccaaagaactatggggccttcccagcatttgactgttcattgcatagaatgaattaaatatccagttacttgaatgggtataacgcatgaatatttgtgtgtctgtgtgtgtgtctgagttgtgtgattttattaggggcatctgccaattctctcactgtggttccttctctgactttgcctgttcatcatctaaggaggctagatccttcgctgacttcaccattcctcaaacctgtaagtttctcacttcttccaaattggctttggctctttctgcaacctttccattcaagagcaatctttgctaaggagtaagtgaatgtgaagagtaccaactacaacaattctacagataattagtggattgtgttgtttgttgagagtgaaggtttcttggcatctggtgcctgattaaggcttgagtattaagttctcagcatatctctctattgtcttgacttgagtttgctgcattttctatgtgctgttcgtgacttggagaacttaaagtaatcgagctatgccaacttggggtggtaacagagtacttcccaccacagtgttgaaagggagagcaaagtcttatggataaaccctcctttcttttggggacacatggctctcacttgagaagctcacctgtgctgaatgtccacatggtcactaaacatgttatccttaaaccccccgtatgcctgagttgaaagggctctctcttattaggttttcatgggaacatgaggcagcaaatctattgctaagactttaccaggctcaaatcatctgaggctgatagatatttgacttggtaagacttaagtaaggctctggctcccaggggcataagcaacagtttcttgaatgtgccatctgagaagggagacccaggttgtgagttttcctttgaacacattggtcttttctcaaagttcctgccttgctagactgttagctctttgaggacagggactatgtcttatcaatcactattattttcctgttacctagcatgggacaagtacacaacacatatttgttcaatgaatgaatgaatgtcttctaaaagactcctctgattgggagaccatatctataattgggatgtgaatcatttcttcagtggaataagagcacaacggcacaaccttcaaggacatattatctactatgaacattttactgtgagactctttattttgccttctacttgcgctgaaatgaaaccaaaacaggccgttgggttccacaagtcaatatatgttggatgaggattctgttgccttattgggaactgtgagacttatctggtatgagaagccagtaataaacctttgacctgttttaaccaatgaagattatgaatatgttaatatgatgtaaattgctatttaagtgtaaagcagttctaagttttagtatttgggggattggtttttattatttttttcctttttgaaaaatactgagggatcttttgataaagttagtaatgcatgttagattttagttttgcaagcatgttgtttttcaaatatatcaagtatagaaaaaggtaaaacagttaagaaggaaggcaattatattattcttctgtagttaagcaaacacttgttgagtgcctgctatgtgcacggcatgggcccatatgtgtgaggagcttgtctaattatgtaggaagcaatagatctcggtagttacgtattgggcagatacttactgtatgaatgaaagaacatcacagtaatcacaatatcagagctgaattatcctcagtgtagcttcttggaattcagtttctggaactagagatagagcatttattaaaaaaaactcctgttgagactgtgtcttatgaacctctgaaacgtacaagccttcacaagtttaactaaattgggattaatctttctgtagttatctgcataattcttgtttttctttccatctggctcctgggttgacaatttgtggaaacaactctattgctactatttaaaaaaaatcagaaatctttccctttaagctatgttaaattcaaactattcctgctattcctgttttgtcaaagaattatatttttcaaaatatgtttatttgtttgatgggtcccaggaaacactaataaaaaccacagagaccagcctgg

SEQ ID NO: 158 - DNA, 5545 bp, Homo sapiens
  misc_feature (695)..(695): second gene starts at position 695
atgcaaatgtgccgcccggcctcctcctcggttctctacgtgcccacgcggtggcccggggggtgcggggcaacctggcaaagttgcccaagtcctccaccgagacgcacacgcataccccagcgcccggcagttatgtattctccgctctgtctcacccaggatgaatttcatcctttcatcgaagcacttctgccccacgtccgagcctttgcctacacatggttcaacctgcaggcccgaaaacgaaaatacttcaaaaaacatgaaaagcgtatgtcaaaagaagaagagagagccgtgaaggatgaattgctaagtgaaaaaccagaggtcaagcagaagtgggcatctcgacttctggcaaagttgcggaaagatatccgacccgaatatcgagaggattttgttcttacagttacagggaaaaaacctccatgttgtgttctttccaacccagaccagaaaggcaagatgcgaagaattgactgcctccgccaggcagataaagtctggaggttggaccttgttatggtgattttgtttaaaggtattccgctggaaagtactgatggcgagcgccttgtaaagtccccacaatgctctaatccagggctctgtgtccaaccccatcacataggggtttctgttaaggaactcgatttatatttggcatactttgtgcatgcagcagagccttccatcatgaacacctggaaagacgagaactatttatatgacaccaactatggtagcacagtagatttgttggacagcaaaactttctgccgggctcagatctccatgacaaccaccagtcaccttcctgttgcagagtcacctgatatgaaaaaggagcaagacccccctgccaagtgccacaccaaaaagcacaacccgagagggactcacttatgggaattcatccgcgacatcctcttgaacccagacaagaacccaggattaataaaatgggaagaccgatctgagggcgtcttcaggttcttgaaatcagaggcagtggctcagctatggggtaaaaagaagaacaacagcagcatgacctatgaaaagctcagccgagctatgagatattactacaaaagagaaattctggagcgtgtggatggacgaagactggtatataaatttgggaagaatgcccgaggatggagagaaaatgaaaactgaagctgccaatactttggacacaaaccaaaacacacaccaaataatcagaaacaaagaactcctggacgtaaatatttcaaagactacttttctctgatatttatgtaccatgaggggaacaagaaactacttctaacgggaagaagaaacactacggtcgattaaaaaaattattttgttacttcgaagtatgtcctatatggggaaaaaacgtacacagttttctgtgaaatatgatgctgtatgtggttgtgattttttttcacctctattgtgaattctttttcactgcaagagtaacaggatttgtagccttgtgcttcttgctaagagaaagaaaaacaaaatcagagggcattaaatgttttgtatgtgacatgatttagaaaaaggtgatgcatcctcctcacataagcatccatatggcttcgtcaagggaggtgaacattgttgctgagttaaattccagggtctcagatggttaggacaaagtggatggatgccgggaagtttaacctgagccttaggatccaatgagtggagaatggggacttccaaaacccaaggttggctataatctctgcataaccacatgacttggaatgcttaaatcagcaagaagaataatggtggggtctttatactcattcaggaatggtttatctgatgccagggctgtcttcctttctcccctttggatggttggtgaaatactttaattgccctgtctgctcacttctagctatttaagagagaacccagcttggttcttttttgctccaagtgcttaaaaataagttggaaaaaggagacggtggtgtggaaatggctgaagagtttgctcttgtatccctatagtccaaggtttctcaatctgcacaattgacatttttggccggagtgttctttgtggtgagggctttcctgtgcattgtaagatgttcagcagtatccactcatggtctctaaccacttgacaccagaaaccccccagctgtgataacgcaaaatgtctctagacatcaccaaatgttccctgggggtggcaaatttgcccttgattgagaaccaccagtttagctagtcaatatgaggatggtggtttattctcagaagaaaaagatatgtaaggtcttttagctccttagagtgaagcaaaagcaagacttcaacctcaacctatctttatgttttaaatgttagggacaataagttgaaatagctagaggagcttcttttcagaaccccagatgagagccaatgtcagataaagtaagcatagtaatgtagcaggaactacaatagaagacattttcactggaattacaaagcagaattaaaattatattgtagaaggaaacaccaagaaaagaatttccagggaaaatcctctttgcaggtattaattcttataattttttgtcttttggattatctgtttactgtctcatctgaactgatcccaggtgaacggtttattgcctagatttgtactcagaggaattttttttgttttgttttgtcttttaagaaaggaaagaaaggatgaaaaaaataaacagaaaactcagctcaggcacaattgtcaccaaggagttaaaagcttcttcttcaatagaggaattgttctgggggtcctggagacttaccattgagccatgcaatctgggaagcacaggaataagtagacactttgaaaatggatttgaatgttctcatcccttttgcagcttttctttttggctctctcatgtccttggcttgctcctctattctacctctctttctccagcaataatatgcaaatgaagacatgtatccataagaaggagtgctcttcatcaactaatagagcacctaccacagtgtcatacctggtagaggtgagcaattcatattcaaaggttgcaaagtgtttgtaatatattcatgaggctggaagtaagaagaattaaaaatttgtcctaattacaatgagaaccattctaggtagtgatcttggagcacacatgaataactttctgaaggtgcaaccaaatccatttttatttctgcctggcttggtcacttctgtaaaggtttaacttagtgttgtcaagtaacagttactgaaagagctgagaaaaagaacaatgaacagcaacgatcttgactgtgcaactcagacattcctgcagaaaagacatatgttgctttacaagaaggccaaagaactatggggccttcccagcatttgactgttcattgcatagaatgaattaaatatccagttacttgaatgggtataacgcatgaatatttgtgtgtctgtgtgtgtgtctgagttgtgtgattttattaggggcatctgccaattctctcactgtggttccttctctgactttgcctgttcatcatctaaggaggctagatccttcgctgacttcaccattcctcaaacctgtaagtttctcacttcttccaaattggctttggctctttctgcaacctttccattcaagagcaatctttgctaaggagtaagtgaatgtgaagagtaccaactacaacaattctacagataattagtggattgtgttgtttgttgagagtgaaggtttcttggcatctggtgcctgattaaggcttgagtattaagttctcagcatatctctctattgtcttgacttgagtttgctgcattttctatgtgctgttcgtgacttggagaacttaaagtaatcgagctatgccaacttggggtggtaacagagtacttcccaccacagtgttgaaagggagagcaaagtcttatggataaaccctcctttcttttggggacacatggctctcacttgagaagctcacctgtgctgaatgtccacatggtcactaaacatgttatccttaaaccccccgtatgcctgagttgaaagggctctctcttattaggttttcatgggaacatgaggcagcaaatctattgctaagactttaccaggctcaaatcatctgaggctgatagatatttgacttggtaagacttaagtaaggctctggctcccaggggcataagcaacagtttcttgaatgtgccatctgagaagggagacccaggttgtgagttttcctttgaacacattggtcttttctcaaagttcctgccttgctagactgttagctctttgaggacagggactatgtcttatcaatcactattattttcctgttacctagcatgggacaagtacacaacacatatttgttcaatgaatgaatgaatgtcttctaaaagactcctctgattgggagaccatatctataattgggatgtgaatcatttcttcagtggaataagagcacaacggcacaaccttcaaggacatattatctactatgaacattttactgtgagactctttattttgccttctacttgcgctgaaatgaaaccaaaacaggccgttgggttccacaagtcaatatatgttggatgaggattctgttgccttattgggaactgtgagacttatctggtatgagaagccagtaataaacctttgacctgttttaaccaatgaagattatgaatatgttaatatgatgtaaattgctatttaagtgtaaagcagttctaagttttagtatttgggggattggtttttattatttttttcctttttgaaaaatactgagggatcttttgataaagttagtaatgcatgttagattttagttttgcaagcatgttgtttttcaaatatatcaagtatagaaaaaggtaaaacagttaagaaggaaggcaattatattattcttctgtagttaagcaaacacttgttgagtgcctgctatgtgcacggcatgggcccatatgtgtgaggagcttgtctaattatgtaggaagcaatagatctcggtagttacgtattgggcagatacttactgtatgaatgaaagaacatcacagtaatcacaatatcagagctgaattatcctcagtgtagcttcttggaattcagtttctggaactagagatagagcatttattaaaaaaaactcctgttgagactgtgtcttatgaacctctgaaacgtacaagccttcacaagtttaactaaattgggattaatctttctgtagttatctgcataattcttgtttttctttccatctggctcctgggttgacaatttgtggaaacaactctattgctactatttaaaaaaaatcagaaatctttccctttaagctatgttaaattcaaactattcctgctattcctgttttgtcaaagaattatatttttcaaaatatgtttatttgtttgatgggtcccaggaaacactaataaaaaccacagagaccagcctgg

SEQ ID NO: 159 - DNA, 5410 bp, Homo sapiens; identical to SEQ ID NO: 156
  misc_feature (560)..(560): second gene starts at position 560

SEQ ID NO: 160 - DNA, 2700 bp, Homo sapiens
  misc_feature (1682)..(1682): second gene starts at position 1682
atggacgtgaaggagaggaagccttaccgctcgctgacccggcgccgcgacgccgagcgccgctacaccagctcgtccgcggacagcgaggagggcaaagccccgcagaaatcgtacagctccagcgagaccctgaaggcctacgaccaggacgcccgcctagcctatggcagccgcgtcaaggacattgtgccgcaggaggccgaggaattctgccgcacaggtgccaacttcaccctgcgggagctggggctggaagaagtaacgccccctcacgggaccctgtaccggacagacattggcctcccccactgcggctactccatgggggctggctctgatgccgacatggaggctgacacggtgctgtcccctgagcaccccgtgcgtctgtggggccggagcacacggtcagggcgcagctcctgcctgtccagccgggccaattccaatctcacactcaccgacaccgagcatgaaaacactgagactgatcatccgggcggcctgcagaaccacgcgcggctccggacgccgccgccgccgctctcgcacgcccacacccccaaccagcaccacgcggcctccattaactccctgaaccggggcaacttcacgccgaggagcaaccccagcccggcccccacggaccactcgctctccggagagccccctgccggcggcgcccaggagcctgcccacgcccaggagaactggctgctcaacagcaacatccccctggagaccagaaacctaggcaagcagccattcctagggacattgcaggacaacctcattgagatggacattctcggcgcctcccgccatgatggggcttacagtgacgggcacttcctcttcaagcctggaggcacctccccgctcttctgcaccacatcaccagggtacccactgacgtccagcacagtgtactctcctccgccccgacccctgccccgcagcaccttcgcccggccggcctttaacctcaagaagccctccaagtactgtaactggaagtgcgcagccctgagcgccatcgtcatctcagccactctggtcatcctgctggcatactttgtggccatgcacctgtttggcctaaactggcacctgcagccgatggaggggcagatgtatgagatcacggaggacacagccagcagttggcctgtgccaaccgacgtctccctatacccctcagggggcactggcttagagacccctgacaggaaaggcaaaggaaccacagaaggaaagcccagtagtttctttccagaggacagtttcatagattctggagaaattgatgtgggaaggcgagcttcccagaagattcctcctggcactttctggagatctcaagtgttcatagaccatcctgtgcatctgaaattcaatgtgtctctgggaaaggcagccctggttggcatttatggcagaaaaggcctccctccttcacatacacagtttgactttgtggagctgctggatggcaggaggctcctaacccaggaggcgcggagcctagaggggaccccgcgccagtctcggggaactgtgcccccctccagccatgagacaggcttcatccagtatttggattcaggaatctggcacttggctttttacaatgacggaaaggagtcagaagtggtttcctttctcaccactgccattgccttgcctccccgattgaaagagatgaaaagccaggaatcggctgcaggttccaaactagtccttcggtgtgaaaccagttctgaatactcctctctcagattcaagtggttcaagaatgggaatgaattgaatcgaaaaaacaaaccacaaaatatcaagatacaaaaaaagccagggaagtcagaacttcgcattaacaaagcatcactggctgattctggagagtatatgtgcaaagtgatcagcaaattaggaaatgacagtgcctctgccaatatcaccatcgtggaatcaaacgagatcatcactggtatgccagcctcaactgaaggagcatatgtgtcttcagctacatctacatccaccactgggacaagccatcttgtaaaatgtgcggagaaggagaaaactttctgtgtgaatggaggggagtgcttcatggtgaaagacctttcaaacccctcgagatacttgtgcaagtaagaaaagaaatcctgtgtgtcgcttatgtctataactccttgtttcagatgattctatgtctcatgatgtattgttgctttttttccaattttgttgcatcatgttgaataatgctgttttatatgtagagtgttttaaaacattcacaccattcgtcatcactcctctgtcatatgcagaattgttttttgctcttttcaatgtgtgtgaggtgttttttgtttttgtttttgttttttgccatgttatttatagtgttgctttccttgtggtttttcttgttgttattcagaaaagatgtgcagatatcacagaggcctataacttttggtatctacttctacatccaatgtatgaattaagctgtaagataatgttgctttcttatcccagtgatcacctgccaaatgaataagacaacaaagagaagcagaagggcagaagattatttactgacatatatctattacacttgggattgtcttactgttgcataactattttttaaacggagtttagttttatattgctagt

SEQ ID NO: 161 - DNA, 4275 bp, Homo sapiens
  misc_feature (1682)..(1682): second gene starts at position 1682
atggacgtgaaggagaggaagccttaccgctcgctgacccggcgccgcgacgccgagcgccgctacaccagctcgtccgcggacagcgaggagggcaaagccccgcagaaatcgtacagctccagcgagaccctgaaggcctacgaccaggacgcccgcctagcctatggcagccgcgtcaaggacattgtgccgcaggaggccgaggaattctgccgcacaggtgccaacttcaccctgcgggagctggggctggaagaagtaacgccccctcacgggaccctgtaccggacagacattggcctcccccactgcggctactccatgggggctggctctgatgccgacatggaggctgacacggtgctgtcccctgagcaccccgtgcgtctgtggggccggagcacacggtcagggcgcagctcctgcctgtccagccgggccaattccaatctcacactcaccgacaccgagcatgaaaacactgagactgatcatccgggcggcctgcagaaccacgcgcggctccggacgccgccgccgccgctctcgcacgcccacacccccaaccagcaccacgcggcctccattaactccctgaaccggggcaacttcacgccgaggagcaaccccagcccggcccccacggaccactcgctctccggagagccccctgccggcggcgcccaggagcctgcccacgcccaggagaactggctgctcaacagcaacatccccctggagaccagaaacctaggcaagcagccattcctagggacattgcaggacaacctcattgagatggacattctcggcgcctcccgccatgatggggcttacagtgacgggcacttcctcttcaagcctggaggcacctccccgctcttctgcaccacatcaccagggtacccactgacgtccagcacagtgtactctcctccgccccgacccctgccccgcagcaccttcgcccggccggcctttaacctcaagaagccctccaagtactgtaactggaagtgcgcagccctgagcgccatcgtcatctcagccactctggtcatcctgctggcatactttgtggccatgcacctgtttggcctaaactggcacctgcagccgatggaggggcagatgtatgagatcacggaggacacagccagcagttggcctgtgccaaccgacgtctccctatacccctcagggggcactggcttagagacccctgacaggaaaggcaaaggaaccacagaaggaaagcccagtagtttctttccagaggacagtttcatagattctggagaaattgatgtgggaaggcgagcttcccagaagattcctcctggcactttctggagatctcaagtgttcatagaccatcctgtgcatctgaaattcaatgtgtctctgggaaaggcagccctggttggcatttatggcagaaaaggcctccctccttcacatacacagtttgactttgtggagctgctggatggcaggaggctcctaacccaggaggcgcggagcctagaggggaccccgcgccagtctcggggaactgtgcccccctccagccatgagacaggcttcatccagtatttggattcaggaatctggcacttggctttttacaatgacggaaaggagtcagaagtggtttcctttctcaccactgccattgccttgcctccccgattgaaagagatgaaaagccaggaatcggctgcaggttccaaactagtccttcggtgtgaaaccagttctgaatactcctctctcagattcaagtggttcaagaatgggaatgaattgaatcgaaaaaacaaaccacaaaatatcaagatacaaaaaaagccagggaagtcagaacttcgcattaacaaagcatcactggctgattctggagagtatatgtgcaaagtgatcagcaaattaggaaatgacagtgcctctgccaatatcaccatcgtggaatcaaacgagatcatcactggtatgccagcctcaactgaaggagcatatgtgtcttcagagtctcccattagaatatcagtatccacagaaggagcaaatacttcttcatctacatctacatccaccactgggacaagccatcttgtaaaatgtgcggagaaggagaaaactttctgtgtgaatggaggggagtgcttcatggtgaaagacctttcaaacccctcgagatacttgtgcaagtgcccaaatgagtttactggtgatcgctgccaaaactacgtaatggccagcttctacaaggcggaggagctgtaccagaagagagtgctgaccataaccggcatctgcatcgccctccttgtggtcggcatcatgtgtgtggtggcctactgcaaaaccaagaaacagcggaaaaagctgcatgaccgtcttcggcagagccttcggtctgaacgaaacaatatgatgaacattgccaatgggcctcaccatcctaacccaccccccgagaatgtccagctggtgaatcaatacgtatctaaaaacgtcatctccagtgagcatattgttgagagagaagcagagacatccttttccaccagtcactatacttccacagcccatcactccactactgtcacccagactcctagccacagctggagcaacggacacactgaaagcatcctttccgaaagccactctgtaatcgtgatgtcatccgtagaaaacagtaggcacagcagcccaactgggggcccaagaggacgtcttaatggcacaggaggccctcgtgaatgtaacagcttcctcaggcatgccagagaaacccctgattcctaccgagactctcctcatagtgaaagacataaccttatagctgagctaaggagaaacaaggcacacagatccaaatgcatgcagatccagctatcagcaactcatcttagatcttcttccattccccatttgggcttcattctctaagaccccttggcctttaggaaggtatgtgtcagccatgaccaccccggctcgtatgtcacctgtagatttccacacgccaagctcccccaaatcgcccccttcggaaatgtctccacccgtgtccagcatgacggtgtccatgccttccatggcggtcagccccttcatggaagaagagagacctctacttctcgtgacaccaccaaggctgcgggagaagaagtttgaccatcaccctcagcagttcagctccttccaccacaaccccgcgcatgacagtaacagcctccctgctagccccttgaggatagtggaggatgaggagtatgaaacgacccaagagtacgagccagcccaagagcctgttaagaaactcgccaatagccggcgggccaaaagaaccaagcccaatggccacattgctaacagattggaagtggacagcaacacaagctcccagagcagtaactcagagagtgaaacagaagatgaaagagtaggtgaagatacgcctttcctgggcatacagaaccccctggcagccagtcttgaggcaacacctgccttccgcctggctgacagcaggactaacccagcaggccgcttctcgacacaggaagaaatccaggccaggctgtctagtgtaattgctaaccaagaccctattgctgtataaaacctaaataaacacatagattcacctgtaaaactttattttatataataaagtattccaccttaaattaaacaatttattttattttagcagttctgcaaatagaaaacaggaaaaaaacttttataaattaaatatatgtatgtaaaaatgtgttatgtgccatatgtagcaattttttacagtatttcaaaacgagaaagatatcaatggtgcctttatgttatgttatgtcgagagcaagttttgtacagttacagtgattgcttttccacagtatttctgcaaaacctctcatagattcagtttttgctggcttcttgtgcattgcattatgatgttgactggatgtatgatttgcaagacttgcaactgtccctctgtttgcttgtagtagcacccgatcagtatgtcttgtaatggcacatccatccagatatgcctctcttgtgtatgaagttttctttgctttcagaatatgaaatgagttgtgtctactctgccagccaaaggtttgcctcattgggctctgagataatagtagatccaacagcatgctactattaaatacagcaagaaactgcattaagtaatgttaaatattaggaagaaagtaatactgtgatttaaaaaaaact

SEQ ID NO: 162 - DNA, 2687 bp, Homo sapiens
  misc_feature (1682)..(1682): second gene starts at position 1682
atggacgtgaaggagaggaagccttaccgctcgctgacccggcgccgcgacgccgagcgccgctacaccagctcgtccgcggacagcgaggagggcaaagccccgcagaaatcgtacagctccagcgagaccctgaaggcctacgaccaggacgcccgcctagcctatggcagccgcgtcaaggacattgtgccgcaggaggccgaggaattctgccgcacaggtgccaacttcaccctgcgggagctggggctggaagaagtaacgccccctcacgggaccctgtaccggacagacattggcctcccccactgcggctactccatgggggctggctctgatgccgacatggaggctgacacggtgctgtcccctgagcaccccgtgcgtctgtggggccggagcacacggtcagggcgcagctcctgcctgtccagccgggccaattccaatctcacactcaccgacaccgagcatgaaaacactgagactgatcatccgggcggcctgcagaaccacgcgcggctccggacgccgccgccgccgctctcgcacgcccacacccccaaccagcaccacgcggcctccattaactccctgaaccggggcaacttcacgccgaggagcaaccccagcccggcccccacggaccactcgctctccggagagccccctgccggcggcgcccaggagcctgcccacgcccaggagaactggctgctcaacagcaacatccccctggagaccagaaacctaggcaagcagccattcctagggacattgcaggacaacctcattgagatggacattctcggcgcctcccgccatgatggggcttacagtgacgggcacttcctcttcaagcctggaggcacctccccgctcttctgcaccacatcaccagggtacccactgacgtccagcacagtgtactctcctccgccccgacccctgccccgcagcaccttcgcccggccggcctttaacctcaagaagccctccaagtactgtaactggaagtgcgcagccctgagcgccatcgtcatctcagccactctggtcatcctgctggcatactttgtggccatgcacctgtttggcctaaactggcacctgcagccgatggaggggcagatgtatgagatcacggaggacacagccagcagttggcctgtgccaaccgacgtctccctatacccctcagggggcactggcttagagacccctgacaggaaaggcaaaggaaccacagaaggaaagcccagtagtttctttccagaggacagtttcatagattctggagaaattgatgtgggaaggcgagcttcccagaagattcctcctggcactttctggagatctcaagtgttcatagaccatcctgtgcatctgaaattcaatgtgtctctgggaaaggcagccctggttggcatttatggcagaaaaggcctccctccttcacatacacagtttgactttgtggagctgctggatggcaggaggctcctaacccaggaggcgcggagcctagaggggaccccgcgccagtctcggggaactgtgcccccctccagccatgagacaggcttcatccagtatttggattcaggaatctggcacttggctttttacaatgacggaaaggagtcagaagtggtttcctttctcaccactgccattgccttgcctccccgattgaaagagatgaaaagccaggaatcggctgcaggttccaaactagtccttcggtgtgaaaccagttctgaatactcctctctcagattcaagtggttcaagaatgggaatgaattgaatcgaaaaaacaaaccacaaaatatcaagatacaaaaaaagccagggaagtcagaacttcgcattaacaaagcatcactggctgattctggagagtatatgtgcaaagtgatcagcaaattaggaaatgacagtgcctctgccaatatcaccatcgtggaatcaaacgctacatctacatccaccactgggacaagccatcttgtaaaatgtgcggagaaggagaaaactttctgtgtgaatggaggggagtgcttcatggtgaaagacctttcaaacccctcgagatacttgtgcaagtgcccaaatgagtttactggtgatcgctgccaaaactacgtaatggccagcttctacagtacgtccactccctttctgtctctgcctgaataggagcatgctcagttggtgctgctttcttgttgctgcatctcccctcagattccacctagagctagatgtgtcttaccagatctaatattgactgcctctgcctgtcgcatgagaacattaacaaaagcaattgtattacttcctctgttcgcgactagttggctctgagatactaataggtgtgtgaggctccggatgtttctggaattgatattgaatgatgtgatacaaattgatagtcaatatcaagcagtgaaatatgataataaaggcatttcaaagtctcacttttattgataaaataaaaatcattctactgaacagtccatcttctttatacaatgaccacatcctgaaaagggtgttgctaagctgtaaccgatatgcacttgaaatgatggtaagttaattttgattcagaatgtgttatttgtcacaaataaacataataaaaggagttcagatgtttttcttcattaacc

SEQ ID NO: 163 - DNA, 2649 bp, Homo sapiens
  misc_feature (1682)..(1682): second gene starts at position 1682
atggacgtgaaggagaggaagccttaccgctcgctgacccggcgccgcgacgccgagcgccgctacaccagctcgtccgcggacagcgaggagggcaaagccccgcagaaatcgtacagctccagcgagaccctgaaggcctacgaccaggacgcccgcctagcctatggcagccgcgtcaaggacattgtgccgcaggaggccgaggaattctgccgcacaggtgccaacttcaccctgcgggagctggggctggaagaagtaacgccccctcacgggaccctgtaccggacagacattggcctcccccactgcggctactccatgggggctggctctgatgccgacatggaggctgacacggtgctgtcccctgagcaccccgtgcgtctgtggggccggagcacacggtcagggcgcagctcctgcctgtccagccgggccaattccaatctcacactcaccgacaccgagcatgaaaacactgagactgatcatccgggcggcctgcagaaccacgcgcggctccggacgccgccgccgccgctctcgcacgcccacacccccaaccagcaccacgcggcctccattaactccctgaaccggggcaacttcacgccgaggagcaaccccagcccggcccccacggaccactcgctctccggagagccccctgccggcggcgcccaggagcctgcccacgcccaggagaactggctgctcaacagcaacatccccctggagaccagaaacctaggcaagcagccattcctagggacattgcaggacaacctcattgagatggacattctcggcgcctcccgccatgatggggcttacagtgacgggcacttcctcttcaagcctggaggcacctccccgctcttctgcaccacatcaccagggtacccactgacgtccagcacagtgtactctcctccgccccgacccctgccccgcagcaccttcgcccggccggcctttaacctcaagaagccctccaagtactgtaactggaagtgcgcagccctgagcgccatcgtcatctcagccactctggtcatcctgctggcatactttgtggccatgcacctgtttggcctaaactggcacctgcagccgatggaggggcagatgtatgagatcacggaggacacagccagcagttggcctgtgccaaccgacgtctccctatacccctcagggggcactggcttagagacccctgacaggaaaggcaaaggaaccacagaaggaaagcccagtagtttctttccagaggacagtttcatagattctggagaaattgatgtgggaaggcgagcttcccagaagattcctcctggcactttctggagatctcaagtgttcatagaccatcctgtgcatctgaaattcaatgtgtctctgggaaaggcagccctggttggcatttatggcagaaaaggcctccctccttcacatacacagtttgactttgtggagctgctggatggcaggaggctcctaacccaggaggcgcggagcctagaggggaccccgcgccagtctcggggaactgtgcccccctccagccatgagacaggcttcatccagtatttggattcaggaatctggcacttggctttttacaatgacggaaaggagtcagaagtggtttcctttctcaccactgccattgccttgcctccccgattgaaagagatgaaaagccaggaatcggctgcaggttccaaactagtccttcggtgtgaaaccagttctgaatactcctctctcagattcaagtggttcaagaatgggaatgaattgaatcgaaaaaacaaaccacaaaatatcaagatacaaaaaaagccagggaagtcagaacttcgcattaacaaagcatcactggctgattctggagagtatatgtgcaaagtgatcagcaaattaggaaatgacagtgcctctgccaatatcaccatcgtggaatcaaacgctacatctacatccaccactgggacaagccatcttgtaaaatgtgcggagaaggagaaaactttctgtgtgaatggaggggagtgcttcatggtgaaagacctttcaaacccctcgagatacttgtgcaagtaagaaaagaaatcctgtgtgtcgcttatgtctataactccttgtttcagatgattctatgtctcatgatgtattgttgctttttttccaattttgttgcatcatgttgaataatgctgttttatatgtagagtgttttaaaacattcacaccattcgtcatcactcctctgtcatatgcagaattgttttttgctcttttcaatgtgtgtgaggtgttttttgtttttgtttttgttttttgccatgttatttatagtgttgctttccttgtggtttttcttgttgttattcagaaaagatgtgcagatatcacagaggcctataacttttggtatctacttctacatccaatgtatgaattaagctgtaagataatgttgctttcttatcccagtgatcacctgccaaatgaataagacaacaaagagaagcagaagggcagaagattatttactgacatatatctattacacttgggattgtcttactgttgcataactattttttaaacggagtttagttttatattgctagt

SEQ ID NO: 164 - DNA, 3423 bp, Homo sapiens
  misc_feature (1682)..(1682): second gene starts at position 1682
atggacgtgaaggagaggaagccttaccgctcgctgacccggcgccgcgacgccgagcgccgctacaccagctcgtccgcggacagcgaggagggcaaagccccgcagaaatcgtacagctccagcgagaccctgaaggcctacgaccaggacgcccgcctagcctatggcagccgcgtcaaggacattgtgccgcaggaggccgaggaattctgccgcacaggtgccaacttcaccctgcgggagctggggctggaagaagtaacgccccctcacgggaccctgtaccggacagacattggcctcccccactgcggctactccatgggggctggctctgatgccgacatggaggctgacacggtgctgtcccctgagcaccccgtgcgtctgtggggccggagcacacggtcagggcgcagctcctgcctgtccagccgggccaattccaatctcacactcaccgacaccgagcatgaaaacactgagactgatcatccgggcggcctgcagaaccacgcgcggctccggacgccgccgccgccgctctcgcacgcccacacccccaaccagcaccacgcggcctccattaactccctgaaccggggcaacttcacgccgaggagcaaccccagcccggcccccacggaccactcgctctccggagagccccctgccggcggcgcccaggagcctgcccacgcccaggagaactggctgctcaacagcaacatccccctggagaccagaaacctaggcaagcagccattcctagggacattgcaggacaacctcattgagatggacattctcggcgcctcccgccatgatggggcttacagtgacgggcacttcctcttcaagcctggaggcacctccccgctcttctgcaccacatcaccagggtacccactgacgtccagcacagtgtactctcctccgccccgacccctgccccgcagcaccttcgcccggccggcctttaacctcaagaagccctccaagtactgtaactggaagtgcgcagccctgagcgccatcgtcatctcagccactctggtcatcctgctggcatactttgtggccatgcacctgtttggcctaaactggcacctgcagccgatggaggggcagatgtatgagatcacggaggacacagccagcagttggcctgtgccaaccgacgtctccctatacccctcagggggcactggcttagagacccctgacaggaaaggcaaaggaaccacagaaggaaagcccagtagtttctttccagaggacagtttcatagattctggagaaattgatgtgggaaggcgagcttcccagaagattcctcctggcactttctggagatctcaagtgttcatagaccatcctgtgcatctgaaattcaatgtgtctctgggaaaggcagccctggttggcatttatggcagaaaaggcctccctccttcacatacacagtttgactttgtggagctgctggatggcaggaggctcctaacccaggaggcgcggagcctagaggggaccccgcgccagtctcggggaactgtgcccccctccagccatgagacaggcttcatccagtatttggattcaggaatctggcacttggctttttacaatgacggaaaggagtcagaagtggtttcctttctcaccactgccattgccttgcctccccgattgaaagagatgaaaagccaggaatcggctgcaggttccaaactagtccttcggtgtgaaaccagttctgaatactcctctctcagattcaagtggttcaagaatgggaatgaattgaatcgaaaaaacaaaccacaaaatatcaagatacaaaaaaagccagggaagtcagaacttcgcattaacaaagcatcactggctgattctggagagtatatgtgcaaagtgatcagcaaattaggaaatgacagtgcctctgccaatatcaccatcgtggaatcaaacgagatcatcactggtatgccagcctcaactgaaggagcatatgtgtcttcagagtctcccattagaatatcagtatccacagaaggagcaaatacttcttcatctacatctacatccaccactgggacaagccatcttgtaaaatgtgcggagaaggagaaaactttctgtgtgaatggaggggagtgcttcatggtgaaagacctttcaaacccctcgagatacttgtgcaagtgcccaaatgagtttactggtgatcgctgccaaaactacgtaatggccagcttctacaaggcggaggagctgtaccagaagagagtgctgaccataaccggcatctgcatcgccctccttgtggtcggcatcatgtgtgtggtggcctactgcaaaaccaagaaacagcggaaaaagctgcatgaccgtcttcggcagagccttcggtctgaacgaaacaatatgatgaacattgccaatgggcctcaccatcctaacccaccccccgagaatgtccagctggtgaatcaatacgtatctaaaaacgtcatctccagtgagcatattgttgagagagaagcagagacatccttttccaccagtcactatacttccacagcccatcactccactactgtcacccagactcctagccacagctggagcaacggacacactgaaagcatcctttccgaaagccactctgtaatcgtgatgtcatccgtagaaaacagtaggcacagcagcccaactgggggcccaagaggacgtcttaatggcacaggaggccctcgtgaatgtaacagcttcctcaggcatgccagagaaacccctgattcctaccgagactctcctcatagtgaaaggtaaaaccgaagggcaaagctactgcagaggagaaactcagtcagagaatccctgtgagcacctgcggtctcacctcaggaaatctactctaatcagaataaggggcggcagttacctgttctaggagtgctcctagttgatgaagtcatctctttgtttgacggaacttatttcttctgagcttctctcgtcgtcccagtgactgacaggcaacagactcttaaagagctgggatgctttgatgcggaaggtgcagcacatggagtttccagctctggccatgggctcagacccactcggggtctcagtgtcctcagttgtaacattagagagatggcatcaatgcttgataaggacccttctataattccaattgccagttatccaaactctgattcggtggtcgagctggcctcgtgttcttatctgctaaccctgtcttaccttccagcctcagttaagtcaaatcaagggctatgtcattgctgaatgtcatggggggcaactgcttgccctccaccctatagtatctattttatgaaattccaagaagggatgaataaataaatctcttggatgctg

SEQ ID NO: 165 - DNA, 2751 bp, Homo sapiens
  misc_feature (1682)..(1682): second gene starts at position 1682
atggacgtgaaggagaggaagccttaccgctcgctgacccggcgccgcgacgccgagcgccgctacaccagctcgtccgcggacagcgaggagggcaaagccccgcagaaatcgtacagctccagcgagaccctgaaggcctacgaccaggacgcccgcctagcctatggcagccgcgtcaaggacattgtgccgcaggaggccgaggaattctgccgcacaggtgccaacttcaccctgcgggagctggggctggaagaagtaacgccccctcacgggaccctgtaccggacagacattggcctcccccactgcggctactccatgggggctggctctgatgccgacatggaggctgacacggtgctgtcccctgagcaccccgtgcgtctgtggggccggagcacacggtcagggcgcagctcctgcctgtccagccgggccaattccaatctcacactcaccgacaccgagcatgaaaacactgagactgatcatccgggcggcctgcagaaccacgcgcggctccggacgccgccgccgccgctctcgcacgcccacacccccaaccagcaccacgcggcctccattaactccctgaaccggggcaacttcacgccgaggagcaaccccagcccggcccccacggaccactcgctctccggagagccccctgccggcggcgcccaggagcctgcccacgcccaggagaactggctgctcaacagcaacatccccctggagaccagaaacctaggcaagcagccattcctagggacattgcaggacaacctcattgagatggacattctcggcgcctcccgccatgatggggcttacagtgacgggcacttcctcttcaagcctggaggcacctccccgctcttctgcaccacatcaccagggtacccactgacgtccagcacagtgtactctcctccgccccgacccctgccccgcagcaccttcgcccggccggcctttaacctcaagaagccctccaagtactgtaactggaagtgcgcagccctgagcgccatcgtcatctcagccactctggtcatcctgctggcatactttgtggccatgcacctgtttggcctaaactggcacctgcagccgatggaggggcagatgtatgagatcacggaggacacagccagcagttggcctgtgccaaccgacgtctccctatacccctcagggggcactggcttagagacccctgacaggaaaggcaaaggaaccacagaaggaaagcccagtagtttctttccagaggacagtttcatagattctggagaaattgatgtgggaaggcgagcttcccagaagattcctcctggcactttctggagatctcaagtgttcatagaccatcctgtgcatctgaaattcaatgtgtctctgggaaaggcagccctggttggcatttatggcagaaaaggcctccctccttcacatacacagtttgactttgtggagctgctggatggcaggaggctcctaacccaggaggcgcggagcctagaggggaccccgcgccagtctcggggaactgtgcccccctccagccatgagacaggcttcatccagtatttggattcaggaatctggcacttggctttttacaatgacggaaaggagtcagaagtggtttcctttctcaccactgccattgccttgcctccccgattgaaagagatgaaaagccaggaatcggctgcaggttccaaactagtccttcggtgtgaaaccagttctgaatactcctctctcagattcaagtggttcaagaatgggaatgaattgaatcgaaaaaacaaaccacaaaatatcaagatacaaaaaaagccagggaagtcagaacttcgcattaacaaagcatcactggctgattctggagagtatatgtgcaaagtgatcagcaaattaggaaatgacagtgcctctgccaatatcaccatcgtggaatcaaacgagatcatcactggtatgccagcctcaactgaaggagcatatgtgtcttcagagtctcccattagaatatcagtatccacagaaggagcaaatacttcttcatctacatctacatccaccactgggacaagccatcttgtaaaatgtgcggagaaggagaaaactttctgtgtgaatggaggggagtgcttcatggtgaaagacctttcaaacccctcgagatacttgtgcaagtaagaaaagaaatcctgtgtgtcgcttatgtctataactccttgtttcagatgattctatgtctcatgatgtattgttgctttttttccaattttgttgcatcatgttgaataatgctgttttatatgtagagtgttttaaaacattcacaccattcgtcatcactcctctgtcatatgcagaattgttttttgctcttttcaatgtgtgtgaggtgttttttgtttttgtttttgttttttgccatgttatttatagtgttgctttccttgtggtttttcttgttgttattcagaaaagatgtgcagatatcacagaggcctataacttttggtatctacttctacatccaatgtatgaattaagctgtaagataatgttgctttcttatcccagtgatcacctgccaaatgaataagacaacaaagagaagcagaagggcagaagattatttactgacatatatctattacacttgggattgtcttactgttgcataactattttttaaacggagtttagttttatattgctagt

SEQ ID NO: 166 - DNA, 4157 bp, Homo sapiens
  misc_feature (1682)..(1682): second gene starts at position 1682
atggacgtgaaggagaggaagccttaccgctcgctgacccggcgccgcgacgccgagcgccgctacaccagctcgtccgcggacagcgaggagggcaaagccccgcagaaatcgtacagctccagcgagaccctgaaggcctacgaccaggacgcccgcctagcctatggcagccgcgtcaaggacattgtgccgcaggaggccgaggaattctgccgcacaggtgccaacttcaccctgcgggagctggggctggaagaagtaacgccccctcacgggaccctgtaccggacagacattggcctcccccactgcggctactccatgggggctggctctgatgccgacatggaggctgacacggtgctgtcccctgagcaccccgtgcgtctgtggggccggagcacacggtcagggcgcagctcctgcctgtccagccgggccaattccaatctcacactcaccgacaccgagcatgaaaacactgagactgatcatccgggcggcctgcagaaccacgcgcggctccggacgccgccgccgccgctctcgcacgcccacacccccaaccagcaccacgcggcctccattaactccctgaaccggggcaacttcacgccgaggagcaaccccagcccggcccccacggaccactcgctctccggagagccccctgccggcggcgcccaggagcctgcccacgcccaggagaactggctgctcaacagcaacatccccctggagaccagaaacctaggcaagcagccattcctagggacattgcaggacaacctcattgagatggacattctcggcgcctcccgccatgatggggcttacagtgacgggcacttcctcttcaagcctggaggcacctccccgctcttctgcaccacatcaccagggtacccactgacgtccagcacagtgtactctcctccgccccgacccctgccccgcagcaccttcgcccggccggcctttaacctcaagaagccctccaagtactgtaactggaagtgcgcagccctgagcgccatcgtcatctcagccactctggtcatcctgctggcatactttgtggccatgcacctgtttggcctaaactggcacctgcagccgatggaggggcagatgtatgagatcacggaggacacagccagcagttggcctgtgccaaccgacgtctccctatacccctcagggggcactggcttagagacccctgacaggaaaggcaaaggaaccacagaaggaaagcccagtagtttctttccagaggacagtttcatagattctggagaaattgatgtgggaaggcgagcttcccagaagattcctcctggcactttctggagatctcaagtgttcatagaccatcctgtgcatctgaaattcaatgtgtctctgggaaaggcagccctggttggcatttatggcagaaaaggcctccctccttcacatacacagtttgactttgtggagctgctggatggcaggaggctcctaacccaggaggcgcggagcctagaggggaccccgcgccagtctcggggaactgtgcccccctccagccatgagacaggcttcatccagtatttggattcaggaatctggcacttggctttttacaatgacggaaaggagtcagaagtggtttcctttctcaccactgccattgccttgcctccccgattgaaagagatgaaaagccaggaatcggctgcaggttccaaactagtccttcggtgtgaaaccagttctgaatactcctctctcagattcaagtggttcaagaatgggaatgaattgaatcgaaaaaacaaaccacaaaatatcaagatacaaaaaaagccagggaagtcagaacttcgcattaacaaagcatcactggctgattctggagagtatatgtgcaaagtgatcagcaaattaggaaatgacagtgcctctgccaatatcaccatcgtggaatcaaacgagatcatcactggtatgccagcctcaactgaaggagcatatgtgtcttcagagtctcccattagaatatcagtatccacagaaggagcaaatacttcttcatctacatctacatccaccactgggacaagccatcttgtaaaatgtgcggagaaggagaaaactttctgtgtgaatggaggggagtgcttcatggtgaaagacctttcaaacccctcgagatacttgtgcaagtgcccaaatgagtttactggtgatcgctgccaaaactacgtaatggccagcttctacaagcatcttgggattgaatttatggaggcggaggagctgtaccagaagagagtgctgaccataaccggcatctgcatcgccctccttgtggtcggcatcatgtgtgtggtggcctactgcaaaaccaagaaacagcggaaaaagctgcatgaccgtcttcggcagagccttcggtctgaacgaaacaatatgatgaacattgccaatgggcctcaccatcctaacccaccccccgagaatgtccagctggtgaatcaatacgtatctaaaaacgtcatctccagtgagcatattgttgagagagaagcagagacatccttttccaccagtcactatacttccacagcccatcactccactactgtcacccagactcctagccacagctggagcaacggacacactgaaagcatcctttccgaaagccactctgtaatcgtgatgtcatccgtagaaaacagtaggcacagcagcccaactgggggcccaagaggacgtcttaatggcacaggaggccctcgtgaatgtaacagcttcctcaggcatgccagagaaacccctgattcctaccgagactctcctcatagtgaaaggtatgtgtcagccatgaccaccccggctcgtatgtcacctgtagatttccacacgccaagctcccccaaatcgcccccttcggaaatgtctccacccgtgtccagcatgacggtgtccatgccttccatggcggtcagccccttcatggaagaagagagacctctacttctcgtgacaccaccaaggctgcgggagaagaagtttgaccatcaccctcagcagttcagctccttccaccacaaccccgcgcatgacagtaacagcctccctgctagccccttgaggatagtggaggatgaggagtatgaaacgacccaagagtacgagccagcccaagagcctgttaagaaactcgccaatagccggcgggccaaaagaaccaagcccaatggccacattgctaacagattggaagtggacagcaacacaagctcccagagcagtaactcagagagtgaaacagaagatgaaagagtaggtgaagatacgcctttcctgggcatacagaaccccctggcagccagtcttgaggcaacacctgccttccgcctggctgacagcaggactaacccagcaggccgcttctcgacacaggaagaaatccaggccaggctgtctagtgtaattgctaaccaagaccctattgctgtataaaacctaaataaacacatagattcacctgtaaaactttattttatataataaagtattccaccttaaattaaacaatttattttattttagcagttctgcaaatagaaaacaggaaaaaaacttttataaattaaatatatgtatgtaaaaatgtgttatgtgccatatgtagcaattttttacagtatttcaaaacgagaaagatatcaatggtgcctttatgttatgttatgtcgagagcaagttttgtacagttacagtgattgcttttccacagtatttctgcaaaacctctcatagattcagtttttgctggcttcttgtgcattgcattatgatgttgactggatgtatgatttgcaagacttgcaactgtccctctgtttgcttgtagtagcacccgatcagtatgtcttgtaatggcacatccatccagatatgcctctcttgtgtatgaagttttctttgctttcagaatatgaaatgagttgtgtctactctgccagccaaaggtttgcctcattgggctctgagataatagtagatccaacagcatgctactattaaatacagcaagaaactgcattaagtaatgttaaatattaggaagaaagtaatactgtgatttaaaaaaaact

SEQ ID NO: 167 - DNA, 4133 bp, Homo sapiens
  misc_feature (1682)..(1682): second gene starts at position 1682
atggacgtgaaggagaggaagccttaccgctcgctgacccggcgccgcgacgccgagcgccgctacaccagctcgtccgcggacagcgaggagggcaaagccccgcagaaatcgtacagctccagcgagaccctgaaggcctacgaccaggacgcccgcctagcctatggcagccgcgtcaaggacattgtgccgcaggaggccgaggaattctgccgcacaggtgccaacttcaccctgcgggagctggggctggaagaagtaacgccccctcacgggaccctgtaccggacagacattggcctcccccactgcggctactccatgggggctggctctgatgccgacatggaggctgacacggtgctgtcccctgagcaccccgtgcgtctgtggggccggagcacacggtcagggcgcagctcctgcctgtccagccgggccaattccaatctcacactcaccgacaccgagcatgaaaacactgagactgatcatccgggcggcctgcagaaccacgcgcggctccggacgccgccgccgccgctctcgcacgcccacacccccaaccagcaccacgcggcctccattaactccctgaaccggggcaacttcacgccgaggagcaaccccagcccggcccccacggaccactcgctctccggagagccccctgccggcggcgcccaggagcctgcccacgcccaggagaactggctgctcaacagcaacatccccctggagaccagaaacctaggcaagcagccattcctagggacattgcaggacaacctcattgagatggacattctcggcgcctcccgccatgatggggcttacagtgacgggcacttcctcttcaagcctggaggcacctccccgctcttctgcaccacatcaccagggtacccactgacgtccagcacagtgtactctcctccgccccgacccctgccccgcagcaccttcgcccggccggcctttaacctcaagaagccctccaagtactgtaactggaagtgcgcagccctgagcgccatcgtcatctcagccactctggtcatcctgctggcatactttgtggccatgcacctgtttggcctaaactggcacctgcagccgatggaggggcagatgtatgagatcacggaggacacagccagcagttggcctgtgccaaccgacgtctccctatacccctcagggggcactggcttagagacccctgacaggaaaggcaaaggaaccacagaaggaaagcccagtagtttctttccagaggacagtttcatagattctggagaaattgatgtgggaaggcgagcttcccagaagattcctcctggcactttctggagatctcaagtgttcatagaccatcctgtgcatctgaaattcaatgtgtctctgggaaaggcagccctggttggcatttatggcagaaaaggcctccctccttcacatacacagtttgactttgtggagctgctggatggcaggaggctcctaacccaggaggcgcggagcctagaggggaccccgcgccagtctcggggaactgtgcccccctccagccatgagacaggcttcatccagtatttggattcaggaatctggcacttggctttttacaatgacggaaaggagtcagaagtggtttcctttctcaccactgccattgccttgcctccccgattgaaagagatgaaaagccaggaatcggctgcaggttccaaactagtccttcggtgtgaaaccagttctgaatactcctctctcagattcaagtggttcaagaatgggaatgaattgaatcgaaaaaacaaaccacaaaatatcaagatacaaaaaaagccagggaagtcagaacttcgcattaacaaagcatcactggctgattctggagagtatatgtgcaaagtgatcagcaaattaggaaatgacagtgcctctgccaatatcaccatcgtggaatcaaacgagatcatcactggtatgccagcctcaactgaaggagcatatgtgtcttcagagtctcccattagaatatcagtatccacagaaggagcaaatacttcttcatctacatctacatccaccactgggacaagccatcttgtaaaatgtgcggagaaggagaaaactttctgtgtgaatggaggggagtgcttcatggtgaaagacctttcaaacccctcgagatacttgtgcaagtgcccaaatgagtttactggtgatcgctgccaaaactacgtaatggccagcttctacaaggcggaggagctgtaccagaagagagtgctgaccataaccggcatctgcatcgccctccttgtggtcggcatcatgtgtgtggtggcctactgcaaaaccaagaaacagcggaaaaagctgcatgaccgtcttcggcagagccttcggtctgaacgaaacaatatgatgaacattgccaatgggcctcaccatcctaacccaccccccgagaatgtccagctggtgaatcaatacgtatctaaaaacgtcatctccagtgagcatattgttgagagagaagcagagacatccttttccaccagtcactatacttccacagcccatcactccactactgtcacccagactcctagccacagctggagcaacggacacactgaaagcatcctttccgaaagccactctgtaatcgtgatgtcatccgtagaaaacagtaggcacagcagcccaactgggggcccaagaggacgtcttaatggcacaggaggccctcgtgaatgtaacagcttcctcaggcatgccagagaaacccctgattcctaccgagactctcctcatagtgaaaggtatgtgtcagccatgaccaccccggctcgtatgtcacctgtagatttccacacgccaagctcccccaaatcgcccccttcggaaatgtctccacccgtgtccagcatgacggtgtccatgccttccatggcggtcagccccttcatggaagaagagagacctctacttctcgtgacaccaccaaggctgcgggagaagaagtttgaccatcaccctcagcagttcagctccttccaccacaaccccgcgcatgacagtaacagcctccctgctagccccttgaggatagtggaggatgaggagtatgaaacgacccaagagtacgagccagcccaagagcctgttaagaaactcgccaatagccggcgggccaaaagaaccaagcccaatggccacattgctaacagattggaagtggacagcaacacaagctcccagagcagtaactcagagagtgaaacagaagatgaaagagtaggtgaagatacgcctttcctgggcatacagaaccccctggcagccagtcttgaggcaacacctgccttccgcctggctgacagcaggactaacccagcaggccgcttctcgacacaggaagaaatccaggccaggctgtctagtgtaattgctaaccaagaccctattgctgtataaaacctaaataaacacatagattcacctgtaaaactttattttatataataaagtattccaccttaaattaaacaatttattttattttagcagttctgcaaatagaaaacaggaaaaaaacttttataaattaaatatatgtatgtaaaaatgtgttatgtgccatatgtagcaattttttacagtatttcaaaacgagaaagatatcaatggtgcctttatgttatgttatgtcgagagcaagttttgtacagttacagtgattgcttttccacagtatttctgcaaaacctctcatagattcagtttttgctggcttcttgtgcattgcattatgatgttgactggatgtatgatttgcaagacttgcaactgtccctctgtttgcttgtagtagcacccgatcagtatgtcttgtaatggcacatccatccagatatgcctctcttgtgtatgaagttttctttgctttcagaatatgaaatgagttgtgtctactctgccagccaaaggtttgcctcattgggctctgagataatagtagatccaacagcatgctactattaaatacagcaagaaactgcattaagtaatgttaaatattaggaagaaagtaatactgtgatttaaaaaaaact

SEQ ID NO: 168 - DNA, 2789 bp, Homo sapiens
  misc_feature (1682)..(1682): second gene starts at position 1682
atggacgtgaaggagaggaagccttaccgctcgctgacccggcgccgcgacgccgagcgccgctacaccagctcgtccgcggacagcgaggagggcaaagccccgcagaaatcgtacagctccagcgagaccctgaaggcctacgaccaggacgcccgcctagcctatggcagccgcgtcaaggacattgtgccgcaggaggccgaggaattctgccgcacaggtgccaacttcaccctgcgggagctggggctggaagaagtaacgccccctcacgggaccctgtaccggacagacattggcctcccccactgcggctactccatgggggctggctctgatgccgacatggaggctgacacggtgctgtcccctgagcaccccgtgcgtctgtggggccggagcacacggtcagggcgcagctcctgcctgtccagccgggccaattccaatctcacactcaccgacaccgagcatgaaaacactgagactgatcatccgggcggcctgcagaaccacgcgcggctccggacgccgccgccgccgctctcgcacgcccacacccccaaccagcaccacgcggcctccattaactccctgaaccggggcaacttcacgccgaggagcaaccccagcccggcccccacggaccactcgctctccggagagccccctgccggcggcgcccaggagcctgcccacgcccaggagaactggctgctcaacagcaacatccccctggagaccagaaacctaggcaagcagccattcctagggacattgcaggacaacctcattgagatggacattctcggcgcctcccgccatgatggggcttacagtgacgggcacttcctcttcaagcctggaggcacctccccgctcttctgcaccacatcaccagggtacccactgacgtccagcacagtgtactctcctccgccccgacccctgccccgcagcaccttcgcccggccggcctttaacctcaagaagccctccaagtactgtaactggaagtgcgcagccctgagcgccatcgtcatctcagccactctggtcatcctgctggcatactttgtggccatgcacctgtttggcctaaactggcacctgcagccgatggaggggcagatgtatgagatcacggaggacacagccagcagttggcctgtgccaaccgacgtctccctatacccctcagggggcactggcttagagacccctgacaggaaaggcaaaggaaccacagaaggaaagcccagtagtttctttccagaggacagtttcatagattctggagaaattgatgtgggaaggcgagcttcccagaagattcctcctggcactttctggagatctcaagtgttcatagaccatcctgtgcatctgaaattcaatgtgtctctgggaaaggcagccctggttggcatttatggcagaaaaggcctccctccttcacatacacagtttgactttgtggagctgctggatggcaggaggctcctaacccaggaggcgcggagcctagaggggaccccgcgccagtctcggggaactgtgcccccctccagccatgagacaggcttcatccagtatttggattcaggaatctggcacttggctttttacaatgacggaaaggagtcagaagtggtttcctttctcaccactgccattgccttgcctccccgattgaaagagatgaaaagccaggaatcggctgcaggttccaaactagtccttcggtgtgaaaccagttctgaatactcctctctcagattcaagtggttcaagaatgggaatgaattgaatcgaaaaaacaaaccacaaaatatcaagatacaaaaaaagccagggaagtcagaacttcgcattaacaaagcatcactggctgattctggagagtatatgtgcaaagtgatcagcaaattaggaaatgacagtgcctctgccaatatcaccatcgtggaatcaaacgagatcatcactggtatgccagcctcaactgaaggagcatatgtgtcttcagagtctcccattagaatatcagtatccacagaaggagcaaatacttcttcatctacatctacatccaccactgggacaagccatcttgtaaaatgtgcggagaaggagaaaactttctgtgtgaatggaggggagtgcttcatggtgaaagacctttcaaacccctcgagatacttgtgcaagtgcccaaatgagtttactggtgatcgctgccaaaactacgtaatggccagcttctacagtacgtccactccctttctgtctctgcctgaataggagcatgctcagttggtgctgctttcttgttgctgcatctcccctcagattccacctagagctagatgtgtcttaccagatctaatattgactgcctctgcctgtcgcatgagaacattaacaaaagcaattgtattacttcctctgttcgcgactagttggctctgagatactaataggtgtgtgaggctccggatgtttctggaattgatattgaatgatgtgatacaaattgatagtcaatatcaagcagtgaaatatgataataaaggcatttcaaagtctcacttttattgataaaataaaaatcattctactgaacagtccatcttctttatacaatgaccacatcctgaaaagggtgttgctaagctgtaaccgatatgcacttgaaatgatggtaagttaattttgattcagaatgtgttatttgtcacaaataaacataataaaaggagttcagatgtttttcttcattaacc

SEQ ID NO: 169 - DNA, 4284 bp, Homo sapiens
  misc_feature (1682)..(1682): second gene starts at position 1682
atggacgtgaaggagaggaagccttaccgctcgctgacccggcgccgcgacgccgagcgccgctacaccagctcgtccgcggacagcgaggagggcaaagccccgcagaaatcgtacagctccagcgagaccctgaaggcctacgaccaggacgcccgcctagcctatggcagccgcgtcaaggacattgtgccgcaggaggccgaggaattctgccgcacaggtgccaacttcaccctgcgggagctggggctggaagaagtaacgccccctcacgggaccctgtaccggacagacattggcctcccccactgcggctactccatgggggctggctctgatgccgacatggaggctgacacggtgctgtcccctgagcaccccgtgcgtctgtggggccggagcacacggtcagggcgcagctcctgcctgtccagccgggccaattccaatctcacactcaccgacaccgagcatgaaaacactgagactgatcatccgggcggcctgcagaaccacgcgcggctccggacgccgccgccgccgctctcgcacgcccacacccccaaccagcaccacgcggcctccattaactccctgaaccggggcaacttcacgccgaggagcaaccccagcccggcccccacggaccactcgctctccggagagccccctgccggcggcgcccaggagcctgcccacgcccaggagaactggctgctcaacagcaacatccccctggagaccagaaacctaggcaagcagccattcctagggacattgcaggacaacctcattgagatggacattctcggcgcctcccgccatgatggggcttacagtgacgggcacttcctcttcaagcctggaggcacctccccgctcttctgcaccacatcaccagggtacccactgacgtccagcacagtgtactctcctccgccccgacccctgccccgcagcaccttcgcccggccggcctttaacctcaagaagccctccaagtactgtaactggaagtgcgcagccctgagcgccatcgtcatctcagccactctggtcatcctgctggcatactttgtggccatgcacctgtttggcctaaactggcacctgcagccgatggaggggcagatgtatgagatcacggaggacacagccagcagttggcctgtgccaaccgacgtctccctatacccctcagggggcactggcttagagacccctgacaggaaaggcaaaggaaccacagaaggaaagcccagtagtttctttccagaggacagtttcatagattctggagaaattgatgtgggaaggcgagcttcccagaagattcctcctggcactttctggagatctcaagtgttcatagaccatcctgtgcatctgaaattcaatgtgtctctgggaaaggcagccctggttggcatttatggcagaaaaggcctccctccttcacatacacagtttgactttgtggagctgctggatggcaggaggctcctaacccaggaggcgcggagcctagaggggaccccgcgccagtctcggggaactgtgcccccctccagccatgagacaggcttcatccagtatttggattcaggaatctggcacttggctttttacaatgacggaaaggagtcagaagtggtttcctttctcaccactgccattgccttgcctccccgattgaaagagatgaaaagccaggaatcggctgcaggttccaaactagtccttcggtgtgaaaccagttctgaatactcctctctcagattcaagtggttcaagaatgggaatgaattgaatcgaaaaaacaaaccacaaaatatcaagatacaaaaaaagccagggaagtcagaacttcgcattaacaaagcatcactggctgattctggagagtatatgtgcaaagtgatcagcaaattaggaaatgacagtgcctctgccaatatcaccatcgtggaatcaaacgagatcatcactggtatgccagcctcaactgaaggagcatatgtgtcttcagagtctcccattagaatatcagtatccacagaaggagcaaatacttcttcatctacatctacatccaccactgggacaagccatcttgtaaaatgtgcggagaaggagaaaactttctgtgtgaatggaggggagtgcttcatggtgaaagacctttcaaacccctcgagatacttgtgcaagtgccaacctggattcactggagcaagatgtactgagaatgtgcccatgaaagtccaaaaccaagaaaaggcggaggagctgtaccagaagagagtgctgaccataaccggcatctgcatcgccctccttgtggtcggcatcatgtgtgtggtggcctactgcaaaaccaagaaacagcggaaaaagctgcatgaccgtcttcggcagagccttcggtctgaacgaaacaatatgatgaacattgccaatgggcctcaccatcctaacccaccccccgagaatgtccagctggtgaatcaatacgtatctaaaaacgtcatctccagtgagcatattgttgagagagaagcagagacatccttttccaccagtcactatacttccacagcccatcactccactactgtcacccagactcctagccacagctggagcaacggacacactgaaagcatcctttccgaaagccactctgtaatcgtgatgtcatccgtagaaaacagtaggcacagcagcccaactgggggcccaagaggacgtcttaatggcacaggaggccctcgtgaatgtaacagcttcctcaggcatgccagagaaacccctgattcctaccgagactctcctcatagtgaaagacataaccttatagctgagctaaggagaaacaaggcacacagatccaaatgcatgcagatccagctatcagcaactcatcttagatcttcttccattccccatttgggcttcattctctaagaccccttggcctttaggaaggtatgtgtcagccatgaccaccccggctcgtatgtcacctgtagatttccacacgccaagctcccccaaatcgcccccttcggaaatgtctccacccgtgtccagcatgacggtgtccatgccttccatggcggtcagccccttcatggaagaagagagacctctacttctcgtgacaccaccaaggctgcgggagaagaagtttgaccatcaccctcagcagttcagctccttccaccacaaccccgcgcatgacagtaacagcctccctgctagccccttgaggatagtggaggatgaggagtatgaaacgacccaagagtacgagccagcccaagagcctgttaagaaactcgccaatagccggcgggccaaaagaaccaagcccaatggccacattgctaacagattggaagtggacagcaacacaagctcccagagcagtaactcagagagtgaaacagaagatgaaagagtaggtgaagatacgcctttcctgggcatacagaaccccctggcagccagtcttgaggcaacacctgccttccgcctggctgacagcaggactaacccagcaggccgcttctcgacacaggaagaaatccaggccaggctgtctagtgtaattgctaaccaagaccctattgctgtataaaacctaaataaacacatagattcacctgtaaaactttattttatataataaagtattccaccttaaattaaacaatttattttattttagcagttctgcaaatagaaaacaggaaaaaaacttttataaattaaatatatgtatgtaaaaatgtgttatgtgccatatgtagcaattttttacagtatttcaaaacgagaaagatatcaatggtgcctttatgttatgttatgtcgagagcaagttttgtacagttacagtgattgcttttccacagtatttctgcaaaacctctcatagattcagtttttgctggcttcttgtgcattgcattatgatgttgactggatgtatgatttgcaagacttgcaactgtccctctgtttgcttgtagtagcacccgatcagtatgtcttgtaatggcacatccatccagatatgcctctcttgtgtatgaagttttctttgctttcagaatatgaaatgagttgtgtctactctgccagccaaaggtttgcctcattgggctctgagataatagtagatccaacagcatgctactattaaatacagcaagaaactgcattaagtaatgttaaatattaggaagaaagtaatactgtgatttaaaaaaaact

SEQ ID NO: 170 - DNA, 2689 bp, Homo sapiens
  misc_feature (1682)..(1682): second gene starts at position 1682
atggacgtgaaggagaggaagccttaccgctcgctgacccggcgccgcgacgccgagcgccgctacaccagctcgtccgcggacagcgaggagggcaaagccccgcagaaatcgtacagctccagcgagaccctgaaggcctacgaccaggacgcccgcctagcctatggcagccgcgtcaaggacattgtgccgcaggaggccgaggaattctgccgcacaggtgccaacttcaccctgcgggagctggggctggaagaagtaacgccccctcacgggaccctgtaccggacagacattggcctcccccactgcggctactccatgggggctggctctgatgccgacatggaggctgacacggtgctgtcccctgagcaccccgtgcgtctgtggggccggagcacacggtcagggcgcagctcctgcctgtccagccgggccaattccaatctcacactcaccgacaccgagcatgaaaacactgagactgatcatccgggcggcctgcagaaccacgcgcggctccggacgccgccgccgccgctctcgcacgcccacacccccaaccagcaccacgcggcctccattaactccctgaaccggggcaacttcacgccgaggagcaaccccagcccggcccccacggaccactcgctctccggagagccccctgccggcggcgcccaggagcctgcccacgcccaggagaactggctgctcaacagcaacatccccctggagaccagaaacctaggcaagcagccattcctagggacattgcaggacaacctcattgagatggacattctcggcgcctcccgccatgatggggcttacagtgacgggcacttcctcttcaagcctggaggcacctccccgctcttctgcaccacatcaccagggtacccactgacgtccagcacagtgtactctcctccgccccgacccctgccccgcagcaccttcgcccggccggcctttaacctcaagaagccctccaagtactgtaactggaagtgcgcagccctgagcgccatcgtcatctcagccactctggtcatcctgctggcatactttgtggccatgcacctgtttggcctaaactggcacctgcagccgatggaggggcagatgtatgagatcacggaggacacagccagcagttggcctgtgccaaccgacgtctccctatacccctcagggggcactggcttagagacccctgacaggaaaggcaaaggaaccacagaaggaaagcccagtagtttctttccagaggacagtttcatagattctggagaaattgatgtgggaaggcgagcttcccagaagattcctcctggcactttctggagatctcaagtgttcatagaccatcctgtgcatctgaaattcaatgtgtctctgggaaaggcagccctggttggcatttatggcagaaaaggcctccctccttcacatacacagtttgactttgtggagctgctggatggcaggaggctcctaacccaggaggcgcggagcctagaggggaccccgcgccagtctcggggaactgtgcccccctccagccatgagacaggcttcatccagtatttggattcaggaatctggcacttggctttttacaatgacggaaaggagtcagaagtggtttcctttctcaccactgccattgccttgcctccccgattgaaagagatgaaaagccaggaatcggctgcaggttccaaactagtccttcggtgtgaaaccagttctgaatactcctctctcagattcaagtggttcaagaatgggaatgaattgaatcgaaaaaacaaaccacaaaatatcaagatacaaaaaaagccagggaagtcagaacttcgcattaacaaagcatcactggctgattctggagagtatatgtgcaaagtgatcagcaaattaggaaatgacagtgcctctgccaatatcaccatcgtggaatcaaacgctacatctacatccaccactgggacaagccatcttgtaaaatgtgcggagaaggagaaaactttctgtgtgaatggaggggagtgcttcatggtgaaagacctttcaaacccctcgagatacttgtgcaagtgcccaaatgagtttactggtgatcgctgccaaaactacgtaatggccagcttctacagtacgtccactccctttctgtctctgcctgaataggagcatgctcagttggtgctgctttcttgttgctgcatctcccctcagattccacctagagctagatgtgtcttaccagatctaatattgactgcctctgcctgtcgcatgagaacattaacaaaagcaattgtattacttcctctgttcgcgactagttggctctgagatactaataggtgtgtgaggctccggatgtttctggaattgatattgaatgatgtgatacaaattgatagtcaatatcaagcagtgaaatatgataataaaggcatttcaaagtctcacttttattgataaaataaaaatcattctactgaacagtccatcttctttatacaatgaccacatcctgaaaagggtgttgctaagctgtaaccgatatgcacttgaaatgatggtaagttaattttgattcagaatgtgttatttgtcacaaataaacataataaaaggagttcagatgtttttcttcattaaccaa

SEQ ID NO: 171 - DNA, 4142 bp, Homo sapiens
  misc_feature (1682)..(1682): second gene starts at position 1682
atggacgtgaaggagaggaagccttaccgctcgctgacccggcgccgcgacgccgagcgccgctacaccagctcgtccgcggacagcgaggagggcaaagccccgcagaaatcgtacagctccagcgagaccctgaaggcctacgaccaggacgcccgcctagcctatggcagccgcgtcaaggacattgtgccgcaggaggccgaggaattctgccgcacaggtgccaacttcaccctgcgggagctggggctggaagaagtaacgccccctcacgggaccctgtaccggacagacattggcctcccccactgcggctactccatgggggctggctctgatgccgacatggaggctgacacggtgctgtcccctgagcaccccgtgcgtctgtggggccggagcacacggtcagggcgcagctcctgcctgtccagccgggccaattccaatctcacactcaccgacaccgagcatgaaaacactgagactgatcatccgggcggcctgcagaaccacgcgcggctccggacgccgccgccgccgctctcgcacgcccacacccccaaccagcaccacgcggcctccattaactccctgaaccggggcaacttcacgccgaggagcaaccccagcccggcccccacggaccactcgctctccggagagccccctgccggcggcgcccaggagcctgcccacgcccaggagaactggctgctcaacagcaacatccccctggagaccagaaacctaggcaagcagccattcctagggacattgcaggacaacctcattgagatggacattctcggcgcctcccgccatgatggggcttacagtgacgggcacttcctcttcaagcctggaggcacctccccgctcttctgcaccacatcaccagggtacccactgacgtccagcacagtgtactctcctccgccccgacccctgccccgcagcaccttcgcccggccggcctttaacctcaagaagccctccaagtactgtaactggaagtgcgcagccctgagcgccatcgtcatctcagccactctggtcatcctgctggcatactttgtggccatgcacctgtttggcctaaactggcacctgcagccgatggaggggcagatgtatgagatcacggaggacacagccagcagttggcctgtgccaaccgacgtctccctatacccctcagggggcactggcttagagacccctgacaggaaaggcaaaggaaccacagaaggaaagcccagtagtttctttccagaggacagtttcatagattctggagaaattgatgtgggaaggcgagcttcccagaagattcctcctggcactttctggagatctcaagtgttcatagaccatcctgtgcatctgaaattcaatgtgtctctgggaaaggcagccctggttggcatttatggcagaaaaggcctccctccttcacatacacagtttgactttgtggagctgctggatggcaggaggctcctaacccaggaggcgcggagcctagaggggaccccgcgccagtctcggggaactgtgcccccctccagccatgagacaggcttcatccagtatttggattcaggaatctggcacttggctttttacaatgacggaaaggagtcagaagtggtttcctttctcaccactgccattgccttgcctccccgattgaaagagatgaaaagccaggaatcggctgcaggttccaaactagtccttcggtgtgaaaccagttctgaatactcctctctcagattcaagtggttcaagaatgggaatgaattgaatcgaaaaaacaaaccacaaaatatcaagatacaaaaaaagccagggaagtcagaacttcgcattaacaaagcatcactggctgattctggagagtatatgtgcaaagtgatcagcaaattaggaaatgacagtgcctctgccaatatcaccatcgtggaatcaaacgagatcatcactggtatgccagcctcaactgaaggagcatatgtgtcttcagagtctcccattagaatatcagtatccacagaaggagcaaatacttcttcatctacatctacatccaccactgggacaagccatcttgtaaaatgtgcggagaaggagaaaactttctgtgtgaatggaggggagtgcttcatggtgaaagacctttcaaacccctcgagatacttgtgcaagtgccaacctggattcactggagcaagatgtactgagaatgtgcccatgaaagtccaaaaccaagaaaaggcggaggagctgtaccagaagagagtgctgaccataaccggcatctgcatcgccctccttgtggtcggcatcatgtgtgtggtggcctactgcaaaaccaagaaacagcggaaaaagctgcatgaccgtcttcggcagagccttcggtctgaacgaaacaatatgatgaacattgccaatgggcctcaccatcctaacccaccccccgagaatgtccagctggtgaatcaatacgtatctaaaaacgtcatctccagtgagcatattgttgagagagaagcagagacatccttttccaccagtcactatacttccacagcccatcactccactactgtcacccagactcctagccacagctggagcaacggacacactgaaagcatcctttccgaaagccactctgtaatcgtgatgtcatccgtagaaaacagtaggcacagcagcccaactgggggcccaagaggacgtcttaatggcacaggaggccctcgtgaatgtaacagcttcctcaggcatgccagagaaacccctgattcctaccgagactctcctcatagtgaaaggtatgtgtcagccatgaccaccccggctcgtatgtcacctgtagatttccacacgccaagctcccccaaatcgcccccttcggaaatgtctccacccgtgtccagcatgacggtgtccatgccttccatggcggtcagccccttcatggaagaagagagacctctacttctcgtgacaccaccaaggctgcgggagaagaagtttgaccatcaccctcagcagttcagctccttccaccacaaccccgcgcatgacagtaacagcctccctgctagccccttgaggatagtggaggatgaggagtatgaaacgacccaagagtacgagccagcccaagagcctgttaagaaactcgccaatagccggcgggccaaaagaaccaagcccaatggccacattgctaacagattggaagtggacagcaacacaagctcccagagcagtaactcagagagtgaaacagaagatgaaagagtaggtgaagatacgcctttcctgggcatacagaaccccctggcagccagtcttgaggcaacacctgccttccgcctggctgacagcaggactaacccagcaggccgcttctcgacacaggaagaaatccaggccaggctgtctagtgtaattgctaaccaagaccctattgctgtataaaacctaaataaacacatagattcacctgtaaaactttattttatataataaagtattccaccttaaattaaacaatttattttattttagcagttctgcaaatagaaaacaggaaaaaaacttttataaattaaatatatgtatgtaaaaatgtgttatgtgccatatgtagcaattttttacagtatttcaaaacgagaaagatatcaatggtgcctttatgttatgttatgtcgagagcaagttttgtacagttacagtgattgcttttccacagtatttctgcaaaacctctcatagattcagtttttgctggcttcttgtgcattgcattatgatgttgactggatgtatgatttgcaagacttgcaactgtccctctgtttgcttgtagtagcacccgatcagtatgtcttgtaatggcacatccatccagatatgcctctcttgtgtatgaagttttctttgctttcagaatatgaaatgagttgtgtctactctgccagccaaaggtttgcctcattgggctctgagataatagtagatccaacagcatgctactattaaatacagcaagaaactgcattaagtaatgttaaatattaggaagaaagtaatactgtgatttaaaaaaaact

SEQ ID NO: 172 - DNA, 9124 bp, Homo sapiens
  misc_feature (848)..(848): second gene starts at position 848
atgagtaaaaagcccccaaatcgccctggaatcacttttgagattggtgctcgtttggaggcactggactacttacaaaaatggtatccatcacgaattgaaaaaattgactatgaggagggcaagatgttggtccattttgagcgctggagtcatcgttatgatgagtggatttactgggatagcaatagattgcgaccccttgagagaccagcactaagaaaagaagggctaaaagatgaggaagatttctttgattttaaagctggagaagaagttctggctcgttggacagactgtcgctattaccctgccaagattgaagcaattaacaaagaaggaacatttacagttcagttttatgatggagtaattcgttgtttaaaaagaatgcacattaaagccatgcccgaggatgctaaggggcaggtgaaatcccagcatccactaagctggtgttgtcctatcgacccagctggatcgtgtaaccagtctatgggaagtgaggattggatagctttagtcaaagcagctgctgcagctgcagccaagaacaaaacagggagtaaacctcgaaccagcgctaacagcaataaagataaggataaagatgagagaaagtggtttaaagtaccttcaaagaaggaggaaacttcaacttgtatagccacaccagacgtagagaagaaggaagatctgcctacatctagtgaaacatttggacttcatgtagagaacgttccaaagatggtctttccacagccagagagcacattatcaaacaagaggaaaaataatcaaggcaactcgtttcaggcaaagagagctcgacttaacaagattactgcatcatctgagggttctccataaacacggttagccttccaagctgctgtcctgccagttgatatgaacatggcctgttcctcacagaaagactaacccatggcactgccagaagatatccttggatcgtggacagattaactggattaactgaaaaaagcacccattcagtcaatattatgggttttggaaaaatcttgctttgctgtggatttaaaatgaggtgcataatataatgccaactcattccaagtggtcattggcagaccattagctggaaaattgcttccagttttcatcactgtgcataactcaagttccctttggggagctgtctgtgcccttcactagaagtcctgttttagcatggcaactactggattattttattatgtgtgcagatggcatgatgttttagaaaaaaaaaattacagcaattctgcaatctcagtggaagtgttcacaatattatgccctggtaggaatgtaaacacgtctcgattatgttagttatgatgtctaaaggtatactgtccaactcttaagcactttatatgagaacactacaccaagatgaatcagcacattcagcacatgtgagaaatcaagtattttctttttatttttataaatcttagtggtttttttttttccggctcagactgtccaagacaaactccactactcgcatatccccagttgtttgtggtaggttgatgtaaatatggccacaatactgttagacttcacctccagatactttattgaacaactggtttacttctagcaccaaagggaagaagaagggggtccagtgatggtgatatcttagcttgcttctttgttcacaggcactattgaccacatgaacatacaggtactcaaatacaggaggcttctatttggctcctccaagggaggagttcctccaagggaaaaaaggggatggtattcttttaatcaaagaccatggtggatggatggtaagggcaacagaatgcaattcttttgtgtggtctgacgttaacacttcggaaaaaattctaagtcaagttgaaatcgccattctctcaagagagaaacatcaagagagaaacatcaagtgaccccactatgtgcctagagaaggaaaagggtcaagtcctatactaggttccttacttagggtagaacctactagtcccttgttaatcctttctgggattatacctgtgactaatttttttttttttaactatgtcttacgacaaagcacagtcctgggaaaccagtcaacttaattattgcttgtctttgagcattagagacatgttcatattgacttgctacataacactgtagcatgttttttcctgaaaatatcaagttggttgaatggaaagctcagcaaagtatgttctgtgtgcccactgtcccagcctgggactgacgggcatcagaggctttgctttaaaatatgggtaaccagttctggaagacttccaacgcaagcaagcttggtgttttagggtgtctccagatacataagcattgtctgcctccgctcagggtctcaggaaatacacagcccattggaaaccacccacgcctgagatttggaaacctgacggaaagggaggaaggtccaaatgagtcagcagcaggatgactcaccacaagcctggcaggctgcagagccagagaagggggcttccaacaaggaactcagagaagttgcagtcaccaccaagatctggcccttcggcaggtcagcaccaggactgccaggccctctgcagaccgtaattctcttcacatctataattaggaggccaaactccagctgccaacacccttggacacaatattccagtctccactgcccatctcatgtggttcagttctaatagcaggtcttcttcttcctttcattccttcctttattcagcaagcatttgttgagcatctactatgtgccaagcattgtgcttgggcaacaacagtccacaaagcagactccccacctgcccttatgaaactgtatctcctcctccccaacattatcaccaccccaccatttccacaatgaaaactgaattcagacagcattctccattctgccagagtaacctaggaagaagaacatggcagcagacggatcctcagggaggaggcagcagagtgacagatggtaaactgcatcaggccacatatttgcacctttcagatacagccaactcttccagggcctagactgagctggttggagctccccaaagcagcattcagttgcttttccttgatatccaccctggctacctatattccctttctttatataggcacaaccattcaccactacgctggattatctaacactccaattctataactcatccaggggacacacagttgagtctgatgaagcctaagaactgccaggtgctgagatattgtaactgggaattaagatttagccaaggacattgtgagactactgctgactctcttggaaaactggacatgctttgtagtgcaaatgttcactaaatgatggtggttcattgttacttactttggcctttgcaaaatattctgaacaattcaataagtagagtttcctagtttgtttgtttttttaagtcaaaggaacgctgtgaaattattgaaagatgatgggtgaagagggacctaggagaaggcaaaatgaagaccattaaagagccccattgaagactgtatctctaaaaatgccttaatgcctggcacatattccatatttgcatatgaactactattcttttccaaactgtcaacttctgtttgaaatcattgtgggggatagtttggaaatatggtggcataaaatccaagcagtcaagagctaaaccagcaaaaaagaggaatgacttcattcacaggctttggcttctttattatgtggtggtcctctgtgatctcccatggttaacttcaactgtgctgtactttcttcccaagatgcatgtacggaatgttacctcctagaaatccagaaatagttgtggtgagttttgtttgataggaagcaagaggtggggaagtaaaggatacatatttttatgtctaaggactgtaaactgttgatgcttgacttttccttttacctacacctgtgctacacctttattaaaaggctgacacccagacttgtgcaggaaaggcactcttgggaatgaacagaaatgaataattatgagactttccatggtgccaaggggattcgcttatttccactccagaactgaatatgcagagcattgccagtcctgctagtgtgaaaagcaaattacttcaatagtttgagacgtacctaggggaagagagatcctatcaactttctttgcgggtagtggcgtaccttcaaatccttgctcaggctctgtgaggtgtgcacccgcagatttcacttctacctccggaatcctggcaaacaagccaggaatctctccagagtcacttcgcagttgctcagaaagaggctaacggtccttagtcctgaggaaattctgccatttttaacattcaaggagaaaaggcgtatcagctgtacgtgagaatatcaactaaggataaaaacctctaatggatcccccttgttacttgcaaatgctttctttgtctgcaaatgtcacataattgattttgcataggaacaacaaaagtctcaaggaattgaagtttttaataccccccttagcactttactttcaccaaaacctcctctttctagtacatgagcagttttgttctttgtgatgttttcctctacattctttagaataattttgttacttgacaactagacttgtcaatcgtcttagactcttttgaaaaatctaatctttgaaaatgacacaaattcctttattgctttaaggctgttttcattcacccctcccacagccccctccactgcacttttttgttttttgcggggatttttttctttcatctctcttcttttaacatgatgctgtgggtagttttcaagaattctataaagaactcaacaaaaagtgtatttgttacctttttccccagtcctaatatttcttcttaagcttgatcttggtgaaaatttgttgcccaaaaagcagtgaggtagggattaataacgctgaccagtcatctggaagattaattaatcccagtgcagccctgagatcaggaaggaggacaggccaggagatgtttctactccaggcaccactaaggactctatttcaaaggcagatcctgctccttagtctttttagatctgaatctaatcctgaatccagaaaattatcctatgaattctggtttatcaacgcacatgattcctggcaccattgcatagcttcaaggtaaaagagagccttgtttccattattttgctatggtggcttttgggaagacagagagcattcttttgaaagcgggaaacttaaggaaaagttggccaagtacacaggaaagttctaccacaccttaatataaagaacaaaatagatgcttctcatttggggaaagtagctaaaaggacagtaacagtactgatggccttctgtccatcaccttagctccacagggaaaattctgggtgagagcaagcactgtttctaaaatctaaattttttcaggtgaaatttaccagcaacaaatgtaaaagggaactgccatcaggcatagggctagttttatacttcctgcctaacggcaaaatgactgagacatgacttccatggaacagcagaaaatggatgccaaagatatcataaaactgaagttcaatttgccacgtaaggctatttaaaaaccctgatgcactccaagcattcttccttcagagctttcctcctacaattatatcaagcacaagaaggcaccaacagcatatacttaatgtaatgtaaaagtaaacatatgacttgtgttgaattaccattggctggttgacataataagtgtcatagatatttagacattatttctgatcatacaaaattattttcataatttcatattcttttcaattttcataaattcttttcaattttcataaattggagccaatggtttgggaggttttttgtttgtttgtttgtttggttggttggttatttgttgcgttgttgttttccaaacctcagatattttgagaagccttagaaaggctcttaagcccaggcctttttgcctcatgtgcagagtattaataacagccctactgatgtgaacctcaaggaaggaggctattaaattaatccatcactggagatactaatacctcaaacaattaaaacactgaagactctgctggttgccttccacattgtttataacctttttaaattcagtcatttggatcaagagaaataaatggttggtttcatatggcttttgccacattagcacagacacatctaccaaatgtagaagtccagactgagtggatgcatgagagcaaacagatctgtaatatgattgcatttaatcaccgccaccgcccaaattctgtaaaaatatattcaaatatgtaatgctaaaaaaaatgcaaaacaggagactcttactagatcatgctttcacttagggtaggataactgatcttgaagataacttcatagaaaaatttgctggctgaaatgccccaggcacctcagggttggtcctgtcctattccacaaactgatcatggtcttctcccatcttctcagaggagttagccttgcctctaaaatagcaaaaatgccatgaaattatctttctaacctctatagagacttcttatccaagtataattccaaaaatatgatttgagtttgagcatgcctgtggtccttgattctatgatccctaaatcagttctacttttctcactctctctctctctctctctctctctctctctctctctctatatatatatatatatatatatatatatatatatatatatatatatatatatataatctccagtattttttttcaaccacaatttagtgcatttagcgtgttaatgttgggaactgcctgctggctctatgtctacttttgacaatgcttatgtccagataccatacagtgcatttgagagaggaccaaggttatgttttcccacataccagctgctgcagaggtttcgaagtgcctgacccagttctttttcacatcaaaaaggccttcggttgcagatggaaaccttaaagatgaatgtagagtggggtaggaaattcatgtttgaatgctgaaacccttgtcttttttagttttattcaattcccacctcagatcaccagaaagggaggcctctttggtgggtgttggccctcactgggggtaaaaggggttctatttgcttaaactcatgctcgtaggcaattttagggctctctggggctctgaatggtttctccaccaccacctttcttccaccaatagaaagatgttgtccttacaaggccatgtctgagaagaccatggtttaactagtaaaagaagctcacattgcagagagctgaataataccaggctcttgactttgtactgtgtgtcacagtcatgattgggacagaaggaaccagtctgctgaaaagtcaagccagcacaaatatttggaaactaattccactgaaactcttgtatcattaaatcatactattgtagtttcagttaatgtaattatttaatatcaggcactaaattaaatagctttgcacaaaattttagaaaagatcaatcttgtaacaaaatttaatattaacagtaaaaagcacctgagaaaagaaaatatcgatctgttgtggtttatatacttgagttattcttagaactttgtggagattgacactgctctgataaaaaggaagaaaatgttttgaattcaagaatgctagactaatagaaatagcccagtctctctgggccactgctcttcagtatggggtgctctctgtccctccttagcagatggggttgtttggaggctaaaatgagctaagggaagaagctatactgtgcctccaatatcccttatgtgtaattagagtgccgatctgggctgcaggctttattcaatgattcctttcccttacttgaggctttctctgtagagctgttatttctgagcctccattctgggatttacaaaggaaacagaatgatgaagaagtaacaatcagcattttacacacacgcacacacacacacacacacacactttttctaatatatgaggctagtctgcagagtccacagcccaggtgtccatttatttccacttcttcacctcccaaagatttagagctccatgatctaccaaggtgaagactgccaatcccaggttggagaagacccgtcagagtgtggaggtgccaaactgagaggcacaggaagcagacagccacatcaaacttttttgatgaactactgcaaattggtgtttgttctaggaaagaaagaggaagaaaaattacacaatgtgaattgaacataagagcagtgctctttacagagtatgagaagggaggatgggggagaatctgattaaaaaaatgattcattccttcacagacactaacaaacatggctaaaaagcacatgtcagaacacagaagcctaggtagatggttgacatttttataacttccttaagtgagtagttaaaccagcagtcttaattctgttggtcttccaagagtgtttaattacataagtattacctgtattcatttcccacaactgttgggtttttctttctttttttttttttttttttttttcctctgtgcatcctagaaaaactcccaggactagacttaggaggaggcaatcaagttatgtggtaaaacaagagtgccttttctgttggatatccactttagtttcctggcttccagggcataagatgtttagaaactttttttctctaaacataagaattattgtgtaccacaattttgaaccaccgatttccatatcttcagcagctatcaacttgccaattccctttgggtctcctttgtatattcttatgtttccttctgtttccagttgtcctcaaaaagagttgaggggggcatgactcttataaaatggataaaaatgaaactgtacagatgtttgcctcccttgtatctgtgagcatgatctctatcaggctggaaaatctgctttatcattttgtatatttgactattttgtattcagcattacttgactccttatgtgcatggcaatgtattaaaatgtgggatttctattaccgtgtaaa

SEQ ID NO: 173 - DNA, 9124 bp, Homo sapiens; identical to SEQ ID NO: 172
  misc_feature (848)..(848): second gene starts at position 848

SEQ ID NO: 174 - DNA, 9046 bp, Homo sapiens
  misc_feature (770)..(770): second gene starts at position 770
atgagtaaaaagcccccaaatcgccctggaatcacttttgagattggtgctcgtttggaggcactggactacttacaaaaatggtatccatcacgaattgaaaaaattgactatgaggagggcaagatgttggtccattttgagcgctggagtcatcgttatgatgagtggatttactgggatagcaatagattgcgaccccttgagagaccagcactaagaaaagaagggctaaaagatgaggaagatttctttgattttaaagctggagaagaagttctggctcgttggacagactgtcgctattaccctgccaagattgaagcaattaacaaagaaggaacatttacagttcagttttatgatggagtaattcgttgtttaaaaagaatgcacattaaagccatgcccgaggatgctaaggggcaggattggatagctttagtcaaagcagctgctgcagctgcagccaagaacaaaacagggagtaaacctcgaaccagcgctaacagcaataaagataaggataaagatgagagaaagtggtttaaagtaccttcaaagaaggaggaaacttcaacttgtatagccacaccagacgtagagaagaaggaagatctgcctacatctagtgaaacatttggacttcatgtagagaacgttccaaagatggtctttccacagccagagagcacattatcaaacaagaggaaaaataatcaaggcaactcgtttcaggcaaagagagctcgacttaacaagattactgcatcatctgagggttctccataaacacggttagccttccaagctgctgtcctgccagttgatatgaacatggcctgttcctcacagaaagactaacccatggcactgccagaagatatccttggatcgtggacagattaactggattaactgaaaaaagcacccattcagtcaatattatgggttttggaaaaatcttgctttgctgtggatttaaaatgaggtgcataatataatgccaactcattccaagtggtcattggcagaccattagctggaaaattgcttccagttttcatcactgtgcataactcaagttccctttggggagctgtctgtgcccttcactagaagtcctgttttagcatggcaactactggattattttattatgtgtgcagatggcatgatgttttagaaaaaaaaaattacagcaattctgcaatctcagtggaagtgttcacaatattatgccctggtaggaatgtaaacacgtctcgattatgttagttatgatgtctaaaggtatactgtccaactcttaagcactttatatgagaacactacaccaagatgaatcagcacattcagcacatgtgagaaatcaagtattttctttttatttttataaatcttagtggtttttttttttccggctcagactgtccaagacaaactccactactcgcatatccccagttgtttgtggtaggttgatgtaaatatggccacaatactgttagacttcacctccagatactttattgaacaactggtttacttctagcaccaaagggaagaagaagggggtccagtgatggtgatatcttagcttgcttctttgttcacaggcactattgaccacatgaacatacaggtactcaaatacaggaggcttctatttggctcctccaagggaggagttcctccaagggaaaaaaggggatggtattcttttaatcaaagaccatggtggatggatggtaagggcaacagaatgcaattcttttgtgtggtctgacgttaacacttcggaaaaaattctaagtcaagttgaaatcgccattctctcaagagagaaacatcaagagagaaacatcaagtgaccccactatgtgcctagagaaggaaaagggtcaagtcctatactaggttccttacttagggtagaacctactagtcccttgttaatcctttctgggattatacctgtgactaatttttttttttttaactatgtcttacgacaaagcacagtcctgggaaaccagtcaacttaattattgcttgtctttgagcattagagacatgttcatattgacttgctacataacactgtagcatgttttttcctgaaaatatcaagttggttgaatggaaagctcagcaaagtatgttctgtgtgcccactgtcccagcctgggactgacgggcatcagaggctttgctttaaaatatgggtaaccagttctggaagacttccaacgcaagcaagcttggtgttttagggtgtctccagatacataagcattgtctgcctccgctcagggtctcaggaaatacacagcccattggaaaccacccacgcctgagatttggaaacctgacggaaagggaggaaggtccaaatgagtcagcagcaggatgactcaccacaagcctggcaggctgcagagccagagaagggggcttccaacaaggaactcagagaagttgcagtcaccaccaagatctggcccttcggcaggtcagcaccaggactgccaggccctctgcagaccgtaattctcttcacatctataattaggaggccaaactccagctgccaacacccttggacacaatattccagtctccactgcccatctcatgtggttcagttctaatagcaggtcttcttcttcctttcattccttcctttattcagcaagcatttgttgagcatctactatgtgccaagcattgtgcttgggcaacaacagtccacaaagcagactccccacctgcccttatgaaactgtatctcctcctccccaacattatcaccaccccaccatttccacaatgaaaactgaattcagacagcattctccattctgccagagtaacctaggaagaagaacatggcagcagacggatcctcagggaggaggcagcagagtgacagatggtaaactgcatcaggccacatatttgcacctttcagatacagccaactcttccagggcctagactgagctggttggagctccccaaagcagcattcagttgcttttccttgatatccaccctggctacctatattccctttctttatataggcacaaccattcaccactacgctggattatctaacactccaattctataactcatccaggggacacacagttgagtctgatgaagcctaagaactgccaggtgctgagatattgtaactgggaattaagatttagccaaggacattgtgagactactgctgactctcttggaaaactggacatgctttgtagtgcaaatgttcactaaatgatggtggttcattgttacttactttggcctttgcaaaatattctgaacaattcaataagtagagtttcctagtttgtttgtttttttaagtcaaaggaacgctgtgaaattattgaaagatgatgggtgaagagggacctaggagaaggcaaaatgaagaccattaaagagccccattgaagactgtatctctaaaaatgccttaatgcctggcacatattccatatttgcatatgaactactattcttttccaaactgtcaacttctgtttgaaatcattgtgggggatagtttggaaatatggtggcataaaatccaagcagtcaagagctaaaccagcaaaaaagaggaatgacttcattcacaggctttggcttctttattatgtggtggtcctctgtgatctcccatggttaacttcaactgtgctgtactttcttcccaagatgcatgtacggaatgttacctcctagaaatccagaaatagttgtggtgagttttgtttgataggaagcaagaggtggggaagtaaaggatacatatttttatgtctaaggactgtaaactgttgatgcttgacttttccttttacctacacctgtgctacacctttattaaaaggctgacacccagacttgtgcaggaaaggcactcttgggaatgaacagaaatgaataattatgagactttccatggtgccaaggggattcgcttatttccactccagaactgaatatgcagagcattgccagtcctgctagtgtgaaaagcaaattacttcaatagtttgagacgtacctaggggaagagagatcctatcaactttctttgcgggtagtggcgtaccttcaaatccttgctcaggctctgtgaggtgtgcacccgcagatttcacttctacctccggaatcctggcaaacaagccaggaatctctccagagtcacttcgcagttgctcagaaagaggctaacggtccttagtcctgaggaaattctgccatttttaacattcaaggagaaaaggcgtatcagctgtacgtgagaatatcaactaaggataaaaacctctaatggatcccccttgttacttgcaaatgctttctttgtctgcaaatgtcacataattgattttgcataggaacaacaaaagtctcaaggaattgaagtttttaataccccccttagcactttactttcaccaaaacctcctctttctagtacatgagcagttttgttctttgtgatgttttcctctacattctttagaataattttgttacttgacaactagacttgtcaatcgtcttagactcttttgaaaaatctaatctttgaaaatgacacaaattcctttattgctttaaggctgttttcattcacccctcccacagccccctccactgcacttttttgttttttgcggggatttttttctttcatctctcttcttttaacatgatgctgtgggtagttttcaagaattctataaagaactcaacaaaaagtgtatttgttacctttttccccagtcctaatatttcttcttaagcttgatcttggtgaaaatttgttgcccaaaaagcagtgaggtagggattaataacgctgaccagtcatctggaagattaattaatcccagtgcagccctgagatcaggaaggaggacaggccaggagatgtttctactccaggcaccactaaggactctatttcaaaggcagatcctgctccttagtctttttagatctgaatctaatcctgaatccagaaaattatcctatgaattctggtttatcaacgcacatgattcctggcaccattgcatagcttcaaggtaaaagagagccttgtttccattattttgctatggtggcttttgggaagacagagagcattcttttgaaagcgggaaacttaaggaaaagttggccaagtacacaggaaagttctaccacaccttaatataaagaacaaaatagatgcttctcatttggggaaagtagctaaaaggacagtaacagtactgatggccttctgtccatcaccttagctccacagggaaaattctgggtgagagcaagcactgtttctaaaatctaaattttttcaggtgaaatttaccagcaacaaatgtaaaagggaactgccatcaggcatagggctagttttatacttcctgcctaacggcaaaatgactgagacatgacttccatggaacagcagaaaatggatgccaaagatatcataaaactgaagttcaatttgccacgtaaggctatttaaaaaccctgatgcactccaagcattcttccttcagagctttcctcctacaattatatcaagcacaagaaggcaccaacagcatatacttaatgtaatgtaaaagtaaacatatgacttgtgttgaattaccattggctggttgacataataagtgtcatagatatttagacattatttctgatcatacaaaattattttcataatttcatattcttttcaattttcataaattcttttcaattttcataaattggagccaatggtttgggaggttttttgtttgtttgtttgtttggttggttggttatttgttgcgttgttgttttccaaacctcagatattttgagaagccttagaaaggctcttaagcccaggcctttttgcctcatgtgcagagtattaataacagccctactgatgtgaacctcaaggaaggaggctattaaattaatccatcactggagatactaatacctcaaacaattaaaacactgaagactctgctggttgccttccacattgtttataacctttttaaattcagtcatttggatcaagagaaataaatggttggtttcatatggcttttgccacattagcacagacacatctaccaaatgtagaagtccagactgagtggatgcatgagagcaaacagatctgtaatatgattgcatttaatcaccgccaccgcccaaattctgtaaaaatatattcaaatatgtaatgctaaaaaaaatgcaaaacaggagactcttactagatcatgctttcacttagggtaggataactgatcttgaagataacttcatagaaaaatttgctggctgaaatgccccaggcacctcagggttggtcctgtcctattccacaaactgatcatggtcttctcccatcttctcagaggagttagccttgcctctaaaatagcaaaaatgccatgaaattatctttctaacctctatagagacttcttatccaagtataattccaaaaatatgatttgagtttgagcatgcctgtggtccttgattctatgatccctaaatcagttctacttttctcactctctctctctctctctctctctctctctctctctctctatatatatatatatatatatatatatatatatatatatatatatatatatatataatctccagtattttttttcaaccacaatttagtgcatttagcgtgttaatgttgggaactgcctgctggctctatgtctacttttgacaatgcttatgtccagataccatacagtgcatttgagagaggaccaaggttatgttttcccacataccagctgctgcagaggtttcgaagtgcctgacccagttctttttcacatcaaaaaggccttcggttgcagatggaaaccttaaagatgaatgtagagtggggtaggaaattcatgtttgaatgctgaaacccttgtcttttttagttttattcaattcccacctcagatcaccagaaagggaggcctctttggtgggtgttggccctcactgggggtaaaaggggttctatttgcttaaactcatgctcgtaggcaattttagggctctctggggctctgaatggtttctccaccaccacctttcttccaccaatagaaagatgttgtccttacaaggccatgtctgagaagaccatggtttaactagtaaaagaagctcacattgcagagagctgaataataccaggctcttgactttgtactgtgtgtcacagtcatgattgggacagaaggaaccagtctgctgaaaagtcaagccagcacaaatatttggaaactaattccactgaaactcttgtatcattaaatcatactattgtagtttcagttaatgtaattatttaatatcaggcactaaattaaatagctttgcacaaaattttagaaaagatcaatcttgtaacaaaatttaatattaacagtaaaaagcacctgagaaaagaaaatatcgatctgttgtggtttatatacttgagttattcttagaactttgtggagattgacactgctctgataaaaaggaagaaaatgttttgaattcaagaatgctagactaatagaaatagcccagtctctctgggccactgctcttcagtatggggtgctctctgtccctccttagcagatggggttgtttggaggctaaaatgagctaagggaagaagctatactgtgcctccaatatcccttatgtgtaattagagtgccgatctgggctgcaggctttattcaatgattcctttcccttacttgaggctttctctgtagagctgttatttctgagcctccattctgggatttacaaaggaaacagaatgatgaagaagtaacaatcagcattttacacacacgcacacacacacacacacacacactttttctaatatatgaggctagtctgcagagtccacagcccaggtgtccatttatttccacttcttcacctcccaaagatttagagctccatgatctaccaaggtgaagactgccaatcccaggttggagaagacccgtcagagtgtggaggtgccaaactgagaggcacaggaagcagacagccacatcaaacttttttgatgaactactgcaaattggtgtttgttctaggaaagaaagaggaagaaaaattacacaatgtgaattgaacataagagcagtgctctttacagagtatgagaagggaggatgggggagaatctgattaaaaaaatgattcattccttcacagacactaacaaacatggctaaaaagcacatgtcagaacacagaagcctaggtagatggttgacatttttataacttccttaagtgagtagttaaaccagcagtcttaattctgttggtcttccaagagtgtttaattacataagtattacctgtattcatttcccacaactgttgggtttttctttctttttttttttttttttttttttcctctgtgcatcctagaaaaactcccaggactagacttaggaggaggcaatcaagttatgtggtaaaacaagagtgccttttctgttggatatccactttagtttcctggcttccagggcataagatgtttagaaactttttttctctaaacataagaattattgtgtaccacaattttgaaccaccgatttccatatcttcagcagctatcaacttgccaattccctttgggtctcctttgtatattcttatgtttccttctgtttccagttgtcctcaaaaagagttgaggggggcatgactcttataaaatggataaaaatgaaactgtacagatgtttgcctcccttgtatctgtgagcatgatctctatcaggctggaaaatctgctttatcattttgtatatttgactattttgtattcagcattacttgactccttatgtgcatggcaatgtattaaaatgtgggatttctattaccgtgtaaa

SEQ ID NO: 175 - DNA, 1143 bp, Homo sapiens
  misc_feature (808)..(808): second gene starts at position 808
atgtcgtccaactgcaccagcaccacggcggtggcggtggcgccgctcagcgccagcaagaccaagaccaagaagaagcatttcgtgtgccagaaagtgaagctattccgggccagcgagccgatcctcagcgtcctgatgtggggggtgaaccacacgatcaatgagctgagcaatgttcctgttcctgtcatgctaatgccagatgacttcaaagcctacagcaagatcaaggtggacaatcatctcttcaataaggagaacctgcccagccgctttaagtttaaggagtattgccccatggtgttccgaaaccttcgggagaggtttggaattgatgatcaggattaccagaattcagtgacgcgcagcgcccccatcaacagtgacagccagggtcggtgtggcacgcgtttcctcaccacctacgaccggcgctttgtcatcaagactgtgtccagcgaggacgtggcggagatgcacaacatcttaaagaaataccaccagtttatagtggagtgtcatggcaacacgcttttgccacagttcctgggcatgtaccgcctgaccgtggatggtgtggaaacctacatggtggttaccaggaacgtgttcagccatcggctcactgtgcatcgcaagtatgacctcaagggttctacggttgccagagaagcgagcgacaaggagaaggccaaggacttgccaacattcaaagacaatgacttcctcaatgaagggcagaagctgcatgtgggagaggagagtaaaaagaacttcctggagaaactgaagcgggacgttgaggggaaagttggggacatgctgctacaatacggctaatctttcattgggaccgaaagcaaaggttggcaacattgtacaagtcacccagccagaaggaatgcacagtactgtttcaaatcaaacctcagggatttagagatactgttgttacttctgcatgttcattgcaaacagaaggttccttgagcacccggaaacggtcacgagacccagaggaagaattataacccagaaacaaatctcaaagtgtacaaatttattgatgttgtgaaatcaatgtgtacaagtggacttgttaccttaaagtataaataaacacactatggcatgaatgaa

SEQ ID NO: 176 - DNA, 5722 bp, Homo sapiens
  misc_feature (243)..(243): second gene starts at position 243
atggcagcctgtacagcccggcggcccctggccgtgggcagccgctggtggtcccggtcgctgactggggcccggtggcaaagccgctctgtgcggcggccggagctggagccttctcgccagcgtcgaccacgacgacgcggaggcacctctcgtcccgaaaccgaccagagggcaaagtgttggagacagttggtgtgtttgaggtgccaaaacagaatggaaaatatgagaccgggcaggttgaactaaaacgacaatacaatgaccaccattcaaaattgagaggtcttctacctggccgtcagtggtatgaaattcaagcatacagggccttaaaccaggcccttggtagatgtattagacacagaaatgattggggagctcttattctagtggatgatcgctttaggaataacccaagtcgctatatatctggactttctaaatgggtacggcagcagattcagcaccattcaacctttgaaagtgcactggaatccttggctgaattttccaaaaagcatcaaaaagttcttaatgtatccataaaggacagaaccaatatacaggacaatgagtctacacttgaagtgacctctttaaagtacagtacctcaccttatttactggaagcagcaagtcatctatcaccagaaaattttgtggaagatgaagcaaagatatgtgtccaggaactacagtgtcctaaaattattaccaaaaattcacctctaccaagtagcattatctccagaaaggagaaaaatgatccagtattcctggaagaagcagggaaagcagaaaaaattgtgatttccagatccacaagcccaactttcaacaaacaaacaaagagagttagctggtcaagctttaattctttgggacagtattttactggtaaaataccgaaggcaacacctgagctcgggtcatcagagaatagtgcctctagtcctccccgtttcaaaacagagaagatggaaagtaaaactgttttgcccttcactgataaatgtgaatcctcaaatctgacagtaaacacatcgtttggatcatgccctcaatcagaaaccattatttcatcattaaagattgatgccacccttactagaaaaaatcattctgaacatccgctctgttctgaagaagccctggatccagacattgaattgtctctagtaagtgaagaagataaacagtccacttcaaatagagattttgaaacagaagcagaagatgaatctatctattttacacctgaactttatgatcctgaagatacagatgaagaaaaaaatgacctagctgaaactgatagaggaaatagattggctaacaattcagattgcattttagctaaagacctttttgaaattagaactataaaagaagtagattcagccagagaagtgaaagctgaggattgcatagatacaaagttgaatggaattctgcatattgaagaaagtaaaattgatgacattgatggtaatgtaaaaacaacttggataaatgaactggaactgggaaaaactcatgaaatagaaataaagaactttaaaccatctccttccaaaaataaaggcatgtttcctggttttaagtaataatacttaactctcaagctaagtaaaaatatgtcatcatgcttatgttaaactctgttgtaagtaataatttgtaaattgaataagtggcatactttttaaaaaactattttatgttcagaaatgtaaatgttattattcttgagtttttgggtttttttttttgagacagagtcttggtctgttgcccaggctggaatgcagtggtgtgctctgggctcactgcaaccttcacctccaggttcaagtgattctcctgcctcagccttctgagtagctgggactacaggtgtgcaccaccatgcccagctagtttttgtatttttagtagagatggggtttcaccatgttggccaggctggtctcgaactcctggcctcgtgatctgcccttctctgcctccctaagttgctgggattacaggtgtgagccacagtgcctggcccattcttgagttttgataaagtaattcatacaaagtactgtcctcaaataagtcttccttagctaaatgcaatttaaaattattcaaagatcctagggcacttctagtttcacgtaaatattcatattaggtggttctcttcatccatttgttttcacactgatacataaaaattaacagcagtctaatctagtgacacctcagtcatatttcgctatagattttacctcaaatcagtccaagactttttcagagatcaccatttgtcttgaaaggtttatttcgttattaaactgcctacttataagtaattaagagaaattaagaaagtagtatgcatttttaattgaaattgttttacattctttgtataataaacctaaaaccaaacatgtcataaacaaattgacgtaaagatataaaatgccaaatgaagtattccaaattttctattctaattatttagcttcaccatcattgtggaaaaaaatactagatcctgcttagtattatatatttttcctagtggatcagtgagtaataagtaccaaacactagactagaaggtaatttctacattgtttagaaagggtgaaacaatttatcccctctggtattgttctagcataagctttagttatacaatgattaagatagaaaacttcatatataaatttgataagcaaacccacatttatagctgcagctaaaatatgtttccttagggcacagtaatcctttctgtgaattttgaccttgtttgtgtttttgtgaatgaagctatatgtctaatcaaaaatgattataaaagaggctcatctctgacatcattccaaaaatacattcattgatctctttttaagaaacatctgttattcactgggcattgggactttttgtgagtaatttgaattgaaattttatgagctatccaagaattctgtatggtctattattttcaagtcaaaatttccagtaaggatttactttacatttcatttggataaatgaatcattatataggtatgtctttgcttccattttgagacatttagatttttacagcctgtttctatagcatttgatgttacaactctaagcgtagttcaaagacatttaaattgacaagttaccagttaaagaatttagaatatattagatcccatctagtattatatattttttctagttgatcattgagcagtaaataccaaatactcgattagaaggtaatttttacattgttttgaaagggtgaaacaatttatctcctctggtattattcttaaaccacagatagggatagtagggtagtgaaacgaataaatacctggtagaagacaagagacttgggctctacacctggctctgccactgatttgctaagtcatattggcaatcaccacacccttcagggaattagtttcatctgtaaaatgcagcggttagtactataaaatcatacaaatttctttgtgctttgagaatctataaaggaatgtctgttgatattctgagtcgattttcatttgcttttgttccagaacggttaaaataaagcatattatttcatttaaaaagtaaagtggctcttactcatttacatttagggaacgatggtgacgtggtttggctatgtccccagccagatctcatcttgaattgtagttcccataatcccgacgtgttgtgggaaggacccagtgggaggtaattgaatcgtgggggcggttaccctcatgcggttctcgtgatactgagttcttatgagacctgatgattttataaggagcttttccctgcttcactctcattcttctctcctgctgccctgtgaaaagttgccttccgccatgattgtaagtttcttgaggcctcctcagtcatgcagaactgtgagtcaattaaacctctttcctttataaattacccagtcttgggtatgactttattagcagcatgagaacagactgacacagatggtatatgtgcataataacttggaaagctagatatttattttcgcaatgctacaattaaaacattttgaggacttttaaaattacctttagggccaggcgcggtggctcacgcctgtaatcccagcactttgggaggccgaggcgggcggatcacgaggtcaggagatcgagaccatcctggttaacacggtgaaaccccgtctctactaaaaatacaaaaaattagccaggcgtggtggcgggcgcctgtagtcccagctactcaggaggctgaggcaggagaatggcgtgaacccgggaggtggagcttgcagtgagccgagattgcgccactgcactccagcctgggcgacagagcgggactccgtctcaaaaaaaaaaaaaaaaagaaattacctttagaattggtaaactacatgagaaaattaagcatattattcatatcttagtgttattacccaacttcatctccaatactttcccctttccctagctagatatgtttttgtttgtttgttttagacagtcttgctctgtcgctcaggctggagtgcaaaggcacgatcttggctcactgcaacctctgcctcgcaggttaaagcgattctcatgtctcagcctcctgcgtagctgggattacaggtgtacaccactgcacccagctaatttttttttttttttttttttaagtatcgacagggtttcaccatgttggccaggctggtctcaaactcctgacctcaagtgatctgcccacctcggcctcccaaagtgttgggattacaggcgtgagccaccatgcctggcctagatattttttattctttccaaaatttaattctccctgaagttaaaaattttcattactgagaatgtacatagagatgtgtcacaaccctttagtaattccaaaaggtgtttcaaaaattttatacaatgataatcactgttgaaacaggtgtatattctcctcagatcatgactgaccaagatgatattccaagaagtaaactactggcctttatagagtaggatgtaggccattttcattactgataacatacttttaaaagaaatgtttacagatttaaataagttaaaacatctaaatgcttttaaaagagcacctggcacattgcaagttattcattattaattagtagatgaatcatatatctggagtgcacccttgctctatatgaaagcttccctaactatagatatataggtgatagactgacaataaagatttgaggaaagaaaaattatttggctggcttattttttaagcttttgagatgtataaggtagagattgtttatcaaataatttatgtgacacattcaatgcatatgaaataattatctaatactgaatttattcaaggactgaaagtatatagagcacacaggctgcaaaccaggaaaactaccagttagagacagggctttattcttggaataaaggtacaatgtaaagagtagatgtttcatgacttgattaaattatttaaaactgtctagaattgtgttataaaactattactatgtttctatgcacttagttattacatgggtttaaatttggcactgtttctaagtttctataaggctttgttgttaagatctttctattcaaaacattaattttaacaaaaagcttttccccgttatttttctgca

SEQ ID NO: 177 - DNA, 6211 bp, Homo sapiens
  misc_feature (292)..(292): second gene starts at position 292
atggcggaactggagcacctaggagggaagcgggcagagtcggcgcgaatgcggcgggcagagcagcttcggcgctggcggggctcgctgacagagcaggagcctgcggagcgacgaggcgcggggcggcagccgctgaccaggcgcgggagccccagggtccgcttcgaggacggtgctgtctttctggccgcctgctctagcggggacaccgacgaggtgagaaagcttctggcaagaggtgctgatatcaacacggtcaacgtggacggcttgacagccctgcaccaggcagtcgatgatgtgaagaaaggttacatcaaagcagaagaaaagtcctatcaattacagaagctatacgaacaaagaaaaatggtcatgtacctcaacatgctaaggacttgtgagggctacaatgaaatcatctttccccactgtgcctgtgactccaggaggaaggggcacgttatcacagccatcagcatcacgcactttaaactgcatgcctgcactgaagaaggacagctggagaaccaggtaattgcatttgaatgggatgagatgcagcgatgggacacagatgaagaagggatggccttctgtttcgaatatgcacgaggagagaagaagccccgatgggttaaaatcttcacgccatatttcaattacatgcatgagtgcttcgagagggtgttctgcgagctcaagtggagaaaagaggaatattagttagagactgattatctcatgtgagccaggacattcttccagcaaggttggcctctggatggtgaacgggctgtgcaaaaaagccctgcttcttcccttgtctagagggtggacattggctacaggctcttccatctctcatgacttcatggaccctcctctgccagttttttaaatcagatcaccctccatgttgttcctgacccacaggggaagctgtcctcagttgtagccgtcttgactggatgagtcctggcagtctttctaggcgaaccaagaatgtttgtgtgagggaaggtgtttgctgttgctttactgctgtctgtatgtgccagtgctggaacagaatttggaagattctgaataattagttacttattctcaaagaaaatctttgaaagaatcaggaggtcaagtcaagaacatgaaaatttatattttagtacagtagaaagaacattgggctctgggaattttatctgggttttctcctggcttttttttccctctgtgtaattttgggtaaatcagcctccctagctttcagttttctcttctgtgaaacaggaagactgaaccacgtaattaatatccaaggtcccttccggctctaaaaggctatgattctagatgagaagttatatcaagaaagatgtggccaatcagattgagtcatccaggcatacctttttagcttctgtttgtggagttgtctccagataagaggagatgtgccttcccaataactctttttttttttcctttcagaacattttccagatggcgaggtcacagcagagagatgtggccacctagcctttccttatccccttcccttcccttcacccccatcctcttactcctttcatgtcccatttcagacagagtaaccattaacaaaaaagaagagaaaaagttaaagtcgttatattcaaaagccctaaactaaatattattaataaccccctctgaatttcatgtctctggaattgaggtggtagtgaacagcagatcggtcagcaccagaagtcaactgagttaaggcaggaaaagaaataagcccaaccaacttgccaaaggtatctttgtcctttcacctgggcctcataccaacagcctctccttgtactatatttttaaaactggaactatgaacttcatccatttgcactgttcagacatatatatgtatgtatgtaaaaattatatatacacaaattagctgcacgtatatacatatatatatttctttttaaatttcatattgatggcagtaccttttttagcttgtgtttttacacacctttcactagaatccatgacctccctcgtgctctctttcttttgaaacaaactttaaaaaggaaaaaaaagcattttacagggaaaaatacctctcctcatgaaggacttgaaaagtttacaacctgcttggatttttgcccctttttttgtattgagtatagattccggctcatgggttgccatagagtctaggaacaaggagtatagtttctttatcttccaagagggtgctggggaggagaaagaggtgtgtttctcaaggttaacaggctgtagttctgcagggagagcctgaagtcctggtatgggctcttgattctgtgacaatttttttgatccatctatttctctcactcctggctttctagccacattctgcacctccttcctgctttcctagagcctcggtatgctttccctcaaccgaccctggctcaggaggttgatgccatgggaacctgaacctgaaacacttcatggtagtaatttcctgttttccttgccttttttttttttttttttttttttttctgagacagggtcttactctgtcgcccagactggaatgtggtggcatgaacatagctcactgttaccttgaattctgggctcaggtgatccttccgcctcaccctcctgagtagctgggactacaggtgtgcaccaccacacctggctaattcttcttaaaatttttttgtagagacagggtctcactatgttgcccaggctggtctcaaactcctggcctcaggtgatcctcttgtctcagcctcccaaagtgctgggattacaggcatgagccactgtgtccttccctgccttttttgcagcagggatagtactcaggaccagagttaagctgataccttaggcacacaggttggacttacatagaggaaagaaagcaagaaatgccctatgtacatgaggttttacctcctccattcctgaccaataaccacccataactacggcattctctgtgacttccttaaacagcagtgatgggaagggatccaatagtatcttcaaggccttggggaaacttgcagtgggtcagtggtctgtgccaaccaaacgatagccccatccaagccagctgagaacctaggaaggagtagtaggaatatggttgattagattggatctcccaagttttaattgaaaggagactgaacgaaaacctttctgctttctgtccgttaaagagctcctcatctgatcttgcagctagaccctttgagacttaagagctgcatcccaggatcagaagccagggctaattggggtaggacaatattcccagcccctaagctctgtagataatgcataagaagcaccaagtcaggctcagatgcaactaaaacacatctttgagccttttctttttcccttctcccctttctaaacaaaaaccttcctaggatggcatcttttgctctaactgggagacagtcataattggttgtagtcaattctactaagcagtgttggggtggttggaaagtctcttttttgtaatttgtttttgcaaatcattgtgaggccactttttctttctttctttctttctttctttctttctttctttctttcgttctttcgttctttcgttctttctttctttctttctttctctttctttcttttgctttccttctttcatctcttttttgtaatttgttgttgcaaatcattgtgaggccacttttctttccccttccttccttcctttttttctgttttttttttttttttttcccagagtcttgctctgtcgcccaggttggagtgcagtggcacgatctcggctcactgcaccctctgcctcttgggttcaagcgattctcctgcctcagcctcccaagtagctgggattacaggcatacaccaccacgccccactaattttttgtatttttggtagggcggggtttcaccatgatggccaggttggttttgaactcctgacctcaagtaatctgcccacctcggcctcccaaagtgctaggattacaggagtgagccactgcgcctggcccacttttctttctttccttcttattttgttatgctggcagccatttgcccctgcatggtatgggatcaaagaggacagcctttcctccctcaccttctccaaatctaggtgaaatcacagagtacaaaacgtgagaatgctgaatgtgtaaagttgcagagggatccctaatttgaagactttgacacagaactaacttcttttgacttaaatgaatttaaaatgagccaaaggaccctgaaaagaagacatgttgatttcccactcctagatgctaaagagacttggcaccagctttgttcaaactgtaaaaatagcaatttgcccctactcgctcagagtgggacagtagtgaacagagctgggattccatgcgacagcttgaatgctgaccttcagacatgagacatagggatttggaggccccttagaatgggtagatggtgttatgttccctttctggcatagcattcacttggtgctttggagattaggtgagggccctataggtagttggcctgttggcagaatttatttaggaacagcccttttgaaagtgtcccagtaacaacgcacccagctgcagcaaggaggtggggaaggagggcaccccaaaggacagcgccttcttctcttccacccatgcacggccttgggtgatggaggcgggttccctgtggctgcgtggatcccataggatcaagcccttctttgcatgaagcagtgttgtgactcttctctctccccttcctctgcacttcctttctgtaatccctactgttcttcttagtcccagcttctgcccagggaggcttctacccagacttcttttgcaatttgtccctgggaagagggggtctcccagtgcccccagcttcatcccagcagaaccagcaggatcctcctggtctctcactggccttcctccacacttggtttctatcctcaggggtagaagctcagagctttttatggcccaggagaaaatgtagaccctgagaaacctgtccctgcagaaaggttcccttgggccatgctttgggccctctgctctttatatgtttattctattctccatttttccaccccgtccttaccctaggcctaaacacaggtacagatatgtgcatgctcagggcagctcctaggcctggactgagctctcaggggggaattagataaatattccaacatcctcatgcctggcccatttagtttcatcctttagttacccaggccagtagctttgggttatcccttcctgtagctccaaacccagcacttggagcagcaaaatagggcactgacaggagatgaaactctctcctatctcagaatttgccaacttctgggctgggctcctaggaggtagttttcttgaaggggactgcatcctagttgacctgaattttccagaccaggagggactgctgtgctctcccttctcgccatcatactgtttggctagattcattcagcagtagaagctgtttgatctgttgaccccagcatactgctgtttcttcaccagcttcattgtgtcacagtagcttcctttgggaggatgatgtgatagaacactcagagagagggagggagaagagagatagtgggtatgcttctctagctccccatcttccaggtccacctcttgacttcctgttcccctaaacctgagcacatcacgccaggcctctttgctgccaggacagcatcagctcactcctcagcaataatctagggtatgtgggaaggtcagggctgtggtaaggaatagaatcaaagaggggagtgatacggggtgggggcacttggccgcctgctaaacttggacattaattttatatcatgacccccttttaagccagtgagctgggcttcagtttttcccaggccatgcacatttaatttatttcagagaaactctaattgtattttcactgcagtatcttgtattttttatttgtgatttaagaaatgtgaagagaaaatacacagacacaataatggctaacattgtttctttcattccttgttctagagctaaccactctaaaattgtttggtaatgtcacttagtgtaattaattgtaacatattcttttaaataaattgatttattgatcaaacactt

SEQ ID NO: 178 - DNA, 6211 bp, Homo sapiens; identical to SEQ ID NO: 177
  misc_feature (292)..(292): second gene starts at position 292

SEQ ID NO: 179 - DNA, 6211 bp, Homo sapiens; identical to SEQ ID NO: 177
  misc_feature (292)..(292): second gene starts at position 292

SEQ ID NO: 180 - DNA, 4358 bp, Homo sapiens
  misc_feature (1203)..(1203): second gene starts at position 1203
atggcactgtcaaagagggagctggatgagctgaaaccatggatagagaagacagtgaagagggtcctgggtttctcagagcctacggtggtcacagcagcattgaactgtgtggggaagggcatggacaagaagaaggcagccgatcatctgaaaccttttcttgatgattctactctccgatttgtggacaaactgtttgaggctgtggaggaaggccgaagctctaggcattccaagtctagcagtgacaggagcagaaaacgagagctaaaggaggtgtttggtgatgactctgagatctctaaagaatcatcaggagtaaagaagcgacgaataccccgttttgaggaggtggaagaagagccagaggtgatccctgggcctccatcagagagccctggcatgctgactaagctccagatcaaacagatgatggaggcagcaacacgacaaatcgaggagaggaaaaaacagctgagcttcattagcccccctacacctcagccaaagactccttcttcctcccaaccagaacgacttcctattggcaacactattcagccctcccaggctgccactttcatgaatgatgccattgagaaggcaaggaaagcagctgaactgcaagctcgaatccaagcccagctggcactgaagccaggactcatcggcaatgccaacatggtgggcctggctaatctccatgccatgggcattgctcccccgaaggtggagttaaaagaccaaacgaaacctacaccactgatcctggatgagcaagggcgcactgtagatgcaacaggcaaggagattgagctgacacaccgcatgcctactctgaaagccaatattcgtgctgtgaagagggaacaattcaagcaacaactaaaggaaaagccatcagaagacatggaatccaataccttttttgacccccgagtctccattgccccttcccagcgccagagacgcacttttaaattccatgacaagggcaaatttgagaagattgctcagcgattacggacaaaggctcaactggagaagctacaggcagagatttcacaagcagctcgaaaaacaggcatccatacttcgactaggcttgccctcattgctcctaagaaggagctaaaggaaggagatattcctgaaattgagtggtgggactcttacataatccccaatggctttgatctgtgatgaagacatatcacatgtacaatgccgacagcatcagtgctcagagcaaactaaaggaggcggagaagcaggaggagaagcaaattggtaaatcggtaaagcaggaggaccggcagaccccacgctcccctgactccacggccaacgttcgcattgaggagaaacatgtccggaggagctcagtgaagaagattgagaagatgaaggagaagcgtcaagccaagtacacggagaataagctgaaggccatcaaagcccggaatgagtacttgctggctttggaggcaaccaatgcatctgtcttcaagtactacatccatgacctatctgaccttattgatcagtgttgtgacttaggctaccatgcaagtctgaaccgggctctacgcaccttcctctctgctgagttaaacctggaacagtcgaagcatgagggtctggatgccatcgagaatgcagtagaaaacctggatgccaccagtgacaagcagcgcctcatggagatgtacaacaacgtcttctgcccccctatgaagtttgagtttcagccccacatgggggatatggcttcccagctctgtgcccagcagcctgtccagagtgagctggtacagagatgccaacaactgcagtctcgcttatccactctaaagattgaaaacgaagaggtaaagaagacaatggaggccaccctgcaaaccatccaggacattgtgactgtcgaggactttgatgtgtctgactgcttccagtacagcaactccatggagtccgtcaagtccacggtctctgaaaccttcatgagcaagcccagcattgctaagaggagagccaaccagcaagagacagagcagttttatttcacaaaaatgaaagagtacctggagggcaggaacctcatcaccaagttacaagccaagcatgaccttctgcagaaaaccctgggagaaagtcagcggacagattgcagtctagccaggcgcagctcaactgtgaggaaacaggactccagccaggcaattcctctggtggtggaaagctgtatccggtttatcagcagacacggactacagcatgaaggaattttccgggtgtcaggatcccaggtggaagtgaatgacatcaaaaatgcctttgagagaggagaggaccccctggctggggaccagaacgaccatgacatggattccatagctggtgtcctgaagctttacttccgggggctggaacaccctctcttccccaaggacatctttcatgacctgatggcctgcgtcacaatggacaacctgcaggagagagctctgcacatccggaaagtcctcctagtcctgcccaaaaccactctgattatcatgagatacctctttgccttcctcaatcatttatcacagttcagtgaagagaacatgatggacccctacaacctcgccatctgcttcgggccctcgctaatgtcagtgccagagggccacgaccaggtgtcctgccaagcccacgtgaatgagctgatcaaaaccatcatcatccagcatgagaacatcttcccaagccccagggagctggagggccctgtctacagcagaggaggaagcatggaggattactgtgatagccctcatggagagactacctcggttgaagactcaacccaggatgtgaccgcagagcaccacacgagcgatgacgaatgtgagcccatcgaggccattgccaagtttgactacgtgggccggacagcccgagagctgtcctttaagaagggagcatccctgctgctttaccagcgggcttccgacgactggtgggaaggccggcacaatggcatcgacggactcatcccccatcagtacatcgtggtccaagacaccgaggacggtgtcgtggagaggtccagccccaagtctgagattgaggtcatttctgagccacctgaagaaaaggtgacagccagagcgggggccagctgtcccagtgggggtcatgtagccgatatttatcttgcaaacatcaacaagtaagctctgcttttcattttctgctcccctgaatgacttgcaacacccagcctcaccctctggcctaacccccatctccattcctgtgctgcacgtagggctcccagctcccccagcctaacagtttgcatgtggtcattgctgctgcaaggcggacagggctgaggatgctgctacaagcctcggggcaggtccaggtctccagctagctgccctcgtgctgtggaagggtgctttactgtgtgttcccgcagtgtctgtccacccagacctttgtggcagtcttacagctaaaactttgaccaaagctttggtcactttatgcaacctggttttgtactgtttctcagaggtgccttcttttttccaatccatactcaaataatagtctttgatgtctgtcttccttgacccgtgttcgtgcaaagattcagagtctgtgtgtggcttctactaggctgatgttacaccaggtgggtttattgagatatcatgtgtctgttcctccccctgtcctgcattcactcctgtggaggaaaggaggccacgatgtccctaaggaaagctttgtcctgagctcttcattcattggctaacccctagctcccttttcttctgccctttcacaccaggagaaataattttccattttgttcctattgctttggccttttgtattattctacccccttagtccctttgcagatccccactcctgctcagcaggctcttacctctgacccccagctttcattgtggctgttagcaacatcctggggtttaaactccacccacgcccgatctggctgtctagagggattctacgcctgcgtgctgccgcctccccaagaggcattcaggttattggagaactaatctcatctcaaggggccagacaccaagtcccaaagcctacagacctctttccgccaggccctgaaacctggccccgtgccagcaggatgacaagccccagggcgctcctgatgaatatggattggagatgatgtacagtttttattcccctctggcttttgaggaatgaaatgatttgcactttgaaaacctgttaaccgtagcctctggacactgagactggaaggagaataaaggatgcttgttgtttttaaacta

SEQ ID NO: 181 - DNA, 6946 bp, Homo sapiens
  misc_feature (203)..(203): second gene starts at position 203
atggcactgtcaaagagggagctggatgagctgaaaccatggatagagaagacagtgaagagggtcctgggtttctcagagcctacggtggtcacagcagcattgaactgtgtggggaagggcatggacaagaagaaggcagccgatcatctgaaaccttttcttgatgattctactctccgatttgtggacaaactgtttgaggctgtggaggaaggccgaagctctaggcattccaagtctagcagtgacaggagcagaaaacgagagctaaaggaggtgtttggtgatgactctgagatctctaaagaatcatcaggagtaaagaagcgacgaataccccgttttgaggaggtggaagaagagccagaggtgatccctgggcctccatcagagagccctggcatgctgactaagctccagatcaaacagatgatggaggcagcaacacgacaaatcgaggagaggaaaaaacagctgagcttcattagcccccctacacctcagccaaagactccttcttcctcccaaccagaacgacttcctattggcaacactattcagccctcccaggctgccactttcatgaatgatgccattgagaaggcaaggaaagcagctgaactgcaagctcgaatccaagcccagctggcactgaagccaggactcatcggcaatgccaacatggtgggcctggctaatctccatgccatgggcattgctcccccgaaggtggagttaaaagaccaaacgaaacctacaccactgatcctggatgagcaagggcgcactgtagatgcaacaggcaaggagattgagctgacacaccgcatgcctactctgaaagccaatattcgtgctgtgaagagggaacaattcaagcaacaactaaaggaaaagccatcagaagacatggaatccaataccttttttgacccccgagtctccattgccccttcccagcgccagagacgcacttttaaattccatgacaagggcaaatttgagaagattgctcagcgattacggacaaaggctcaactggagaagctacaggcagagatttcacaagcagctcgaaaaacaggcatccatacttcgactaggcttgccctcattgctcctaagaaggagctaaaggaaggagatattcctgaaattgagtggtgggactcttacataatccccaatggctttgatctgtgatgaagacatatcacatgtacaatgccgacagcatcagtgctcagagcaaactaaaggaggcggagaagcaggaggagaagcaaattggtaaatcggtaaagcaggaggaccggcagaccccacgctcccctgactccacggccaacgttcgcattgaggagaaacatgtccggaggagctcagtgaagaagattgagaagatgaaggagaagcgtcaagccaagtacacggagaataagctgaaggccatcaaagcccggaatgagtacttgctggctttggaggcaaccaatgcatctgtcttcaagtactacatccatgacctatctgaccttattgattgttgtgacttaggctaccatgcaagtctgaaccgggctctacgcaccttcctctctgctgagttaaacctggaacagtcgaagcatgagggtctggatgccatcgagaatgcagtagaaaacctggatgccaccagtgacaagcagcgcctcatggagatgtacaacaacgtcttctgcccccctatgaagtttgagtttcagccccacatgggggatatggcttcccagctctgtgcccagcagcctgtccagagtgagctggtacagagatgccaacaactgcagtctcgcttatccactctaaagattgaaaacgaagaggtaaagaagacaatggaggccaccctgcaaaccatccaggacattgtgactgtcgaggactttgatgtgtctgactgcttccagtacagcaactccatggagtccgtcaagtccacggtctctgaaaccttcatgagcaagcccagcattgctaagaggagagccaaccagcaagagacagagcagttttatttcacaaaaatgaaagagtacctggagggcaggaacctcatcaccaagttacaagccaagcatgaccttctgcagaaaaccctgggagaaagtcagcggacagattgcagtctagccaggcgcagctcaactgtgaggaaacaggactccagccaggcaattcctctggtggtggaaagctgtatccggtttatcagcagacacggactacagcatgaaggaattttccgggtgtcaggatcccaggtggaagtgaatgacatcaaaaatgcctttgagagaggagaggaccccctggctggggaccagaacgaccatgacatggattccatagctggtgtcctgaagctttacttccgggggctggaacaccctctcttccccaaggacatctttcatgacctgatggcctgcgtcacaatggacaacctgcaggagagagctctgcacatccggaaagtcctcctagtcctgcccaaaaccactctgattatcatgagatacctctttgccttcctcaatcatttatcacagttcagtgaagagaacatgatggacccctacaacctcgccatctgcttcgggccctcgctaatgtcagtgccagagggccacgaccaggtgtcctgccaagcccacgtgaatgagctgatcaaaaccatcatcatccagcatgagaacatcttcccaagccccagggagctggagggccctgtctacagcagaggaggaagcatggaggattactgtgatagccctcatggagagactacctcggttgaagactcaacccaggatgtgaccgcagagcaccacacgagcgatgacgaatgtgagcccatcgaggccattgccaagtttgactacgtgggccggacagcccgagagctgtcctttaagaagggagcatccctgctgctttaccagcgggcttccgacgactggtgggaaggccggcacaatggcatcgacggactcatcccccatcagtacatcgtggtccaagacaccgaggacggtgtcgtggagaggtccagccccaagtctgagattgaggtcatttctgagccacctgaagaaaaggtgacagccagagcgggggccagctgtcccagtgggggtcatgtagccgatatttatcttgcaaacatcaacaagcaaaggaagcgtccagaatctgggagcatccggaaaacttttcggagtgacagccatgggctgagcagttccctgactgactcctcctccccaggggtgggggctagctgccgcccatcctcccagcccatcatgagccagagcctccccaaagaagggccagataagtgttccatcagtgggcacgggagcctcaactccatcagccgccactcatccctgaagaatcggctggatagtccacagatccggaagactgccacagcgggaaggtcaaaaagcttcaataaccatcggcccatggaccctgaggtcattgctcaggatattgaggcaacaatgaactcggccctgaatgagctacgggaactagaacggcagagcagtgtcaaacacacccctgacgtggttctggacaccttggagcccctcaaaacctccccagtggtggcccccacgtcagagccctccagccctctgcacacccagctcctcaaggaccccgagcccgccttccagcgcagcgccagtactgctggggacatcgcctgcgccttccggcctgtcaagtctgtcaagatggctgccccggtcaaaccaccagccacacggcccaagcccactgtcttccccaaaacaaatgccactagccctggtgtcaactcatcaacttccccacagtctactgacaagtcttgtactgtctgagggataataatttaattgttctagacaaggggactatagggactgactgttattaaaatcttcctatttaactagcttggggacttcagttgaaaattaggttctaagttgttcttgcaggaattagcctccccgtctcccaaaaccttgagaatgaagcccttggtatcgcctctcccttcccactgccctctgcttcccccagtcgtcgtaattcagccagctgcagtccgtaccgttcttaggttagccagagacaggttttcattatcaggtcactgtgaaatctggtaaggcagtcctgaggacatgggctcaagtctcagtcccctcagaccacggtgatgccttgaccagatggttggctactgccatccagctttcagtggcatcttgttttgggaactgattatagagaatcatatatagtccagtcttcattttacatacacacacatattttacacacacacacattttacacacacacacacacacacacacatatgtttttctagtctctggcatgtgtagcctctcctggtcatagaccagtctctttgtaagttattgtggcagttcacacagtagccaccaggggtctctgtttccattacaaactttgttctgtctgggccagagaacctagcctttgaaatctctccatcatatgaaacataacgggatgggacaatcccgtaacctgtttggggttgggggctttctctctgtgttctttccattgatgtgaattggtcattggtgtttgctcttgcctctcctccatcccctagaagtacacccccgtcttattaaggagcttttaaagtttttctgaatgtatagacatttctcgggttcctacctttgtctctgatggaccattttccatttaagacattttcctgtataagacagttttatagctggttccttttagggtaaagagtcttaagagagttttattgtgtctatggcaggtttgggaaaggtaagaaatgggtcctttttcctcctaatgtttttggcacttaaaacataaaattcattatcctattaaaaaattaaattcagctttgctaatccagaaattgttcccaaatgaaaacttgttttaagtccaccccttagtttccttattttacaaggtctctcttcagggaccaacaggggcttagagagccttagttagattaaagggagaccctacctcttaaaaccagttttcatttatgcaaacaaggacaattaagggaaccctgaccccacaggctctcaagtcttcccaaggccagaatcgaaagaaaattaaaatttgaatgctgaatattctggctctactctggccttttttctggttcccttccaaaatgcacaaatcatacccttgtctgctccaattcagtctccaaacctggtgcctgtgctcctggcccccctagcatcatgctatcccaggagtatcaggaccagacacatccacagccaggctcatgggtctcagacagcaacttgagttaaagctgaaactcatccttcttctctgtgttttctggtttaaaagctgcacttatattttagccttattattttctgtagttccggagagatggtgggttgccattctggtaggaaaatctgagttttcttatctttgacctagaagagattctttttggaccaacctgcgaaattggtagttaggtctatggaaagtggtaggattttttttttttaatcctgtgcaaaggaaaagaggtgctttgtgggaaatcactaatgagaaggctaacctgcagcaccagagaaacctttccaagtgctaggcaggagaactgaagaactctttcagtgaagtgagtcagcctagaagaggcaacccacagtcttgatttttgttgctgtttcctgacctgttcttgcctgtcacctgggcctacacaggtcccgagccaacggggctttcatacccaaggatctgtttccttgctgaaaatgaaaccctatctttcactttacattcctttcaatccaactgatcaaaactggtacccacacttgccctttctccctctctccagcacactcccctctaagaaagtaaaagcaaagctttcttaatggcaacactttgggcctgttctgttgctcctgccttatttctctttcaaccctgtacatgactcgtgttcaccatccccttgatcagtgtccatccgcgctaatttgcatcatgaactgaacagtgtgtgagtggtcacctactaaacccagctctgggggcagagctgtcttccccatctctggtgctcctaacacctgtgagatggtcctgtcgagaggactaggaaccgataggaggagagtccttctcggcagagctcactgcaaacaactggaattgaggttgcacactgtgatttttacaccgaaaagccaaaaggagctggccatccagggcctagggagaccagccttcctcagctatgcttgccgaaaccagcatgatgcttcaaagagccctgctccacccctcatggcatggatccttttcctggtgtggactctgaagggtcagtcttcggggaagagaggtggggtggggctactagcatcccaatttagaaaacagaggagtttgtagccagcagcctgtaaactggaaacactggtctcagccaacctcctcagggcgccctggcttctccccaaggagatgaggagcggtgatgccagcaccgggatgcgcagagcactggaagggctggtgcagatctacttcccatgcagaagagaagtcacatcttccagggaatcgcaatgttgtggcgtctgacttgtatgtcacatttgtgtaaaatggtatattctttaaaatagtgttgataactggaatattgtatgtatgcttggagatgctttgtgtgaacctaagactgtcactcaacagatgttggattggggaaaatccaaagcacaacttcaaaataaaatacatttttaggtttcgatgctgc

SEQ ID NO: 182 - DNA, 6950 bp, Homo sapiens
  misc_feature (203)..(203): second gene starts at position 203
atggcactgtcaaagagggagctggatgagctgaaaccatggatagagaagacagtgaagagggtcctgggtttctcagagcctacggtggtcacagcagcattgaactgtgtggggaagggcatggacaagaagaaggcagccgatcatctgaaaccttttcttgatgattctactctccgatttgtggacaaactgtttgaggctgtggaggaaggccgaagctctaggcattccaagtctagcagtgacaggagcagaaaacgagagctaaaggaggtgtttggtgatgactctgagatctctaaagaatcatcaggagtaaagaagcgacgaataccccgttttgaggaggtggaagaagagccagaggtgatccctgggcctccatcagagagccctggcatgctgactaagctccagatcaaacagatgatggaggcagcaacacgacaaatcgaggagaggaaaaaacagctgagcttcattagcccccctacacctcagccaaagactccttcttcctcccaaccagaacgacttcctattggcaacactattcagccctcccaggctgccactttcatgaatgatgccattgagaaggcaaggaaagcagctgaactgcaagctcgaatccaagcccagctggcactgaagccaggactcatcggcaatgccaacatggtgggcctggctaatctccatgccatgggcattgctcccccgaaggtggagttaaaagaccaaacgaaacctacaccactgatcctggatgagcaagggcgcactgtagatgcaacaggcaaggagattgagctgacacaccgcatgcctactctgaaagccaatattcgtgctgtgaagagggaacaattcaagcaacaactaaaggaaaagccatcagaagacatggaatccaataccttttttgacccccgagtctccattgccccttcccagcgccagagacgcacttttaaattccatgacaagggcaaatttgagaagattgctcagcgattacggacaaaggctcaactggagaagctacaggcagagatttcacaagcagctcgaaaaacaggcatccatacttcgactaggcttgccctcattgctcctaagaaggagctaaaggaaggagatattcctgaaattgagtggtgggactcttacataatccccaatggctttgatctgtgatgaagacatatcacatgtacaatgccgacagcatcagtgctcagagcaaactaaaggaggcggagaagcaggaggagaagcaaattggtaaatcggtaaagcaggaggaccggcagaccccacgctcccctgactccacggccaacgttcgcattgaggagaaacatgtccggaggagctcagtgaagaagattgagaagatgaaggagaagcgtcaagccaagtacacggagaataagctgaaggccatcaaagcccggaatgagtacttgctggctttggaggcaaccaatgcatctgtcttcaagtactacatccatgacctatctgaccttattgatcagtgttgtgacttaggctaccatgcaagtctgaaccgggctctacgcaccttcctctctgctgagttaaacctggaacagtcgaagcatgagggtctggatgccatcgagaatgcagtagaaaacctggatgccaccagtgacaagcagcgcctcatggagatgtacaacaacgtcttctgcccccctatgaagtttgagtttcagccccacatgggggatatggcttcccagctctgtgcccagcagcctgtccagagtgagctggtacagagatgccaacaactgcagtctcgcttatccactctaaagattgaaaacgaagaggtaaagaagacaatggaggccaccctgcaaaccatccaggacattgtgactgtcgaggactttgatgtgtctgactgcttccagtacagcaactccatggagtccgtcaagtccacggtctctgaaaccttcatgagcaagcccagcattgctaagaggagagccaaccagcaagagacagagcagttttatttcacaaaaatgaaagagtacctggagggcaggaacctcatcaccaagttacaagccaagcatgaccttctgcagaaaaccctgggagaaagtcagcggacagattgcagtctagccaggcgcagctcaactgtgaggaaacaggactccagccaggcaattcctctggtggtggaaagctgtatccggtttatcagcagacacggactacagcatgaaggaattttccgggtgtcaggatcccaggtggaagtgaatgacatcaaaaatgcctttgagagaggagaggaccccctggctggggaccagaacgaccatgacatggattccatagctggtgtcctgaagctttacttccgggggctggaacaccctctcttccccaaggacatctttcatgacctgatggcctgcgtcacaatggacaacctgcaggagagagctctgcacatccggaaagtcctcctagtcctgcccaaaaccactctgattatcatgagatacctctttgccttcctcaatcatttatcacagttcagtgaagagaacatgatggacccctacaacctcgccatctgcttcgggccctcgctaatgtcagtgccagagggccacgaccaggtgtcctgccaagcccacgtgaatgagctgatcaaaaccatcatcatccagcatgagaacatcttcccaagccccagggagctggagggccctgtctacagcagaggaggaagcatggaggattactgtgatagccctcatggagagactacctcggttgaagactcaacccaggatgtgaccgcagagcaccacacgagcgatgacgaatgtgagcccatcgaggccattgccaagtttgactacgtgggccggacagcccgagagctgtcctttaagaagggagcatccctgctgctttaccagcgggcttccgacgactggtgggaaggccggcacaatggcatcgacggactcatcccccatcagtacatcgtggtccaagacaccgaggacggtgtcgtggagaggtccagccccaagtctgagattgaggtcatttctgagccacctgaagaaaaggtgacagccagagcgggggccagctgtcccagtgggggtcatgtagccgatatttatcttgcaaacatcaacaagcaaaggaagcgtccagaatctgggagcatccggaaaacttttcggagtgacagccatgggctgagcagttccctgactgactcctcctccccaggggtgggggctagctgccgcccatcctcccagcccatcatgagccagagcctccccaaagaagggccagataagtgttccatcagtgggcacgggagcctcaactccatcagccgccactcatccctgaagaatcggctggatagtccacagatccggaagactgccacagcgggaaggtcaaaaagcttcaataaccatcggcccatggaccctgaggtcattgctcaggatattgaggcaacaatgaactcggccctgaatgagctacgggaactagaacggcagagcagtgtcaaacacacccctgacgtggttctggacaccttggagcccctcaaaacctccccagtggtggcccccacgtcagagccctccagccctctgcacacccagctcctcaaggaccccgagcccgccttccagcgcagcgccagtactgctggggacatcgcctgcgccttccggcctgtcaagtctgtcaagatggctgccccggtcaaaccaccagccacacggcccaagcccactgtcttccccaaaacaaatgccactagccctggtgtcaactcatcaacttccccacagtctactgacaagtcttgtactgtctgagggataataatttaattgttctagacaaggggactatagggactgactgttattaaaatcttcctatttaactagcttggggacttcagttgaaaattaggttctaagttgttcttgcaggaattagcctccccgtctcccaaaaccttgagaatgaagcccttggtatcgcctctcccttcccactgccctctgcttcccccagtcgtcgtaattcagccagctgcagtccgtaccgttcttaggttagccagagacaggttttcattatcaggtcactgtgaaatctggtaaggcagtcctgaggacatgggctcaagtctcagtcccctcagaccacggtgatgccttgaccagatggttggctactgccatccagctttcagtggcatcttgttttgggaactgattatagagaatcatatatagtccagtcttcattttacatacacacacatattttacacacacacacattttacacacacacacacacacacacacatatgtttttctagtctctggcatgtgtagcctctcctggtcatagaccagtctctttgtaagttattgtggcagttcacacagtagccaccaggggtctctgtttccattacaaactttgttctgtctgggccagagaacctagcctttgaaatctctccatcatatgaaacataacgggatgggacaatcccgtaacctgtttggggttgggggctttctctctgtgttctttccattgatgtgaattggtcattggtgtttgctcttgcctctcctccatcccctagaagtacacccccgtcttattaaggagcttttaaagtttttctgaatgtatagacatttctcgggttcctacctttgtctctgatggaccattttccatttaagacattttcctgtataagacagttttatagctggttccttttagggtaaagagtcttaagagagttttattgtgtctatggcaggtttgggaaaggtaagaaatgggtcctttttcctcctaatgtttttggcacttaaaacataaaattcattatcctattaaaaaattaaattcagctttgctaatccagaaattgttcccaaatgaaaacttgttttaagtccaccccttagtttccttattttacaaggtctctcttcagggaccaacaggggcttagagagccttagttagattaaagggagaccctacctcttaaaaccagttttcatttatgcaaacaaggacaattaagggaaccctgaccccacaggctctcaagtcttcccaaggccagaatcgaaagaaaattaaaatttgaatgctgaatattctggctctactctggccttttttctggttcccttccaaaatgcacaaatcatacccttgtctgctccaattcagtctccaaacctggtgcctgtgctcctggcccccctagcatcatgctatcccaggagtatcaggaccagacacatccacagccaggctcatgggtctcagacagcaacttgagttaaagctgaaactcatccttcttctctgtgttttctggtttaaaagctgcacttatattttagccttattattttctgtagttccggagagatggtgggttgccattctggtaggaaaatctgagttttcttatctttgacctagaagagattctttttggaccaacctgcgaaattggtagttaggtctatggaaagtggtaggattttttttttttaatcctgtgcaaaggaaaagaggtgctttgtgggaaatcactaatgagaaggctaacctgcagcaccagagaaacctttccaagtgctaggcaggagaactgaagaactctttcagtgaagtgagtcagcctagaagaggcaacccacagtcttgatttttgttgctgtttcctgacctgttcttgcctgtcacctgggcctacacaggtcccgagccaacggggctttcatacccaaggatctgtttccttgctgaaaatgaaaccctatctttcactttacattcctttcaatccaactgatcaaaactggtacccacacttgccctttctccctctctccagcacactcccctctaagaaagtaaaagcaaagctttcttaatggcaacactttgggcctgttctgttgctcctgccttatttctctttcaaccctgtacatgactcgtgttcaccatccccttgatcagtgtccatccgcgctaatttgcatcatgaactgaacagtgtgtgagtggtcacctactaaacccagctctgggggcagagctgtcttccccatctctggtgctcctaacacctgtgagatggtcctgtcgagaggactaggaaccgataggaggagagtccttctcggcagagctcactgcaaacaactggaattgaggttgcacactgtgatttttacaccgaaaagccaaaaggagctggccatccagggcctagggagaccagccttcctcagctatgcttgccgaaaccagcatgatgcttcaaagagccctgctccacccctcatggcatggatccttttcctggtgtggactctgaagggtcagtcttcggggaagagaggtggggtggggctactagcatcccaatttagaaaacagaggagtttgtagccagcagcctgtaaactggaaacactggtctcagccaacctcctcagggcgccctggcttctccccaaggagatgaggagcggtgatgccagcaccgggatgcgcagagcactggaagggctggtgcagatctacttcccatgcagaagagaagtcacatcttccagggaatcgcaatgttgtggcgtctgacttgtatgtcacatttgtgtaaaatggtatattctttaaaatagtgttgataactggaatattgtatgtatgcttggagatgctttgtgtgaacctaagactgtcactcaacagatgttggattggggaaaatccaaagcacaacttcaaaataaaatacatttttaggtttcgatgctgca

SEQ ID NO: 183 - DNA, 10517 bp, Homo sapiens
  misc_feature (243)..(243): second gene starts at position 243
atgagcgttgcatgtgtcttgaagagaaaagcagtgctttggcaggactctttcagcccccacctgaaacatcaccctcaagaaccagctaatcccaacatgcctgttgttttgacatctggaacagggtcgcaagcgcagccacaaccagctgcaaatcaggctcttgcagctgggactcactccagccctgtcccaggatctataggagttgcaggccgttcccaggacgacgctatggtggactacttctttcagaggcagcatggtgagcagcttgggggaggaggaagtggaggaggcggctataataatagcaaacatcgatggcctactggggataacattcatgcagaacatcaggtgcgttccatggatgaactgaatcatgattttcaagcacttgctctggagggaagagcgatgggagagcagctcttgccaggtaaaaagttttgggaaacagatgaatccagcaaagatggaccaaaaggaatattcctgggtgatcaatggcgagacagtgcctggggaacatcagatcattcagtttcccagccaatcatggtgcagagaagacctggtcagagtttccatgtgaacagtgaggtcaattctgtactgtccccacgatcggagagtgggggactaggcgttagcatggtggagtatgtgttgagctcatccccgggcgattcctgtctaagaaaaggaggatttggcccaagggatgcagacagtgatgaaaacgacaaaggtgaaaagaagaacaagggtacgtttgatggagataagctaggagatttgaaggaggagggtgatgtgatggacaagaccaatggtttaccagtgcagaatgggattgatgcagacgtcaaagattttagccgtacccctggtaattgccagaactctgctaatgaagtggatcttctgggtccaaaccagaatggttctgagggcttagcccagctgaccagcaccaatggtgccaagcctgtggaggatttctccaacatggagtcccagagtgtccccttggaccccatggaacatgtgggcatggagcctcttcagtttgattattcaggcacgcaggtacctgtggactcagcagcagcaactgtgggactttttgactacaattctcaacaacagctgttccaaagacctaatgcgcttgctgtccagcagttgacagctgctcagcagcagcagtatgcactggcagctgctcatcagccgcacatcggtttagctcccgctgcgtttgtccccaatccatacatcatcagcgctgctcccccagggacggacccctacacagctggattggctgcagcagcgacactaggcccagctgtggtccctcaccagtattatggagttactccctggggagtctaccctgccagtcttttccagcagcaagctgccgctgccgctgcagcaactaattcagctaatcaacagaccaccccacaggctcagcaaggacagcagcaggttctccgtggaggagccagccaacgtcctttgaccccaaaccagaaccagcagggacagcaaacggatccccttgtggcagctgcagcagtgaattctgcccttgcatttggacaaggtctggcagcaggcatgccaggttatccggtgttggctcctgctgcttactatgaccaaactggtgcccttgtagtgaatgcaggcgcgagaaatggtcttggagctcctgttcgacttgtagctcctgccccagtcatcattagttcctcagctgcacaagcagctgttgcagcagccgcagcttcagcaaatggagcagctggtggtcttgctggaacaacaaatggaccatttcgccctttaggaacacagcagcctcagccccagccccagcagcagcccaataacaacctggcatccagttctttctacggcaacaactctctgaacagcaattcacagagcagctccctcttctcccagggctctgcccagcctgccaacacatccttgggattcggaagtagcagttctctcggcgccaccctgggatccgcccttggagggtttggaacagcagttgcaaactccaacactggcagtggctcccgccgtgactccctgactggcagcagtgacctttataagaggacatcgagcagcttgacccccattggacacagtttttataacggccttagcttttcctcctctcctggacccgtgggcatgcctctccctagtcagggaccaggacattcacagacaccacctccttccctctcttcacatggatcctcttcaagcttaaacctgggaggactcacgaatggcagtggaagatacatctctgctgctccaggcgctgaagccaagtaccgcagtgcaagcagcgcctccagcctcttcagcccgagcagcactcttttctcttcctctcgtttgcgatatggaatgtctgatgtcatgccttctggcaggagcaggcttttggaagattttcgaaacaaccggtaccccaatttacaactgcgggagattgctggacatataatggaattttcccaagaccagcatgggtccagattcattcagctgaaactggagcgtgccacaccagctgagcgccagcttgtcttcaatgaaatcctccaggctgcctaccaactcatggtggatgtgtttggtaattacgtcattcagaagttctttgaatttggcagtcttgaacagaagctggctttggcagaacggattcgaggccacgtcctgtcattggcactacagatgtatggctgccgtgttatccagaaagctcttgagtttattccttcagaccagcaggtaattaatgagatggttcgggaactagatggccatgtcttgaagtgtgtgaaagatcagaatggcaatcacgtggttcagaaatgcattgaatgtgtacagccccagtctttgcaatttatcatcgatgcgtttaagggacaggtatttgccttatccacacatccttatggctgccgagtgattcagagaatcctggagcactgtctccctgaccagacactccctattttagaggagcttcaccagcacacagagcagcttgtacaggatcaatatggaaattatgtaatccaacatgtactggagcacggtcgtcctgaggataaaagcaaaattgtagcagaaatccgaggcaatgtacttgtattgagtcagcacaaatttgcaaggtgtgagcgacgtctcctcaccacagtgctgtgtggtctatacctcagccagggagaggatgtgaaaccccccgccctgcacatgagtggtacaggccaacaggaacacctggctccagccacgttcacagacatgtcagccgtggagtagtgctgacacttttctctcagcttctcagggtttcagtccttttgggtttgttttatttaccttttttatggttttgtggctggacgttcacaaccaaggcagacagcatgggtgaccagcaactgtacaagaccaaccatgtggcccatggtagtgagaaccttttctaccaacagccaccacttggcgtccacagcgggctgaaccacaactatgggaatgcagttacagggggcggaatggatgcccctcaggcctcgccaatctccccccacttccctcaagatacacgggatggtctgggcttgcctgttggctccaaaaaccttggccaaatggatacctcgaggcagggagggtggggaagtcatgcagggcctggaaaccatgtccagctacgtggaaacctggccaactcaaacatgatgtggggggcaccagcccaggctgagcccactgatggctaccaatacacctactcccaggccagcgagatccggacccagaagcttaccagcggtgtcttacacaagctggactctttcacccaggtgtttgccaaccaaaacctgcgaattcaggtcaacaatatggcccaggtgctgcacactcagtcagcagtgatggatggagcccctgacagtgctctccgccagctgctgtctcagaagcccatggagcccccagcaccggctatcccttcccgctaccagcaggtgccccagcagcctcaccctggtttcactggtgggctgtccaaaccagctcttcaggtcgggcagcaccctacccaagggcacctgtattatgactaccagcagcctctggctcaggtgccagtgcagggaggacagccactgcaggccccacagatgctgtcacagcacatgcaacagatgcagcagcaccagtattacccaccgcagcaacagcagcaagccgggcaacagcgtatctccatgcaagaaatacagacgcagccgcaacaaattcgcccatcacagccacagccgccgccacagcagcagcagccgcagcagctacagctgcagcagcggcagggttcaatgcagatacctcagtattatcagccccaacccatgatgcagcacttgcaagagcagcagcagcaacagatgcacctgcagcctccttcttatcacagggaccctcaccagtataccccagagcaggcacacactgtccagctgattcccctgggctccatgtcccagtactactaccaggagccccagcagccctacagccaccccctctaccagcagagccacctgtcccagcaccagcagcgtgaggacagtcagctgaagacctactctagtgacagacaggcccaggccatgctgagctcccatggggacctggggcctcctgacacaggaatgggagacccagcgagctcagatctgacccgggtcagcagcaccctcccccatcgccccctcctatcccccagtgggatccacctcaacaacatggggcctcagcatcagcagctgtctcccagtgccatgtggccccagatgcacctacctgatgggagagcccagccagggtcccctgagtcaagtggccaacccaaaggagcgtttggggagcagtttgatgccaagaacaagctgacatgctccatctgcctgaaggagttcaagaacctgcctgccctgaatggccacatgcggtcccacgggggaatgagggcctcccccaacctcaaacaggaggaaggagagaaggtcctgccgcctcagccccagccaccactgccgcctccgcctccgcctccgccgccaccacagctccctcccgaggcagaaagcctcacgcctatggtcatgcccgtgtctgtccctgtcaagcttctcccgcccaagcccagctctcaggggttcaccaacagcaccgttgccgccccctccgccagagacaagccagccagctcgatgtcggacgacgagatgcctgtgctcgaaatccccaggaagcatcagccgagtgtgcccaaagccgaggagcccctcaagaccgtgcaggagaagaaaaagttccggcaccggccggaacctctcttcatcccgccgccgccctcctacaacccgaaccccgctgcctcctactcgggcgccaccctgtaccagagccagctgcgctccccgcgcgtcctcggggaccacctgctcctggaccccacccacgagctgcccccttacacgcccccacccatgctgagcccggtgcgccagggctcggggctcttcagcaatgtcctcatctccggccacggccctggcgcccacccgcagctgcccctgacgcccctgacgcccacaccacgggtgctgctgtgtcgctccaacagcatcgatggcagcaacgtgacggtcaccccagggcctggagagcagactgtagatgttgaaccacgcatcaacattggcttgagattccaagcagaaatccctgaactccaagatatctctgccctggcccaggacacacacaaggccacactggtatggaagccctggccagaactagaaaaccatgacctccagcaaagagtggagaatcttctgaatttgtgctgttccagtgcattgccaggtggagggaccaattctgaatttgctttgcactctctgtttgaggccaaaggtgatgtgatggttgctctggaaatgctgctactgcggaagcctgtcaggttaaaatgtcatcctttagcaaattaccactatgccggttcggacaagtggacctccctagaaagaaaactgtttaacaaagcactagccacttacagcaaagactttatttttgtacagaagatggtgaagtccaagacggtggctcagtgcgtggagtactactacacgtggaaaaagatcatgcggctggggcggaaacaccggacacgcctggcagaaatcatcgacgattgtgtgacaagtgaagaagaagaagagttagaggaggaggaggaggaggacccggaagaagataggaaatccacaaaagaagaagagagtgaggtgccgaagtccccggagccaccacccgtccccgtcctggctcccacggaggggccgcccctgcaggccctgggccagccctcaggctccttcatctgtgaaatgcccaactgtggggctgtgttcagctcccgacaggcactgaatggccatgcccgcatccacgggggcaccaaccaggtgaccaaggcccgaggtgccatcccctctgggaagcagaagcctggtggcacccagagtgggtactgttcggtaaagagctcaccctctcacagcaccaccagcggcgagacagaccccaccaccatcttcccctgcaaggagtgtggcaaagtcttcttcaagatcaaaagccgaaatgcacacatgaaaactcacaggcagcaggaggaacaacagaggcaaaaggctcagaaggcggcttttgcagctgagatggcagccacgattgagaggactacggggcccgtgggggcgccggggctgctgcccctggaccagctgagtctgatcaaacccatcaaggatgtggacatcctcgacgacgacgtcgtccagcagttgggaggtgtcatggaagaggctgaagttgtggacaccgatcttctcttggatgatcaagattcagtcttgcttcagggtgacgcagaactataaagccctgtgtgtcacttagagacagtgaaaacccacggcctccatcttcattaatcaggaaacctggactgcctgcttgttttgtaacccttttaaactacctgttttaaaagtggtcattttattcaggtttagaaaaaaaaatcctatttcttttccttttatttaaaaaaatttgtttttgtggggggttgggggaataaataattggcacaactatctttaagaggtgtttcatctgggctaccttctcatgaaatcattcccagtagggactgaagctgaccttcatgttccattgcattcagatgtcaaccatcccggttgccttttatcccaaagcttgctgtgagtgtgtgtgtgtgagacgcaggcgaccctcttagtactggggtcttggggccaacttttcccatcaagcgttactttgattctgttctgacctcattccatagtttgcagtgagcatggcatctttgcctggagatactatgctaggggcagctttccaggggcaaagcaagccctcgtgttacacggctctcctccagctcacacgacatgtgaggagatgaccaaatgtgaaaacaggtttcccctgtgttgcccgtcatcctttggcccgttcacaggaatggagtactgtataattttaggctttcattcccagcagtgtttactgaggacctggttttctagaacaggtgtgtcctgtcctcttccatgttccctgggggctggtcagctccaagttgtgggtggcagagctgtgtttcagcatgaactgactagagacccatctggaggcaaatattaagttgccaggactgctttcacttcagggtgattgaaggacacatattgaagtacctagaatgccagaaagtgttctattgcccaaaaaacaaatcagaaaagcctattcttttttgcaacgctgttaatgattagtggagttctgaaattactttgtgccacttggaagtactgtgaaaccgcattcactgggattttgctgtaattcacatccgctggactgaagtttaccttgatgttagctataagaaatagttttctaacacatacgatagcaaatacaagacaaatagcattgaaggccaacaaaaatggcttcagatacaccttagctataatgtttgcattcaaacaatgaatgtattcatcacaagtcacttaccaaagcacttctagacttctccaacctccatgactttgctctgcttcctcctgtccctgtcagcagggttgctgtttgtacttgaaggtaataaacctgtaatccttcaaaaatgccatttagccccaggcttctgagctgagtcagactgacccatcccaccgttagggcaaaagtcaggctgggacacagcgccagtacagagaggatcctgcttcatgcaactccccttttggagttaatgcagcgtgatttcctgggccggtgttttcaggcatcgcccaccccaggtatgctggttcccagctccacgtaggtgtgcctatcacgctgggccactttgctgacaacattcatagcttgacatgagagagaatatcagcagaagcatgagagtaggacctgacgtctttgactctgcaaaagcatttagcacacactcatgggggggaactggctgtgagccacagcagccccacacagacagtggtctctgaacttcaggaaagccatggacagaaaaaaaaataaaattcttttccatcattctattttcaaagaggtcttggcgttttcctacatcttttgtttagagggggaaaaaagtttcatttgctgccatttcagaaaggttatgctatcctgttttatccaagcagttgtgagtcaggaactgcctgggcagtgtgcatcaactttgtggccgaaccattacagctgtcatatccttggctgatcgtctctcccagggactactgccctccacttagtgtctgagggtaagcctagaagggtgctgctattgggtctatggaagcttatctatcaaaggagcaaacatccagaaaagtgtttataaagcaaatgtattgcctctgtttagagatttgcccagctgttccagttttaaacattaaaaaataaactcagttgccatggcaaaaatagaatgcacagcttacttataattttccatgcagtatagcataaggatttttgacttgaaacaaccaaagaactcctccttaacgagacagttcaaattcctgaattagtatttcttgactatcaacttaaagaatggacttcctagtacaatgttgcacttatttttttttctgaaataattctgcctgcatgtatgtgttgtgttttagcttctccccttaccccaccccaaagatcttttcttcctaatggttaatgtctcaactcggttactgtttactatcagatggtttttcattagtgaatttagacctctttgagaaagcttgtatataaaaagttaacagatatattttatggaaaaacccatcttattttcaaatatatttaactgctgttatattttattagaggaaggttgtaaatattttctaggagttctattgtaaagaaaagtatttttgaaaaaaattaatgtaataaaaaggaaaacatttttaaatagtggttgtgattgcttcctgttctggcttcgttatgttctattctcagcagatgaattgcatgccttccatatcaggatgtaatttattcaggtttgcactattataagttgacatcataatatctagtgtgcttaactgtattttcccggaatgcaagtcccttggtccatattaaagcactatgtatagcatattcataatttttcttttgtaacgtgtgtatttttaataaggattttatgtaacattttggcaacaagaggaccgtattttctagtgaattttataataacattttgctaaaaatgtttcttcctaggtcagtttttgttaaggtgaaccaaaagtcttattttaccaggggtttaaaaaaagtttgaagcttgaaagcaaagttatatttaaacatcatatgtaacaaataaataaagatgttttatagacttgtcctaaaaaggtgcattccttaaaaaaaaaaaaaagaaaaaaaaaggaaactggggcattctaggttgtttcccctccaagtgataagctttttttttttcttaattatcacaatgcttcttcaaaaagggaaccagggaaattttatttaacacattctaatcattagcctctcagaaagttattacagttcctatagatgggcattcatcaaatggagatgtaaccaaacagacactgtcatatttatttgtgaaaacctgattcaatattgcatcagctgctctgaaaataaaatattaatcttttgcgttt

SEQ ID NO: 184 - DNA, 10511 bp, Homo sapiens
  misc_feature (237)..(237): second gene starts at position 237
atgagcgttgcatgtgtcttgaagagaaaagcagtgctttggcaggactctttcagcccccacctgaaacatcaccctcaagaaccagctaatcccaacatgcctgttgttttgacatctggaacagggtcgcaagcgcagccacaaccagctgcaaatcaggctcttgcagctgggactcactccagccctgtcccaggatctataggagttgcaggccgttcccaggacgacgctatggtggactacttctttcagaggcagcatggtgagcagcttgggggaggaggaagtggaggaggcggctataataatagcaaacatcgatggcctactggggataacattcatgcagaacatcaggtgcgttccatggatgaactgaatcatgattttcaagcacttgctctggagggaagagcgatgggagagcagctcttgccaggtaaaaagttttgggaaacagatgaatccagcaaagatggaccaaaaggaatattcctgggtgatcaatggcgagacagtgcctggggaacatcagatcattcagtttcccagccaatcatggtgcagagaagacctggtcagagtttccatgtgaacagtgaggtcaattctgtactgtccccacgatcggagagtgggggactaggcgttagcatggtggagtatgtgttgagctcatccccgggcgattcctgtctaagaaaaggaggatttggcccaagggatgcagacagtgatgaaaacgacaaaggtgaaaagaagaacaagggtacgtttgatggagataagctaggagatttgaaggaggagggtgatgtgatggacaagaccaatggtttaccagtgcagaatgggattgatgcagacgtcaaagattttagccgtacccctggtaattgccagaactctgctaatgaagtggatcttctgggtccaaaccagaatggttctgagggcttagcccagctgaccagcaccaatggtgccaagcctgtggaggatttctccaacatggagtcccagagtgtccccttggaccccatggaacatgtgggcatggagcctcttcagtttgattattcaggcacgcaggtacctgtggactcagcagcagcaactgtgggactttttgactacaattctcaacaacagctgttccaaagacctaatgcgcttgctgtccagcagttgacagctgctcagcagcagcagtatgcactggcagctgctcatcagccgcacatcggtttagctcccgctgcgtttgtccccaatccatacatcatcagcgctgctcccccagggacggacccctacacagctggattggctgcagcagcgacactaggcccagctgtggtccctcaccagtattatggagttactccctggggagtctaccctgccagtcttttccagcagcaagctgccgctgccgctgcagcaactaattcagctaatcaacagaccaccccacaggctcagcaaggacagcagcaggttctccgtggaggagccagccaacgtcctttgaccccaaaccagaaccagcagggacagcaaacggatccccttgtggcagctgcagcagtgaattctgcccttgcatttggacaaggtctggcagcaggcatgccaggttatccggtgttggctcctgctgcttactatgaccaaactggtgcccttgtagtgaatgcaggcgcgagaaatggtcttggagctcctgttcgacttgtagctcctgccccagtcatcattagttcctcagctgcacaagcagctgttgcagcagccgcagcttcagcaaatggagcagctggtggtcttgctggaacaacaaatggaccatttcgccctttaggaacacagcagcctcagccccagccccagcagcagcccaataacaacctggcatccagttctttctacggcaacaactctctgaacagcaattcacagagcagctccctcttctcccagggctctgcccagcctgccaacacatccttgggattcggaagtagcagttctctcggcgccaccctgggatccgcccttggagggtttggaacagcagttgcaaactccaacactggcagtggctcccgccgtgactccctgactggcagcagtgacctttataagaggacatcgagcagcttgacccccattggacacagtttttataacggccttagcttttcctcctctcctggacccgtgggcatgcctctccctagtcagggaccaggacattcacagacaccacctccttccctctcttcacatggatcctcttcaagcttaaacctgggaggactcacgaatggcagtggaagatacatctctgctgctccaggcgctgaagccaagtaccgcagtgcaagcagcgcctccagcctcttcagcccgagcagcactcttttctcttcctctcgtttgcgatatggaatgtctgatgtcatgccttctggcaggagcaggcttttggaagattttcgaaacaaccggtaccccaatttacaactgcgggagattgctggacatataatggaattttcccaagaccagcatgggtccagattcattcagctgaaactggagcgtgccacaccagctgagcgccagcttgtcttcaatgaaatcctccaggctgcctaccaactcatggtggatgtgtttggtaattacgtcattcagaagttctttgaatttggcagtcttgaacagaagctggctttggcagaacggattcgaggccacgtcctgtcattggcactacagatgtatggctgccgtgttatccagaaagctcttgagtttattccttcagaccagcagaatgagatggttcgggaactagatggccatgtcttgaagtgtgtgaaagatcagaatggcaatcacgtggttcagaaatgcattgaatgtgtacagccccagtctttgcaatttatcatcgatgcgtttaagggacaggtatttgccttatccacacatccttatggctgccgagtgattcagagaatcctggagcactgtctccctgaccagacactccctattttagaggagcttcaccagcacacagagcagcttgtacaggatcaatatggaaattatgtaatccaacatgtactggagcacggtcgtcctgaggataaaagcaaaattgtagcagaaatccgaggcaatgtacttgtattgagtcagcacaaatttgcaaggtgtgagcgacgtctcctcaccacagtgctgtgtggtctatacctcagccagggagaggatgtgaaaccccccgccctgcacatgagtggtacaggccaacaggaacacctggctccagccacgttcacagacatgtcagccgtggagtagtgctgacacttttctctcagcttctcagggtttcagtccttttgggtttgttttatttaccttttttatggttttgtggctggacgttcacaaccaaggcagacagcatgggtgaccagcaactgtacaagaccaaccatgtggcccatggtagtgagaaccttttctaccaacagccaccacttggcgtccacagcgggctgaaccacaactatgggaatgcagttacagggggcggaatggatgcccctcaggcctcgccaatctccccccacttccctcaagatacacgggatggtctgggcttgcctgttggctccaaaaaccttggccaaatggatacctcgaggcagggagggtggggaagtcatgcagggcctggaaaccatgtccagctacgtggaaacctggccaactcaaacatgatgtggggggcaccagcccaggctgagcccactgatggctaccaatacacctactcccaggccagcgagatccggacccagaagcttaccagcggtgtcttacacaagctggactctttcacccaggtgtttgccaaccaaaacctgcgaattcaggtcaacaatatggcccaggtgctgcacactcagtcagcagtgatggatggagcccctgacagtgctctccgccagctgctgtctcagaagcccatggagcccccagcaccggctatcccttcccgctaccagcaggtgccccagcagcctcaccctggtttcactggtgggctgtccaaaccagctcttcaggtcgggcagcaccctacccaagggcacctgtattatgactaccagcagcctctggctcaggtgccagtgcagggaggacagccactgcaggccccacagatgctgtcacagcacatgcaacagatgcagcagcaccagtattacccaccgcagcaacagcagcaagccgggcaacagcgtatctccatgcaagaaatacagacgcagccgcaacaaattcgcccatcacagccacagccgccgccacagcagcagcagccgcagcagctacagctgcagcagcggcagggttcaatgcagatacctcagtattatcagccccaacccatgatgcagcacttgcaagagcagcagcagcaacagatgcacctgcagcctccttcttatcacagggaccctcaccagtataccccagagcaggcacacactgtccagctgattcccctgggctccatgtcccagtactactaccaggagccccagcagccctacagccaccccctctaccagcagagccacctgtcccagcaccagcagcgtgaggacagtcagctgaagacctactctagtgacagacaggcccaggccatgctgagctcccatggggacctggggcctcctgacacaggaatgggagacccagcgagctcagatctgacccgggtcagcagcaccctcccccatcgccccctcctatcccccagtgggatccacctcaacaacatggggcctcagcatcagcagctgtctcccagtgccatgtggccccagatgcacctacctgatgggagagcccagccagggtcccctgagtcaagtggccaacccaaaggagcgtttggggagcagtttgatgccaagaacaagctgacatgctccatctgcctgaaggagttcaagaacctgcctgccctgaatggccacatgcggtcccacgggggaatgagggcctcccccaacctcaaacaggaggaaggagagaaggtcctgccgcctcagccccagccaccactgccgcctccgcctccgcctccgccgccaccacagctccctcccgaggcagaaagcctcacgcctatggtcatgcccgtgtctgtccctgtcaagcttctcccgcccaagcccagctctcaggggttcaccaacagcaccgttgccgccccctccgccagagacaagccagccagctcgatgtcggacgacgagatgcctgtgctcgaaatccccaggaagcatcagccgagtgtgcccaaagccgaggagcccctcaagaccgtgcaggagaagaaaaagttccggcaccggccggaacctctcttcatcccgccgccgccctcctacaacccgaaccccgctgcctcctactcgggcgccaccctgtaccagagccagctgcgctccccgcgcgtcctcggggaccacctgctcctggaccccacccacgagctgcccccttacacgcccccacccatgctgagcccggtgcgccagggctcggggctcttcagcaatgtcctcatctccggccacggccctggcgcccacccgcagctgcccctgacgcccctgacgcccacaccacgggtgctgctgtgtcgctccaacagcatcgatggcagcaacgtgacggtcaccccagggcctggagagcagactgtagatgttgaaccacgcatcaacattggcttgagattccaagcagaaatccctgaactccaagatatctctgccctggcccaggacacacacaaggccacactggtatggaagccctggccagaactagaaaaccatgacctccagcaaagagtggagaatcttctgaatttgtgctgttccagtgcattgccaggtggagggaccaattctgaatttgctttgcactctctgtttgaggccaaaggtgatgtgatggttgctctggaaatgctgctactgcggaagcctgtcaggttaaaatgtcatcctttagcaaattaccactatgccggttcggacaagtggacctccctagaaagaaaactgtttaacaaagcactagccacttacagcaaagactttatttttgtacagaagatggtgaagtccaagacggtggctcagtgcgtggagtactactacacgtggaaaaagatcatgcggctggggcggaaacaccggacacgcctggcagaaatcatcgacgattgtgtgacaagtgaagaagaagaagagttagaggaggaggaggaggaggacccggaagaagataggaaatccacaaaagaagaagagagtgaggtgccgaagtccccggagccaccacccgtccccgtcctggctcccacggaggggccgcccctgcaggccctgggccagccctcaggctccttcatctgtgaaatgcccaactgtggggctgtgttcagctcccgacaggcactgaatggccatgcccgcatccacgggggcaccaaccaggtgaccaaggcccgaggtgccatcccctctgggaagcagaagcctggtggcacccagagtgggtactgttcggtaaagagctcaccctctcacagcaccaccagcggcgagacagaccccaccaccatcttcccctgcaaggagtgtggcaaagtcttcttcaagatcaaaagccgaaatgcacacatgaaaactcacaggcagcaggaggaacaacagaggcaaaaggctcagaaggcggcttttgcagctgagatggcagccacgattgagaggactacggggcccgtgggggcgccggggctgctgcccctggaccagctgagtctgatcaaacccatcaaggatgtggacatcctcgacgacgacgtcgtccagcagttgggaggtgtcatggaagaggctgaagttgtggacaccgatcttctcttggatgatcaagattcagtcttgcttcagggtgacgcagaactataaagccctgtgtgtcacttagagacagtgaaaacccacggcctccatcttcattaatcaggaaacctggactgcctgcttgttttgtaacccttttaaactacctgttttaaaagtggtcattttattcaggtttagaaaaaaaaatcctatttcttttccttttatttaaaaaaatttgtttttgtggggggttgggggaataaataattggcacaactatctttaagaggtgtttcatctgggctaccttctcatgaaatcattcccagtagggactgaagctgaccttcatgttccattgcattcagatgtcaaccatcccggttgccttttatcccaaagcttgctgtgagtgtgtgtgtgtgagacgcaggcgaccctcttagtactggggtcttggggccaacttttcccatcaagcgttactttgattctgttctgacctcattccatagtttgcagtgagcatggcatctttgcctggagatactatgctaggggcagctttccaggggcaaagcaagccctcgtgttacacggctctcctccagctcacacgacatgtgaggagatgaccaaatgtgaaaacaggtttcccctgtgttgcccgtcatcctttggcccgttcacaggaatggagtactgtataattttaggctttcattcccagcagtgtttactgaggacctggttttctagaacaggtgtgtcctgtcctcttccatgttccctgggggctggtcagctccaagttgtgggtggcagagctgtgtttcagcatgaactgactagagacccatctggaggcaaatattaagttgccaggactgctttcacttcagggtgattgaaggacacatattgaagtacctagaatgccagaaagtgttctattgcccaaaaaacaaatcagaaaagcctattcttttttgcaacgctgttaatgattagtggagttctgaaattactttgtgccacttggaagtactgtgaaaccgcattcactgggattttgctgtaattcacatccgctggactgaagtttaccttgatgttagctataagaaatagttttctaacacatacgatagcaaatacaagacaaatagcattgaaggccaacaaaaatggcttcagatacaccttagctataatgtttgcattcaaacaatgaatgtattcatcacaagtcacttaccaaagcacttctagacttctccaacctccatgactttgctctgcttcctcctgtccctgtcagcagggttgctgtttgtacttgaaggtaataaacctgtaatccttcaaaaatgccatttagccccaggcttctgagctgagtcagactgacccatcccaccgttagggcaaaagtcaggctgggacacagcgccagtacagagaggatcctgcttcatgcaactccccttttggagttaatgcagcgtgatttcctgggccggtgttttcaggcatcgcccaccccaggtatgctggttcccagctccacgtaggtgtgcctatcacgctgggccactttgctgacaacattcatagcttgacatgagagagaatatcagcagaagcatgagagtaggacctgacgtctttgactctgcaaaagcatttagcacacactcatgggggggaactggctgtgagccacagcagccccacacagacagtggtctctgaacttcaggaaagccatggacagaaaaaaaaataaaattcttttccatcattctattttcaaagaggtcttggcgttttcctacatcttttgtttagagggggaaaaaagtttcatttgctgccatttcagaaaggttatgctatcctgttttatccaagcagttgtgagtcaggaactgcctgggcagtgtgcatcaactttgtggccgaaccattacagctgtcatatccttggctgatcgtctctcccagggactactgccctccacttagtgtctgagggtaagcctagaagggtgctgctattgggtctatggaagcttatctatcaaaggagcaaacatccagaaaagtgtttataaagcaaatgtattgcctctgtttagagatttgcccagctgttccagttttaaacattaaaaaataaactcagttgccatggcaaaaatagaatgcacagcttacttataattttccatgcagtatagcataaggatttttgacttgaaacaaccaaagaactcctccttaacgagacagttcaaattcctgaattagtatttcttgactatcaacttaaagaatggacttcctagtacaatgttgcacttatttttttttctgaaataattctgcctgcatgtatgtgttgtgttttagcttctccccttaccccaccccaaagatcttttcttcctaatggttaatgtctcaactcggttactgtttactatcagatggtttttcattagtgaatttagacctctttgagaaagcttgtatataaaaagttaacagatatattttatggaaaaacccatcttattttcaaatatatttaactgctgttatattttattagaggaaggttgtaaatattttctaggagttctattgtaaagaaaagtatttttgaaaaaaattaatgtaataaaaaggaaaacatttttaaatagtggttgtgattgcttcctgttctggcttcgttatgttctattctcagcagatgaattgcatgccttccatatcaggatgtaatttattcaggtttgcactattataagttgacatcataatatctagtgtgcttaactgtattttcccggaatgcaagtcccttggtccatattaaagcactatgtatagcatattcataatttttcttttgtaacgtgtgtatttttaataaggattttatgtaacattttggcaacaagaggaccgtattttctagtgaattttataataacattttgctaaaaatgtttcttcctaggtcagtttttgttaaggtgaaccaaaagtcttattttaccaggggtttaaaaaaagtttgaagcttgaaagcaaagttatatttaaacatcatatgtaacaaataaataaagatgttttatagacttgtcctaaaaaggtgcattccttaaaaaaaaaaaaaagaaaaaaaaaggaaactggggcattctaggttgtttcccctccaagtgataagctttttttttttcttaattatcacaatgcttcttcaaaaagggaaccagggaaattttatttaacacattctaatcattagcctctcagaaagttattacagttcctatagatgggcattcatcaaatggagatgtaaccaaacagacactgtcatatttatttgtgaaaacctgattcaatattgcatcagctgctctgaaaataaaatattaatcttttgcgttt

SEQ ID NO: 185 - DNA, 6747 bp, Homo sapiens
  misc_feature (117)..(117): second gene starts at position 117
atggcgctgagggagctcaaagtgtgtctgctcggggatacaggtgtaggtaaatcgagtattgtgtggcggtttgtggaagacagttttgatccaaacatcaacccaacaatagggcttttggaaatgccaagacagcccacaacaacaactccagccggtttgggaaattcatccaagtcagctacctagagagtggcatcgtgagaggagctgtcgtcgagaaatatctgcttgaaaagtctcgcctggtgtctcaggagaaggatgagaggaactaccatgtgttttattatttgttacttggggtcagcgaggaagagcgccaagaatttcagctcaagcagcctgaagattatttctacctcaaccagcataacttgaagattgaagatggggaggacctgaagcatgactttgagaggctcaagcaggccatggagatggtgggcttcctccccgccaccaagaagcagatttttgccgtcctctcggccatcctgtacctgggcaacgtcacttataagaagagagctacaggccgagaggaagggttggaggtcgggccacccgaggtgctggacaccctgtcgcagcttctgaaggtgaagcgagaaatcttggtggaggttctgaccaaaagaaaaacggtgaccgtcaacgacaagcttatccttccctacagcctcagcgaggccatcactgcccgcgactccatggccaagtctctgtacagcgccctgttcgactggattgtgctgcggatcaaccacgcactcctcaacaagaaggacgtggaagaggcagtctcgtgcctgtccattggggtcctggacatcttcgggtttgaagacttcgagaggaacagctttgagcagttctgcatcaactacgccaatgagcagctgcagtattacttcaaccagcacatcttcaagctggagcaggaggaatatcagggcgaggggatcacgtggcacaacatcggctacacagacaatgtcggctgcatccatctcatcagcaagaaacccacgggcctcttctacctgctggacgaggagagcaacttcccccacgccacgagccagaccctgctggccaagttcaaacagcaacatgaggacaataagtacttcctgggcaccccggtcatggagccagctttcatcatccagcacttcgcagggaaggtgaaatatcagatcaaggacttccgggagaagaacatggactacatgcggccagacatcgtggccctgctgcggggcagtgacagctcctacgtgcgggagctcatcggcatggaccccgtggccgtgttccgctgggccgtgctccgggctgctatccgggccatggcagtgcttcgggaggccggacgcctgcgggccgagagggccgaaaaggctgcaggtatgagcagccctggtgcccaaagtcacccagaagagctgccaagaggagccagcaccccttcggaaaaactttaccgcgatttgcataaccaaatgatcaagagcatcaaaggattgccctggcagggcgaggacccccgtagccttctccagtccctcagtcggctccagaaaccccgcgccttcatcctgaaaagtaaaggtatcaaacaaaagcagatcattccaaagaacctactggactccaagtccctgaaactcatcatcagcatgactctgcacgaccgcaccaccaagtccctactgcacctgcacaagaagaaaaagccaccaagcatcagcgcccagttccagacatcccttaacaagctcttggaggcactggggaaggcggagcccttctttatccgctgcatccgttccaatgctgaaaagaaagagctgtgctttgacgacgagctggtcctgcagcagctgcgctacaccggcatgctggagaccgtgcgcatccggaggtcagggtacagcgccaagtacacgttccaggatttcaccgagcagttccaggtgctcctgcccaaggatgcccagccctgcagggaggtcatctccaccctcctggagaaaatgaagatagacaagaggaactaccagatcgggaagaccaaggtcttcctgaaggagacggagcggcaagccctgcaggagacgctgcaccgggaggtggtgcggaaaatcctgctgctgcagagctggttccggatggtgctggagcgtcggcacttcctgcagatgaagcgggccgccgtcaccatccaggcctgctggcggtcctaccgggtccggagggcgctggagaggacgcaggctgccgtgtacctccaggcctcatggaggggctactggcagcggaagctctaccggcaccagaaacagagcatcatccgcctgcagagcctgtgtcgggggcacctgcagcgcaagagcttcagccagatgatctcggagaagcagaaggcagaagagaaggagagggaagccctggaagccgcaagagcaggtgctgaggagggcggacagggtcaggcggctggagggcagcaggtagctgagcaggggccggagccagcggaggatggcgggcacctggcatcggagcctgaggtgcagccaagtgacaggtcccccctagagcactcctcacctgagaaggaggccccaagcccagagaagactctcccaccccagaaaaccgtggcggctgaaagtcacgagaaagtccccagcagccgggagaagcgtgagtcgcgtcggcaaagagggctggagcacgtcaagttccagaacaaacacatccagtcctgcaaggaggagagtgccctcagagaaccttccagaagggtcacccaggagcaaggggtgagtctcctggaagacaaaaaggagagcagagaagatgaaacccttctagtcgtagagacggaggctgagaacacatctcaaaagcagcccacagagcaaccccaggccatggcagttggcaaggtctctgaagaaactgagaagacgctgcccagtgggagccccaggcctggccagttggagcggccgaccagcctggccctggacagcagggtcagcccaccggcccctggcagcgcccccgagacccccgaggacaagagcaaaccatgtggcagcccaagggttcaggaaaagcccgacagccccggaggctccacgcagatccagcggtacctggacgccgagcggctggccagcgccgtggaactgtggcggggcaagaagctggtggccgccgccagccctagtgccatgctcagccagtccctggacctcagcgacagacaccgggccacaggggccgccctcacgcccacagaggagaggcgcacctccttctccacgagcgacgtctccaagctcctcccgtccctggccaaggctcagcctgcagcagaaaccacggacggagagcgaagtgcgaaaaagccagctgtccagaagaagaagccaggcgacgcatcctccctcccagacgcagggctgtccccgggctctcaggtcgactctaaatccacgtttaagaggctttttctgcataaaaccaaggataaaaaatacagcctggagggcgcagaggagctggagaatgcagtgtccgggcacgtggtgctggaagccaccaccatgaagaagggcctggaagccccctccggacagcagcatcgccacgctgcaggtgagaagcgcaccaaggaaccaggaggcaaagggaagaagaaccgaaatgtcaagattgggaagatcacagtgtcagagaagtggcgggaatcggtgttccgccagatcaccaacgccaatgagctcaagtacctggacgagttcctgctcaacaagataaatgacctccgttcccagaagacgcccattgagagcttgtttatcgaagccaccgagaagttcaggagcaacatcaaaacgatgtactctgtcccgaacgggaagatccacgtgggctacaaggatctgatggagaactaccagatcgtcgtcagcaacctggccactgagcgtggccagaaggacaccaacctggtcctcaacctcttccagtcactgctagatgagttcacccgtggctacaccaagaacgacttcgagccagtgaagcagagcaaagctcagaagaagaagcggaagcaggagcgtgctgtccaggagcacaacgggcacgtgttcgccagctaccaggttagcatcccgcagtcgtgcgagcagtgcctctcctatatctggctcatggacaaggccctgctctgcagcgtgtgcaagatgacctgccacaagaagtgcgtgcacaagattcagagccactgctcctacacctacgggaggaagggcgagccaggcgttgagcctggccacttcggcgtgtgcgtagacagcctgaccagcgacaaggcctcggtgcccatcgtgctggagaagctcctggaacacgtggagatgcacggcctgtacaccgagggcctctaccgcaagtcgggtgctgccaaccgcactcgggagctccggcaggcgctgcagacagaccccgcagcagtcaagctggagaacttccccatccacgccatcacaggggtgctgaagcagtggctgcgggagctgcccgagcccctcatgaccttcgcacagtacggcgacttcctccgagccgtcgagctgccggagaagcaggagcagctggctgccatctatgccgtcctggagcaccttccagaagccaaccacaactccctggagagactcatcttccaccttgtcaaggtggccctgctcgaggatgtcaaccgcatgtcacctggggcgctggccattatcttcgcaccctgcctcctgcgctgccctgacaactcggacccgctgaccagcatgaaggacgtcctcaagatcaccacgtgcgtggagatgctgatcaaggagcagatgaggaaatacaaagtgaagatggaggagatcagccaactggaggctgcagagagtatcgccttccgcaggctttcgctcctgcgacaaaatgctccatggcctctcaaactggggttttcgtctccctatgagggggtcctgaacaagagccccaagacccgggacatccaggaggaggagctggaggtgctgctggaggaggaggcagccggcggcgatgaggaccgggaaaaggagattctcattgaacggatccagtccatcaaggaggagaaggaggacatcacctaccggctgccggagctggacccaaggggctcggacgaggagaacctggactcggagacgtcggccagcaccgagagcctgctggaggagcgggccgggcggggggcctcggaaggtcagtattaagggccccctgcgcctgctctcccttgccccggcgcgcccaccccgagccccctccccaccgtggccgcccctccacgacgaaggccgtcgtccttcgtaacggtcagagtgaagaccccccggcggacccccatcatgcccacggccaacatcaagctcccaccaggcctgccctcccacctgcctcgctgggcaccgggtgcccgggaggcggctgccccagtgcggcgccgggagccacctgcccgccgcccggaccagatacattccgtgtacatcacgcccggggcagacctgccagtgcagggcgccctggagcccctagaagaggatggccagccacctggggccaagcggaggtactcggatcccccaacgtactgcctgccccccgcctcgggccagaccaatggctgagagccacagctgacaaagtctgcatgtccgaggacggcccctgcactggagctgggcgccagagctgcagagctagtgttcggccctcagagaaggatccagaatcaaaagctcaagagtgacgtgaggtgggcaccggccccaagtgcagagtcaaggcagggagaggccggctggagccaggccccctcgcacgcagcccccaaatcatggacgcacctgtggggagcaccacatctccacctgcggcctcacatctccccactcccctttttgtacgtttaactgtttctttgtacgtggtttacgtaactttaaactgtaacagccttaatggaagaccaaatggttttttatatgtgtatgtacaaagttttctattaacgctgcccgtctcccttataacctggacgtgagctgtcagagcagaagccactaggccactgcgcgtctgaggctcagaccctgctgtggttggcttggggtggccaatgggctgggaccctccatgagagttttggacacttgggtcacctgacccgtgcctctctgacacatgtctccggggggcagccacctggccaatgtgcatttttgcacatgctggaaccttccatgggggtctgggctattggctggagccaggacatgagtcaggggcaccatggacctcacgtgccagggagacttgaatgtggctgtcactcttccggacgccaagggctgcaggaggctgcttttggcactacccaccccgtgtgacagaataggagccagcgactcaggactgctcacgggtcaggagggcaacgcctgaagtcagacctccctataggtcaacagggacaacctggggatctctggagcagggccctcctctctcaggcttggcccactcccccagacacctggacacgtggccacaaatctgggacaaggggcccccgcacagcatgaaataaaaagtgcctgagaagtgtgtgca

SEQ ID NO: 186 - DNA, 6735 bp, Homo sapiens
  misc_feature (117)..(117): second gene starts at position 117
atggcgctgagggagctcaaagtgtgtctgctcggggatacaggtgtaggtaaatcgagtattgtgtggcggtttgtggaagacagttttgatccaaacatcaacccaacaatagggcttttggaaatgccaagacagcccacaacaacaactccagccggtttgggaaattcatccaagtcagctacctagagagtggcatcgtgagaggagctgtcgtcgagaaatatctgcttgaaaagtctcgcctggtgtctcaggagaaggatgagaggaactaccatgtgttttattatttgttacttggggtcagcgaggaagagcgccaagaatttcagctcaagcagcctgaagattatttctacctcaaccagcataacttgaagattgaagatggggaggacctgaagcatgactttgagaggctcaagcaggccatggagatggtgggcttcctccccgccaccaagaagcagatttttgccgtcctctcggccatcctgtacctgggcaacgtcacttataagaagagagctacaggccgagaggaagggttggaggtcgggccacccgaggtgctggacaccctgtcgcagcttctgaaggtgaagcgagaaatcttggtggaggttctgaccaaaagaaaaacggtgaccgtcaacgacaagcttatccttccctacagcctcagcgaggccatcactgcccgcgactccatggccaagtctctgtacagcgccctgttcgactggattgtgctgcggatcaaccacgcactcctcaacaagaaggacgtggaagaggcagtctcgtgcctgtccattggggtcctggacatcttcgggtttgaagacttcgagaggaacagctttgagcagttctgcatcaactacgccaatgagcagctgcagtattacttcaaccagcacatcttcaagctggagcaggaggaatatcagggcgaggggatcacgtggcacaacatcggctacacagacaatgtcggctgcatccatctcatcagcaagaaacccacgggcctcttctacctgctggacgaggagagcaacttcccccacgccacgagccagaccctgctggccaagttcaaacagcaacatgaggacaataagtacttcctgggcaccccggtcatggagccagctttcatcatccagcacttcgcagggaaggtgaaatatcagatcaaggacttccgggagaagaacatggactacatgcggccagacatcgtggccctgctgcggggcagtgacagctcctacgtgcgggagctcatcggcatggaccccgtggccgtgttccgctgggccgtgctccgggctgctatccgggccatggcagtgcttcgggaggccggacgcctgcgggccgagagggccgaaaaggctgcaggtatgagcagccctggtgcccaaagtcacccagaagagctgccaagaggagccagcaccccttcggaaaaactttaccgcgatttgcataaccaaatgatcaagagcatcaaaggattgccctggcagggcgaggacccccgtagccttctccagtccctcagtcggctccagaaaccccgcgccttcatcctgaaaagtaaaggtatcaaacaaaagcagatcattccaaagaacctactggactccaagtccctgaaactcatcatcagcatgactctgcacgaccgcaccaccaagtccctactgcacctgcacaagaagaaaaagccaccaagcatcagcgcccagttccagacatcccttaacaagctcttggaggcactggggaaggcggagcccttctttatccgctgcatccgttccaatgctgaaaagaaagagctgtgctttgacgacgagctggtcctgcagcagctgcgctacaccggcatgctggagaccgtgcgcatccggaggtcagggtacagcgccaagtacacgttccaggatttcaccgagcagttccaggtgctcctgcccaaggatgcccagccctgcagggaggtcatctccaccctcctggagaaaatgaagatagacaagaggaactaccagatcgggaagaccaaggtcttcctgaaggagacggagcggcaagccctgcaggagacgctgcaccgggaggtggtgcggaaaatcctgctgctgcagagctggttccggatggtgctggagcgtcggcacttcctgcagatgaagcgggccgccgtcaccatccaggcctgctggcggtcctaccgggtccggagggcgctggagaggacgcaggctgccgtgtacctccaggcctcatggaggggctactggcagcggaagctctaccggcaccagaaacagagcatcatccgcctgcagagcctgtgtcgggggcacctgcagcgcaagagcttcagccagatgatctcggagaagcagaaggcagaagagaaggagagggaagccctggaagccgcaagagcaggtgctgaggagggcggacagggtcaggcggctggagggcagcaggtagctgagcaggggccggagccagcggaggatggcgggcacctggcatcggagcctgaggtgcagccaagtgacaggtcccccctagagcactcctcacctgagaaggaggccccaagcccagagaagactctcccaccccagaaaaccgtggcggctgaaagtcacgagaaagtccccagcagccgggagaagcgtgagtcgcgtcggcaaagagggctggagcacgtcaagttccagaacaaacacatccagtcctgcaaggaggagagtgccctcagagaaccttccagaagggtcacccaggagcaaggggtgagtctcctggaagacaaaaaggagagcagagaagatgaaacccttctagtcgtagagacggaggctgagaacacatctcaaaagcagcccacagagcaaccccaggccatggcagttggcaaggtctctgaagaaactgagaagacgctgcccagtgggagccccaggcctggccagttggagcggccgaccagcctggccctggacagcagggtcagcccaccggcccctggcagcgcccccgagacccccgaggacaagagcaaaccatgtggcagcccaagggttcaggaaaagcccgacagccccggaggctccacgcagatccagcggtacctggacgccgagcggctggccagcgccgtggaactgtggcggggcaagaagctggtggccgccgccagccctagtgccatgctcagccagtccctggacctcagcgacagacaccgggccacaggggccgccctcacgcccacagaggagaggcgcacctccttctccacgagcgacgtctccaagctcctcccgtccctggccaaggctcagcctgcagcagaaaccacggacggagagcgaagtgcgaaaaagccagctgtccagaagaagaagccaggcgacgcatcctccctcccagacgcagggctgtccccgggctctcaggtcgactctaaatccacgtttaagaggctttttctgcataaaaccaaggataaaaaatacagcctggagggcgcagaggagctggagaatgcagtgtccgggcacgtggtgctggaagccaccaccatgaagaagggcctggaagccccctccggacagcagcatcgccacgctgcaggtgagaagcgcaccaaggaaccaggaggcaaagggaagaagaaccgaaatgtcaagattgggaagatcacagtgtcagagaagtggcgggaatcggtgttccgccagatcaccaacgccaatgagctcaagtacctggacgagttcctgctcaacaagataaatgacctccgttcccagaagacgcccattgagagcttgtttatcgaagccaccgagaagttcaggagcaacatcaaaacgatgtactctgtcccgaacgggaagatccacgtgggctacaaggatctgatggagaactaccagatcgtcgtcagcaacctggccactgagcgtggccagaaggacaccaacctggtcctcaacctcttccagtcactgctagatgagttcacccgtggctacaccaagaacgacttcgagccagtgaagcagagcaaagctcagaagaagaagcggaagcaggagcgtgctgtccaggagcacaacgggcacgtgttcgccagctaccaggttagcatcccgcagtcgtgcgagcagtgcctctcctatatctggctcatggacaaggccctgctctgcagcgtgtgcaagatgacctgccacaagaagtgcgtgcacaagattcagagccactgctcctacacctacgggaggaagggcgagccaggcgttgagcctggccacttcggcgtgtgcgtagacagcctgaccagcgacaaggcctcggtgcccatcgtgctggagaagctcctggaacacgtggagatgcacggcctgtacaccgagggcctctaccgcaagtcgggtgctgccaaccgcactcgggagctccggcaggcgctgcagacagaccccgcagcagtcaagctggagaacttccccatccacgccatcacaggggtgctgaagcagtggctgcgggagctgcccgagcccctcatgaccttcgcacagtacggcgacttcctccgagccgtcgagctgccggagaagcaggagcagctggctgccatctatgccgtcctggagcaccttccagaagccaaccacaactccctggagagactcatcttccaccttgtcaaggtggccctgctcgaggatgtcaaccgcatgtcacctggggcgctggccattatcttcgcaccctgcctcctgcgctgccctgacaactcggacccgctgaccagcatgaaggacgtcctcaagatcaccacgtgcgtggagatgctgatcaaggagcagatgaggaaatacaaagtgaagatggaggagatcagccaactggaggctgcagagagtatcgccttccgcaggctttcgctcctgcgacaaaatgctccatggcctctcaaactggggttttcgtctccctatgagggggtcctgaacaagagccccaagacccgggacatccaggaggaggagctggaggtgctgctggaggaggaggcagccggcggcgatgaggaccgggaaaaggagattctcattgaacggatccagtccatcaaggaggagaaggaggacatcacctaccggctgccggagctggacccaaggggctcggacgaggagaacctggactcggagacgtcggccagcaccgagagcctgctggaggagcgggccgggcggggggcctcggaagggccccctgcgcctgctctcccttgccccggcgcgcccaccccgagccccctccccaccgtggccgcccctccacgacgaaggccgtcgtccttcgtaacggtcagagtgaagaccccccggcggacccccatcatgcccacggccaacatcaagctcccaccaggcctgccctcccacctgcctcgctgggcaccgggtgcccgggaggcggctgccccagtgcggcgccgggagccacctgcccgccgcccggaccagatacattccgtgtacatcacgcccggggcagacctgccagtgcagggcgccctggagcccctagaagaggatggccagccacctggggccaagcggaggtactcggatcccccaacgtactgcctgccccccgcctcgggccagaccaatggctgagagccacagctgacaaagtctgcatgtccgaggacggcccctgcactggagctgggcgccagagctgcagagctagtgttcggccctcagagaaggatccagaatcaaaagctcaagagtgacgtgaggtgggcaccggccccaagtgcagagtcaaggcagggagaggccggctggagccaggccccctcgcacgcagcccccaaatcatggacgcacctgtggggagcaccacatctccacctgcggcctcacatctccccactcccctttttgtacgtttaactgtttctttgtacgtggtttacgtaactttaaactgtaacagccttaatggaagaccaaatggttttttatatgtgtatgtacaaagttttctattaacgctgcccgtctcccttataacctggacgtgagctgtcagagcagaagccactaggccactgcgcgtctgaggctcagaccctgctgtggttggcttggggtggccaatgggctgggaccctccatgagagttttggacacttgggtcacctgacccgtgcctctctgacacatgtctccggggggcagccacctggccaatgtgcatttttgcacatgctggaaccttccatgggggtctgggctattggctggagccaggacatgagtcaggggcaccatggacctcacgtgccagggagacttgaatgtggctgtcactcttccggacgccaagggctgcaggaggctgcttttggcactacccaccccgtgtgacagaataggagccagcgactcaggactgctcacgggtcaggagggcaacgcctgaagtcagacctccctataggtcaacagggacaacctggggatctctggagcagggccctcctctctcaggcttggcccactcccccagacacctggacacgtggccacaaatctgggacaaggggcccccgcacagcatgaaataaaaagtgcctgagaagtgtgtgca

SEQ ID NO: 187 - DNA, 761 bp, Homo sapiens
  misc_feature (225)..(225): second gene starts at position 225
acttccgctcggggcggcggcggtggcggaagtgggagcgggcctggagtcttggccataaagcctgaggcggcggcagcggcggagttggcggcttggagagctcgggagagttccctggaaccagaacttggaccttctcgcttctgtcctccgtttagtctcctcctcggcgggagccctcgcgacgcgcccggcccggagcccccagcgcagcggccgcgagtgatgacagacctaatgctctattaagttcacctgcaacagaaacagttcatcattcccctgcatattcttttcctgctgctatccagagaaatcagcctcagcgccctgaaagcttccttttccgagcaggtgtcagggcagaaaccaacaaaggtcatgcttcaccccttcctccatctgctgcacctaccactgattctacagattccataacaggacagaattcaagacagagagaagaagagctggaattaatagaccaactgcgtaaacatattgagtaccggttgaaagtgtctctaccttgtgatctcggagcagctctaactgacggtgttgttctttgccatttggccaatcatgtgcgacctcgatctgtcccaagcattcatgttccctcaccagctgtagtaagttgataatcctaaaaagccttggctattcatcagacatttgttaagcacagtggacagacatttcttaagcattgtgctagatattaaggatacagatataaagagtccagtctctac

SEQ ID NO: 188 - DNA, 1970 bp, Homo sapiens
  misc_feature (1103)..(1103): second gene starts at position 1103
atgggcagccaggaggtgctgggccacgcggcccggctggcctcctccggtctcctcctgcaggtgttgtttcggttgatcacctttgtcttgaatgcatttattcttcgcttcctgtcaaaggaaatcgttggcgtagtaaatgtaagactaacgctgctttactcaaccaccctcttcctggccagagaggccttccgcagagcatgtctcagtgggggcacccagcgagactggagccagaccctcaacctgctgtggctaacagtccccctgggtgtgttttggtccttattcctgggctggatctggttgcagctgcttgaagtgcctgatcctaatgttgtccctcactatgcaactggagtggtgctgtttggtctctcggcagtggtggagcttctaggagagcccttttgggtcttggcacaagcacatatgtttgtgaagctcaaggtgattgcagagagcctgtcggtaattcttaagagcgttctgacagcttttctcgtgctgtggttgcctcactggggattgtacattttctctttggcccagcttttctataccacagttctggtgctctgctatgttatttatttcacaaagttactgggttccccagaatcaaccaagcttcaaactcttcctgtctccagaataacagatctgttacccaatattacaagaaatggagcgtttataaactggaaagaggctaaactgacttggagttttttcaaacagtctttcttgaaacagattttgacagaaggcgagcgatatgtgatgacatttttgaatgtattgaactttggtgatcagggtgtgtatgatatagtgaataatcttggctcccttgtggccagattaattttccagccaatagaggaaagtttttatatattttttgctaaggtgctggagaggggaaaggatgccacacttcagaagcaggaggacgttgctgtggctgctgcagtcttggagtccctgctcaagctggccctgctggccggcctgaccatcactgtttttggctttgcctattctcagctggctctggatatctacggagggaccatgcttagctcaggatccggtgtgagtcatcctgttctaaagcaagttgctgaacagtttctcaacatgaggggtgggcttggtttatctggtgcaaaggccaactaccgtggaggtgaaatccgagaacagaatggagacagtcttgtccatgctgcttttgtagcagaaagtgctgtcgcgggaagtgcagaggcaaatgcatttagtgttcttcagcatgtcctcggtgctgggccacatgtcaagaggggcagcaacaccaccagccatctgcaccaggctgttgccaaggcaactcagcagccatttgatgtttctgcatttaatgccagttactcagattctggactctttgggatttatactatctcccaggccacagctgctggagatgttatcaaggctgcctataatcaagtaaaaacaatagctcaaggaaacctttccaacacagatgtccaagctgccaagaacaagctgaaagctggatacctaatgtcagtggagtcttctgagtgtttcctggaagaagtcgggtcccaggctctagttgctggttcttacatgccaccatccacagtccttcagcagattgattcagtggctaatgctgatatcataaatgcggcaaagaagtttgtttctggccagaagtcaatggcagcaagtggaaatttgggacatacaccttttgttgatgagttgtaatactgatgcacacattacaggagagagctgaacgttctctcagcccagagcagcaaacacatgaaagtcagaagtctctaatatatcatttgtcttttttccagtgaggtaaaataaggcataaatgcaggtaattattcccagctgacctaaagtcaataaaacattctgtttaa

SEQ ID NO: 189 - DNA, 4994 bp, Homo sapiens
  misc_feature (177)..(177): second gene starts at position 177
atgtcggctcctgtcgggccccggggccgcctggctcccatcccggcggcctctcagccgcctctgcagcccgagatgcctgacctcagccacctcacggaggaggagaggaaaatcatcctggccgtcatggataggcagaagaaagaagaggagaaggagcagtccgtgctcaatgttctttcagaggaccaagacagttacctgtgtaatgtcaccttgtttaggaaggcagttgatgacttcagacacaaagccagagaaaacaaattcattgttcgtgacttccagtataatgaagaggagatgaaagcagataaagaagaaatgaacaggctttctactgataagaaaaaacaatttggaccacttgtacggtggctgaaagtgaattttagtgaagcatttattgcatggattcacgtgaaagcattacgggttttcgttgagtctgttttaaggtatggcttgccagtgaacttccaagcaatgctacttcagcccaataagaaaactttgaagaaactgagagaagtattacatgaattgtataaacatctagacagcagtgcagcagctattattgatgctcctatggatattccaggtttaaacctgagtcaacaagaatactacccctatgtgtactacaagattgattgcaacttgctggaattcaagtgaaaatgggctcctcccccgacaatcctgtccttgtgtttgtgtgtgctaacagaaataagttgcagtatggtcgtacttttaactctagtatcctttgcttgcttcttacgccctttcctaggtgaattctcccacagtggtctgtatctcaacattttctttttaaaggaaaaaatatatatatatagtttctttttattgatcaggtctgtaaatgtgtactaaaaaaatcagagtttatttataaacaaaatagtttatttaaagagaaggtctcttccttattgatatcatggtatgcattaattccatttgttactattgtgcacaaaagccctgttcacaggggaatggtgtaaacatttatactgttttgttcactgtatttagtagacataactgttgaatagttactgaatcatgatgtaaagaatatgtgaccatcttcaggtatgggatttctgaacgtttcaaatttcaatcaatgagcactgtcaacacccacaggagagaataaaattacctgtgcaaaggtgtattgtggtgtgtgtaacttaagattacagttctgtttgagagttaaatgatgtcatagctcacttgctatgctgcttccaggattttgttatatgctgaggtgtaaccatttgtgttgtctgactttcgtatgatttaattgagccaaatttgggtcagaacacaaatttgaagatgacttttcagtatatgatgggtatttacatttgaacactagaattttaggtctctcaaataattaagaatagagccagttttgaataaagtctagcagaactatgcagctttagtcatttgttttgtctaagtctgtattttatgtgttgtcttcttaagatctataattttggcatttatgtcatttgtgacatagtctgaaaatagagacattgttggcctttaaaatctcagaaatgaatgacttaatttagtgtcctgaaagagcttttaaaagaggattttgtggcaatgtttctcttactacgtactcacaggtttgcaaatgggaaaaaagtttacatttcagtttaggggcatatctaagctatgctattccctttagaaaattagcctccaaaatcttttgtttcaaaatattatattatttcataaataatttcaagcaaatacagacatccacaatgtagaacatgagagaccccctccctcaatttccacctcccaagggaagtttatgtatttttctaggcccttttctatgtctttacatctctgtctcacacacacacacgtatacacacacacagtttatttttaataaaataggattataccacacacatcctgtcacttgcttttttgcttaagagtatatctaagagaatcctttgtgtcagtgaagctggagctacctcattcttttaactggctgcgtggcgttccattgagtgtctgtcatcatgtgtttagccgagtggatggatagtctgcttgtttttagtttttgctcttaacaaacactgctgcagtcagcatccttgcacagatttctttgtatacttgtattagtatttctgtaagatctgagaagtggaatttgtagggtcataggttatgtacacttaagtttttgacactcactgccaagtcatctgtcagaattctaaactaaagacatgtttggagtgtggatttatcttcagtttttctttggacaagaggaagctgtgaaagattttgctatcagaaaattttggttctttgtcttttgcacatgttctttgagtcttagtatctgtaacgtggcgctactctctctatcatgggggggcatgttttgacattaaattgacttttaagaaaaacatgtcactaacctgaagctcagccacacagtgacttttaaggttttatttagactttactgttgttctcatgagagtaggtacagactgcataaggtttagaatcccagcatatgtctgaaacgacgggactttcactgtgatttccaccagagaaattatagcagagtggctgagcatgtgctctgaggccaggccccagctctgctgctgacgagctgtgtggtcctgggcagagtggtctccgagttccagtccctcctctgtaaaatgggcatgattagagtgcccaccgcattagggatgttggggtgagtcagtgtgaccccacgtgcacagaaagtgctgcgagtggtgcatggtgagaggttgatgcaggtacttagcccttggggaacacaggtagttccttttcactgtgtttaatttgggaaaatccagatccacatcattgtagagtctgagggttagaaggaagtcattgtgtctaacataacaacagagcagtttgtgtcactgagctccagtctgtgctggattattgatattgttggtggcggtcaccattcctggaaagggactgtcccaagccacttaccttcccgaggagtctgctggttctccttgaggatagtgcttagataacagactcattaaacatttactgagtgtctgtcagggatcattcacatccacatcatcctcccggcccctccccgtgttgttcatggagggagtactggcggtccccattttcatgtatggagacttcaggtgaaagaagttaagtgaattctttgttgagtcacaaatcttgagccagtcagaatttgaacctaagatttttgactgctggttgtcacacttcccgccccacactcaactgttgtgtgaatgagccagacacattgcttaacctgagtccgagatggacaatggtataggaaagatattcggtatggagaatcagatgttaacttgtgttgctatttttgttttgttttgttttgttttgtttttgagacaaggtcttgctctgtcacccaggctagagtgcagtggcatgatcagggcttactgcagcctcaccctcgatttcctgggctcaagcaatcctcccacctcagcccccaagtagctgggcctacaggtgcgtgctaccacgcctggccaattttttaaattttagcacagatgaggtctcactatgttgcccgggctggtctcgaactcctgagctcaagggatcctcccgcctcagcctcccaaagtgctggtgttacaggcataagccaccacgcctggcctgtgttgctattatatttggcaggaacccagagtccagaacatttcatctatgatgggttagataatgtgtctagttgtttgcatgccaatttcagtagcctcagttattcaacctaggagatttttctacctctttactaccctgctgaagttgctcttcagcagaaaatctttgtggaacacattccacactttgaaatcttcgtggaacaaaagatatttgtggaaccaatctttgtggaacatattccagctttttgaatgagtgcatatccagtagtacctttaaagtaacactttgtacataacaaatactcagcaaatgtgaaactttatttgctcttacttcaaaattagtccaaaatgttggaaataaaatataagacattgatctagatatgaggtttttctccttcattctcagctgtcgaagaaatcaaagtagcatatgcacaaggttaaaaaccacatatacaaatactatagaacagcttataatgaaaaccttgcctgcctttataaaaaatgtgattatcttcttctgttaatgtcaataaaagatggtttgtcctagaaggtctataaatggtattatgttctggaggaaacctagcaaaaactttgctagtttagtacttgtctctaaattgatgttcacccatttcaatattgcacttattaatggtctttatttttctagcatagataacaattgattctttagattcatatatggaggtaattcttgctttctaaagaaaggaatatggcacattggaaccattttattcaccagtggatttacccttagagtatttttagatctgagctgatgacttgtgagagaaaaagggaacagagtaaagccatggaagccatgaacagtaagagactgccgcctggcatggtttcttcttctgcagaagatgaaactgaggagaaacaagacaacatccttcataccaggaatggtcaagataatgcaagaagaaaaaagctttcaaacaaatcagaaggcagtcaacaaacagaaagggggacattccttccctggcagttactcaaaactgaaattgcttattgtgtacaccggggcttgtacttggggaatttaataaaaatgctcattaccaagctcca

SEQ ID NO: 190 - DNA, 6153 bp, Homo sapiens
  misc_feature (484)..(484): second gene starts at 484
ctggcgctccctgcgggccccgccgaggccgcctgcgccctgtgccagcgcgcgccccgggaaccggtgcgcgccgactgcggccaccgcttctgtcgggcgtgcgtggtgcgcttctgggccgaggaggacgggcccttcccgtgccccgagtgcgccgacgactgctggcagcgcgccgtggagcccggcaggcccccgctcagccgccgccttctggcgctcgaggaggcggccgcggcgcccgcgcgcgacggcccggccagcgaggccgcgctgcagctgctgtgccgcgccgacgccggcccgctctgcgccgcctgccgtatggctgcgggccccgagccgcccgagtgggaaccgcgctggaggaaggcgctgcgcggcaaggagaacaaggggtctgtggaaatcatgagaaaggacttgaatgacgcccgggacctgcatggccaggcagagtcagcagctgcagtgtggaagtcccaccacggttcgtgaacaaggtccgggcctcaccctttgtggagggagaggacgcccagttcacctgcaccatcgaaggcgccccgtacccgcagatcaggtggtacaaggacggggccctgctgaccactggcaacaagttccagacactgagtgagcctcgcagcggcctgctagtgctggtgatccgggcggccagcaaggaggacctggggctctacgagtgtgagctggtgaaccggctgggctccgcgcgggctagtgcggagctgcgcattcagagccccatgctgcaggcccaggagcagtgtcacagggagcagctcgtggctgcagtggaagacaccaccctggagcgagcggaccaggaggtcacatctgtcctgaagagactgctgggccccaaggcgccaggcccctccacaggggacctcactggccctggcccctgccccaggggggcacccgcactccaggaaaccggctcccagcccccagtcaccggaacttcggaggcacctgccgtgcccccgagggtgccacagcccctcctccacgaaggcccagagcaggagccggaggccattgccagagcccaggaatggactgtgcccattcggatggagggtgcagcctggcccggggcaggcacaggggagctgctctgggacgtccacagccacgtggtcagagagaccacacagaggacctacacataccaggccatcgacacgcacaccgcacggcccccatccatgcaggtaaccatcgaggatgtgcaggcacagacaggcggaacggcccaattcgaggctatcattgagggcgacccacagccctcggtgacctggtacaaggacagcgtccagctggtggacagcacccggcttagccagcagcaagaaggcaccacatactccctggtgctgaggcatgtggcctcgaaggatgccggcgtttacacctgcctggcccaaaacactggtggccaggtgctctgcaaggcagagctgctggtgcttgggggggacaatgagccggactcagagaagcaaagccaccggaggaagctgcactccttctatgaggtcaaggaggagattggaaggggcgtgtttggcttcgtaaaaagagtgcagcacaaaggaaacaagatcttgtgcgctgccaagttcatccccctacggagcagaactcgggcccaggcatacagggagcgagacatcctggccgcgctgagccacccgctggtcacggggctgctggaccagtttgagacccgcaagaccctcatcctcatcctggagctgtgctcatccgaggagctgctggaccgcctgtacaggaagggcgtggtgacggaggccgaggtcaaggtctacatccagcagctggtggaggggctgcactacctgcacagccatggcgttctccacctggacataaagccctctaacatcctgatggtgcatcctgcccgggaagacattaaaatctgcgactttggctttgcccagaacatcaccccagcagagctgcagttcagccagtacggctcccctgagttcgtctcccccgagatcatccagcagaaccctgtgagcgaagcctccgacatttgggccatgggtgtcatctcctacctcagcctgacctgctcatccccatttgccggcgagagtgaccgtgccaccctcctgaacgtcctggaggggcgcgtgtcatggagcagccccatggctgcccacctcagcgaagacgccaaagacttcatcaaggctacgctgcagagagcccctcaggcccggcctagtgcggcccagtgcctctcccacccctggttcctgaaatccatgcctgcggaggaggcccacttcatcaacaccaagcagctcaagttcctcctggcccgaagtcgctggcagcgttccctgatgagctacaagtccatcctggtgatgcgctccatccctgagctgctgcggggcccacccgacagcccctccctcggcgtagcccggcacctctgcagggacactggtggctcctccagttcctcctcctcctctgacaacgagctcgccccatttgcccgggctaagtcactgccaccctccccggtgacacactcaccactgctgcacccccggggcttcctgcggccctcggccagcctgcctgaggaagccgaggccagtgagcgctccaccgaggccccagctccgcctgcatctcccgagggtgccgggccaccggccgcccagggctgcgtgccccggcacagcgtcatccgcagcctgttctaccaccaggcgggtgagagccctgagcacggggccctggccccggggagcaggcggcacccggcccggcggcggcacctgctgaagggcgggtacattgcgggggcgctgccaggcctgcgcgagccactgatggagcaccgcgtgctggaggaggaggccgccagggaggagcaggccaccctcctggccaaagccccctcattcgagactgccctccggctgcctgcctctggcacccacttggcccctggccacagccactccctggaacatgactctccgagcaccccccgcccctcctcggaggcctgcggtgaggcacagcgactgccttcagccccctccgggggggcccctatcagggacatggggcaccctcagggctccaagcagcttccatccactggtggccacccaggcactgctcagccagagaggccatccccggacagcccttgggggcagccagcccctttctgccaccccaagcagggttctgccccccaggagggctgcagcccccacccagcagttgccccatgccctcctggctccttccctccaggatcttgcaaagaggcccccttagtaccctcaagccccttcttgggacagccccaggcaccccctgcccctgccaaagcaagccccccattggactctaagatggggcctggagacatctctcttcctgggaggccaaaacccggcccctgcagttccccagggtcagcctcccaggcgagctcttcccaagtgagctccctcagggtgggctcctcccaggtgggcacagagcctggcccctccctggatgcggagggctggacccaggaggctgaggatctgtccgactccacacccaccttgcagcggcctcaggaacaggcgaccatgcgcaagttctccctgggtggtcgcgggggctacgcaggcgtggctggctatggcacctttgcctttggtggagatgcagggggcatgctggggcaggggcccatgtgggccaggatagcctgggctgtgtcccagtcagaggaggaggagcaggaggaggccagggctgagtcccagtcggaggagcagcaggaggccagggctgagagcccactgccccaggtcagtgcaaggcctgtgcctgaggtcggcagggctcccaccaggagctctccagagcccaccccatgggaggacatcgggcaggtctccctggtgcagatccgggacctgtcaggtgatgcggaggcggccgacacaatatccctggacatttccgaggtggaccccgcctacctcaacctctcagacctgtacgatatcaagtacctcccattcgagtttatgatcttcaggaaagtccccaagtccgctcagccagagccgccctcccccatggctgaggaggagctggccgagttcccggagcccacgtggccctggccaggtgaactgggcccccacgcaggcctggagatcacagaggagtcagaggatgtggacgcgctgctggcagaggctgccgtgggcaggaagcgcaagtggtcctcgccgtcacgcagcctcttccacttccctgggaggcacctgccgctggatgagcctgcagagctggggctgcgtgagagagtgaaggcctccgtggagcacatctcccggatcctgaagggcaggccggaaggtctggagaaggaggggccccccaggaagaagccaggccttgcttccttccggctctcaggtctgaagagctgggaccgagcgccgacattcctaagggagctctcagatgagactgtggtcctgggccagtcagtgacactggcctgccaggtgtcagcccagccagctgcccaggccacctggagcaaagacggagcccccctggagagcagcagccgtgtcctcatctctgccaccctcaagaacttccagcttctgaccatcctggtggtggtggctgaggacctgggtgtgtacacctgcagcgtgagcaatgcgctggggacagtgaccaccacgggcgtcctccggaaggcagagcgcccctcatcttcgccatgcccggatatcggggaggtgtacgcggatggggtgctgctggtctggaagcccgtggaatcctacggccctgtgacctacattgtgcagtgcagcctagaaggcggcagctggaccacactggcctccgacatctttgactgctgctacctgaccagcaagctctcccggggtggcacctacaccttccgcacggcatgtgtcagcaaggcaggaatgggtccctacagcagcccctcggagcaagtcctcctgggagggcccagccacctggcctctgaggaggagagccaggggcggtcagcccaacccctgcccagcacaaagaccttcgcattccagacacagatccagaggggccgcttcagcgtggtgcggcaatgctgggagaaggccagcgggcgggcgctggccgccaagatcatcccctaccaccccaaggacaagacagcagtgctgcgcgaatacgaggccctcaagggcctgcgccacccgcacctggcccagctgcacgcagcctacctcagcccccggcacctggtgctcatcttggagctgtgctctgggcccgagctgctcccctgcctggccgagagggcctcctactcagaatccgaggtgaaggactacctgtggcagatgttgagtgccacccagtacctgcacaaccagcacatcctgcacctggacctgaggtccgagaacatgatcatcaccgaatacaacctgctcaaggtcgtggacctgggcaatgcacagagcctcagccaggagaaggtgctgccctcagacaagttcaaggactacctagagaccatggctccagagctcctggagggccagggggctgttccacagacagacatctgggccatcggtgtgacagccttcatcatgctgagcgccgagtacccggtgagcagcgagggtgcacgcgacctgcagagaggactgcgcaaggggctggtccggctgagccgctgctacgcggggctgtccgggggcgccgtggccttcctgcgcagcactctgtgcgcccagccctggggccggccctgcgcgtccagctgcctgcagtgcccgtggctaacagaggagggcccggcctgttcgcggcccgcgcccgtgaccttccctaccgcgcggctgcgcgtcttcgtgcgcaatcgcgagaagagacgcgcgctgctgtacaagaggcacaacctggcccaggtgcgctgagggtcgccccggccacacccttggtctccccgctgggggtcgctgcagacgcgccaataaaaacgcacagccgggcgag

SEQ ID NO: 191 - DNA, 2525 bp, Homo sapiens
  misc_feature (484)..(484): second gene starts at position 484
ctggcgctccctgcgggccccgccgaggccgcctgcgccctgtgccagcgcgcgccccgggaaccggtgcgcgccgactgcggccaccgcttctgtcgggcgtgcgtggtgcgcttctgggccgaggaggacgggcccttcccgtgccccgagtgcgccgacgactgctggcagcgcgccgtggagcccggcaggcccccgctcagccgccgccttctggcgctcgaggaggcggccgcggcgcccgcgcgcgacggcccggccagcgaggccgcgctgcagctgctgtgccgcgccgacgccggcccgctctgcgccgcctgccgtatggctgcgggccccgagccgcccgagtgggaaccgcgctggaggaaggcgctgcgcggcaaggagaacaaggggtctgtggaaatcatgagaaaggacttgaatgacgcccgggacctgcatggccaggcagagtcagcagctgcagtgtggaagtcccaccacggttcgtgaacaaggtccgggcctcaccctttgtggagggagaggacgcccagttcacctgcaccatcgaaggcgccccgtacccgcagatcaggtggtacaaggacggggccctgctgaccactggcaacaagttccagacactgagtgagcctcgcagcggcctgctagtgctggtgatccgggcggccagcaaggaggacctggggctctacgagtgtgagctggtgaaccggctgggctccgcgcgggctagtgcggagctgcgcattcagagccccatgctgcaggcccaggagcagtgtcacagggagcagctcgtggctgcagtggaagtcactgagcaagagactaaagtccccaagaaaaccgtcatcatagaagagaccatcaccactgtggtgaagagcccacgtggccaacgacggtcccccagcaagtccccctcccgctcaccttcccgctgctctgccagcccgctgaggccaggcctactggcccccgacctgctgtacctgccaggtgctggccagccccgcaggccggaggcagaaccaggccagaagcccgtggtgcccacactgtatgtgacggaggccgaggcccactctccagctctgcccggactctcggggccccagcccaagtgggtggaggtggaggagaccattgaagtccgggtgaagaagatgggcccgcagggtgtgtctcccaccacagaggtgcccaggagctcatcggggcatctcttcacactgcccggtgcgacccccggaggggaccccaattccaacaactccaacaacaagctgctggcccaggaggcctgggcccagggcacagccatggtcggcgtcagagagccccttgtcttccgcgtggatgccagaggcagtgtggactgggctgcttctggcatgggcagcctggaggaggagggcaccatggaggaggcgggagaggaagagggggaagacggagacgcctttgtgacggaggagtcccaggacacacacagccttggggatcgtgaccccaagatcctcacgcacaacggccgcatgctgacactggctgacctggaagattacgtgcctggggaaggggagaccttccactgtggtggccctgggcctggcgcccctgatgaccctccctgcgaggtctcggtgatccagagagagatcggggagcccacggtggggcagcctgtgctgctcagcgtggggcatgcactgggtccccgaggccctctcggcctctttaggcctgagccccgtggggcgtcaccaccgggaccccaggtccgtagccttgagggcacctccttcctcttgcgggaggccccggctcggcctgtgggcagtgctccctggacgcagtctttctgcacccgcatccggcgttctgcggacagtggccagagcagcttcaccacagagctttccacccagaccgtcaacttcgggacagtgggggagacggtcacccttcacatctgcccagacagggatggggatgaggcggcacagccctgatgctgctgccatggtggcttggggcagcggggagaaaggagtgtccttgaggcctaggacgctgcccggcctcagcagcagccctgggagcctcctgagggccctccctgtccctggccacgggcccttcttacctcactcaacttcagccaggaggactgggtggtgcttgcaatgttggaatgaccggctcaaagacctcagctctgggctgtttcctgtcagcctggcaggagcctcaggactgtggacgaaggatgtggccttgggcatttgtcctgttcccacatgggcctggtccctccctcctggccccagccacagctgccaggcctgacatggccttgcctctcctgcagtcttggtgactgagacccttgggtggcgcttcccagctctgcaggccctcctggccttttctgcagggtggacacagggtctgtgtgtgggcagcagcccctgtctctcagcaagaataaagcagcttcctgtgca

SEQ ID NO: 192 - DNA, 1845 bp, Homo sapiens
  misc_feature (588)..(588): second gene starts at position 588
atgaggcgacgaaggaggcgggacggcttttacccagccccggacttccgagacagggaagctgaggacatggcaggagtgtttgacatagacctggaccagccagaggacgcgggctctgaggatgagctggaggaggggggtcagttaaatgaaagcatggaccatgggggagttggaccatatgaacttggcatggaacattgtgagaaatttgaaatctcagaaactagtgtgaacagagggccagaaaaaatcagaccagaatgttttgagctacttcgggtacttggtaaagggggctatggaaaggtttttcaagtacgaaaagtaacaggagcaaatactgggaaaatatttgccatgaaggtgcttaaaaaggcaatgatagtaagaaatgctaaagatacagctcatacaaaagcagaacggaatattctggaggaagtaaagcatcccttcatcgtggatttaatttatgcctttcagactggtggaaaactctacctcatccttgagtatctcagtggaggagaactatttatgcagttagaaagagagggaatatttatggaagacactgcctgaaaatcagaaagtgcagttgacagaagggtcacgttcacactacaatatcaattgcaactcaacaaggactccagtcgccaaggagcttaattataatctagacactcatacgtctactgggaggatcaaggcagctgagaagaaggaagcgtgtaatgtagaaagcaacagaaaaaaggaaacggaacttcttggctctttttctaaaaatgaatcagttcccgaagttgaagccctgctggcaagattacgagctttataagttaaactggtttttaaaaaaaatgattaagccaaatataaagccatgctctaaactataacacttgaaaaaattgcttttatgtaagtgactttatatagttttaaattatgatatatattagaaaaataaagctaaatatatgattgcaatgctttttctatgtactggaggttttggtttattcaagattgtaccgggctttaatccttttttttttttttttgtctcctggtattcctcagttctttatttggtggttaaattatacatattgctttagagagcaggtaggtggccatgtgttcagcagtgtgtccttaagaaaataccatctttctaagccactggaatttttactttactatttttaacattaatggatgtcaggtcatcaacctcaagtctttacatatccatgtatattccatatatattgtttatataggcccaagtttctccttaattgggatctatatactaccagcacaacatcaaaaacatgtaattgaatacatcagagctatatatgtaaggaaatgactggtgaccccattatcatcattgttgaattcatgttaagtagaccctctaggggaccataaggcaattgagcacataacgaaaaatgatgcaataagaatgtatgcactctctttgccaaatgcatgtgcttttgtgtaacgtggatgtaaacagaattgcagtgctgccgaaattcttgatcttggctaagagagtatttttccccttgtaattatgactctgagataaaattgccattttgaaatttccaaagtaacaactttttttattttatgaataaacttgggattgcaatttctctgatctgacaatcaataactttaacaaagatctaaataagtgtttcaaggaaagttttcctaagcaaatgtaatattacctcatttgggcatcattactctgttaattctatatcaaaggaaataaacttgctacttgcactaaatgaa

SEQ ID NO: 193 - DNA, 1242 bp, Homo sapiens
  misc_feature (142)..(142): second gene starts at position 142
atgaggcgacgaaggaggcgggacggcttttacccagccccggacttccgagacagggaagctgaggacatggcaggagtgtttgacatagacctggaccagccagaggacgcgggctctgaggatgagctggaggagggggccaagtataaggagcgagggacggtcttggctgaggaccagctagcccagatgtcaaagcagttggacatgttcaagaccaacctggaggaatttgccagcaaacacaagcaggagatccggaagaatcctgagttccgtgtgcagttccaggacatgtgtgcaaccattggcgtggatccgctggcctctggaaaaggattttggtctgagatgctgggcgtgggggacttctattacgaactaggtgtccaaattatcgaagtgtgcctggcgctgaagcatcggaatggaggtctgataactttggaggaactacatcaacaggtgttgaagggaaggggcaagttcgcccaggatgtcagtcaagatgacctgatcagagccatcaagaaactaaaggcacttggcactggcttcggcatcatccctgtgggcggcacttacctcattcagtctgttccagctgagctcaatatggatcacaccgtggtgctgcagctggcagagaagaatggctacgtgactgtcagtgagatcaaagccagtcttaaatgggagaccgagcgagcgcggcaagtgctggaacacctgctgaaggaagggttggcgtggctggacttacaggccccaggggaggcccactactggctgccagctctcttcactgacctctactcccaggagattacagctgaggaggccagagaagccctcccctgactgcatgtggaagggcacacagcagcaggcagggaggaggcggaggtggcaaataaacctgggcaattttgtttatacaaaaaatagaaaaaaagttccaagtttttctttcttccctcattcttttatttttgaaaagtgccttcacgttgcatttttattggaggaaaacctcgctcgttcagtaagcataatctgattaacacagagaacggcaagcacatataaaatgatttttgtaggtcatctgcaagttcatggaagagctgggcctagaatgtgggttgtttcctggcctgtctagtctttgtagctgtgagacatagattacagcctatgctaattcaaaccttttaaataaaatgttccttatctcaa

SEQ ID NO: 194 - DNA, 6385 bp, Homo sapiens
  misc_feature (76)..(76): second gene starts at position 76
atggtgttgctaacaatgatcgcccgagtggcggacgggctcccgctggccgcctcgatgcaggaggacgaacagctctaaagtctttctggaaattgacaaccgccagtgtgttcaagactcagaccactgcttcaagaacacggatgcagcagcagctctcctggcctctcacgccatacaggggaccctgtcataccctcttgtgtctgtcgtcagtgaatccctgactccagaacgcactcagctcctctatctccttgctgttgctgttgtcatcattctgtttattattctgctgggggtaatcatggcaaaacgaaagcgtaagcatggctctctctggctgcctgaaggtttcactcttcgccgagatgcaagcaatcacaagcgtcgtgagccagtgggacaggatgctgtggggctgaaaaatctctcagtgcaagtctcagaagctaacctaattggtactggaacaagtgaacactgggtcgatgatgaagggccccagccaaagaaagtaaaggctgaagatgaggccttactctcagaagaagatgaccccattgatcgacggccatggacacagcagcaccttgaagctgcagacatccgtaggacaccatcgctggctctcacccctcctcaggcagagcaggaggtggatgtgttagatgtgaatgtccgtggcccagatggctgcaccccattgatgttggcttctctccgaggaggcagctcagatttgagtgatgaagatgaagatgcagaggactcttctgctaacatcatcacagacttggtctaccagggtgccagcctccaggcccagacagaccggactggtgagatggccctgcaccttgcagcccgctactcacgggctgatgctgccaagcgtctcctggatgcaggtgcagatgccaatgcccaggacaacatgggccgctgtccactccatgctgcagtggcagctgatgcccaaggtgtcttccagattctgattcgcaaccgagtaactgatctagatgccaggatgaatgatggtactacacccctgatcctggctgcccgcctggctgtggagggaatggtggcagaactgatcaactgccaagcggatgtgaatgcagtggatgaccatggaaaatctgctcttcactgggcagctgctgtcaataatgtggaggcaactcttttgttgttgaaaaatggggccaaccgagacatgcaggacaacaaggaagagacacctctgtttcttgctgcccgggaggggagctatgaagcagccaagatcctgttagaccattttgccaatcgagacatcacagaccatatggatcgtcttccccgggatgtggctcgggatcgcatgcaccatgacattgtgcgccttctggatgaatacaatgtgaccccaagccctccaggcaccgtgttgacttctgctctctcacctgtcatctgtgggcccaacagatctttcctcagcctgaagcacaccccaatgggcaagaagtctagacggcccagtgccaagagtaccatgcctactagcctccctaaccttgccaaggaggcaaaggatgccaagggtagtaggaggaagaagtctctgagtgagaaggtccaactgtctgagagttcagtaactttatcccctgttgattccctagaatctcctcacacgtatgtttccgacaccacatcctctccaatgattacatcccctgggatcttacaggcctcacccaaccctatgttggccactgccgcccctcctgccccagtccatgcccagcatgcactatctttttctaaccttcatgaaatgcagcctttggcacatggggccagcactgtgcttccctcagtgagccagttgctatcccaccaccacattgtgtctccaggcagtggcagtgctggaagcttgagtaggctccatccagtcccagtcccagcagattggatgaaccgcatggaggtgaatgagacccagtacaatgagatgtttggtatggtcctggctccagctgagggcacccatcctggcatagctccccagagcaggccacctgaagggaagcacataaccacccctcgggagcccttgccccccattgtgactttccagctcatccctaaaggcagtattgcccaaccagcgggggctccccagcctcagtccacctgccctccagctgttgcgggccccctgcccaccatgtaccagattccagaaatggcccgtttgcccagtgtggctttccccactgccatgatgccccagcaggacgggcaggtagctcagaccattctcccagcctatcatcctttcccagcctctgtgggcaagtaccccacacccccttcacagcacagttatgcttcctcaaatgctgctgagcgaacacccagtcacagtggtcacctccagggtgagcatccctacctgacaccatccccagagtctcctgaccagtggtcaagttcatcaccccactctgcttctgactggtcagatgtgaccaccagccctacccctgggggtgctggaggaggtcagcggggacctgggacacacatgtctgagccaccacacaacaacatgcaggtttatgcgtgagagagtccacctccagtgtagagacataactgacttttgtaaatgctgctgaggaacaaatgaaggtcatccgggagagaaatgaagaaatctctggagccagcttctagaggtaggaaagagaagatgttcttattcagataatgcaagagaagcaattcgtcagtttcactgggtatctgcaaggcttattgattattctaatctaataagacaagtttgtggaaatgcaagatgaatacaagccttgggtccatgtttactctcttctatttggagaataagatggatgcttattgaagcccagacattcttgcagcttggactgcattttaagccctgcaggcttctgccatatccatgagaagattctacactagcgtcctgttgggaattatgccctggaattctgcctgaattgacctacgcatctcctcctccttggacattcttttgtcttcatttggtgcttttggttttgcacctctccgtgattgtagccctaccagcatgttatagggcaagacctttgtgcttttgatcattctggcccatgaaagcaactttggtctcctttcccctcctgtcttcccggtatcccttggagtctcacaaggtttactttggtatggttctcagcacaaacctttcaagtatgttgtttctttggaaaatggacatactgtattgtgttctcctgcatatatcattcctggagagagaaggggagaagaatacttttcttcaacaaattttgggggcaggagatcccttcaagaggctgcaccttaatttttcttgtctgtgtgcaggtcttcatataaactttaccaggaagaagggtgtgagtttgttgtttttctgtgtatgggcctggtcagtgtaaagttttatccttgatagtctagttactatgaccctccccacttttttaaaaccagaaaaaggtttggaatgttggaatgaccaagagacaagttaactcgtgcaagagccagttacccacccacaggtccccctacttcctgccaagcattccattgactgcctgtatggaacacatttgtcccagatctgagcattctaggcctgtttcactcactcacccagcatatgaaactagtcttaactgttgagcctttcctttcatatccacagaagacactgtctcaaatgttgtacccttgccatttaggactgaactttccttagcccaagggacccagtgacagttgtcttccgtttgtcagatgatcagtctctactgattatcttgctgcttaaaggcctgctcaccaatctttctttcacaccgtgtggtccgtgttactggtatacccagtatgttctcactgaagacatggactttatatgttcaagtgcaggaattggaaagttggacttgttttctatgatccaaaacagccctataagaaggttggaaaaggaggaactatatagcagcctttgctattttctgctaccatttcttttcctctgaagcggccatgacattccctttggcaactaacgtagaaactcaacagaacattttcctttcctagagtcaccttttagatgataatggacaactatagacttgctcattgttcagactgattgcccctcacctgaatccactctctgtattcatgctcttggcaatttctttgactttcttttaagggcagaagcattttagttaattgtagataaagaatagttttcttcctcttctccttgggccagttaataattggtccatggctacactgcaacttccgtccagtgctgtgatgcccatgacacctgcaaaataagttctgcctgggcattttgtagatattaacaggtgaattcccgactcttttggtttgaatgacagttctcattccttctatggctgcaagtatgcatcagtgcttcccacttacctgatttgtctgtcggtggccccatatggaaaccctgcgtgtctgttggcataatagtttacaaatggttttttcagtcctatccaaatttattgaaccaacaaaaataattacttctgccctgagataagcagattaagtttgttcattctctgctttattctctccatgtggcaacattctgtcagcctctttcatagtgtgcaaacattttatcattctaaatggtgactctctgcccttggacccatttattattcacagatggggagaacctatctgcatggacctctgtggaccacagcgtacctgcccctttctgccctcctgctccagccccacttctgaaagtatcagctactgatccagccactggatattttatatcctcccttttccttaagcacaatgtcagaccaaattgcttgtttctttttcttggactactttaatttggatcctttgggtttggagaaagggaatgtgaaagctgtcattacagacaacaggtttcagtgatgaggaggacaacactgcctttcaaactttttactgatctcttagattttaagaactcttgaattgtgtggtatctaataaaagggaaggtaagatggataatcactttctcatttgggttctgaattggagactcagtttttatgagacacatcttttatgccatgtatagatcctcccctgctatttttggtttatttttattgttataaatgctttctttctttgactcctcttctgcctgcctttggggataggtttttttgtttgtttatttgcttcctctgttttgttttaagcatcattttcttatgtgaggtggggaagggaaaggtatgagggaaagagagtctgagaattaaaatattttagtataagcaattggctgtgatgctcaaatccattgcatcctcttattgaatttgccaatttgtaatttttgcataataaagaaccaaaggtgtaatgttttgttgagaggtggtttagggattttggccctaaccaatacattgaatgtatgatgactatttgggaggacacatttatgtacccagaggcccccactaataagtggtactatggttacttccttgtgtacatttctcttaaaagtgatattatatctgtttgtatgagaaacccagtaaccaataaaatgaccgcatattcctgactaaacgtagtaaggaaaatgcacactttgtttttacttttccgtttcattctaaaggtagttaagatgaaatttatatgaaagcatttttatcacaaaataaaaaaggtttgccaagctcagtggtgttgtattttttattttccaatactgcatccatggcctggcagtgttacctcatgatgtcataatttgctgagagagcaaattttcttttctttctgaatcccacaaagcctagcaccaaacttctttttttcttcctttaattagatcataaataaatgatcctggggaaaaagcatctgtcaaataggaaacatcacaaaactgagcactcttctgtgcactagccatagctggtgacaaacagatggttgctcagggacaaggtgccttccaatggaaatgcgaagtagttgctatagcaagaattgggaactgggatataagtcataatattaattatgctgttatgtaaatgattggtttgtaacattccttaagtgaaatttgtgtagaacttaatatacaggattataaaataatattttgtgtataaatttgttataagttcacattcatacatttatttataaagtcagtgagatatttgaacatgaa

SEQ ID NO: 195 - DNA, 3333 bp, Homo sapiens
  misc_feature (982)..(982): second gene starts at position 982
atggctcgactccccgctggcattcgcttcatcatctcattctccagggatcagtggtacagagccttcatttttattttgacatttctgctgtatgcaagttttcacttatctcgaaagcctatcagcatagttaagggtgagctccacaagtactgcactgcttgggatgaagctgacgtcaggttcagcagccagaacaggaagtctgggtccgctgccccccaccagctccctgacaatgagaccgactgtggctgggcaccgtttgataagaacaactatcagcagctgcttggggccctggactactccttcctgtgcgcctatgccgtggggatgtacctcagtggcatcattggggagcgcctgccgattaggtattacctaactttcgggatgctcgccagcggagccttcaccgccctgttcggcttagggtatttctacaacatccacagtttcggattctacgtggtaactcaggtcatcaacgggctggtgcagaccaccggctggcccagcgtcgtcacctgcctcggcaactggtttggaaaaggaaggagaggtttgattatgggggtctggaactcccacacctccgtgggcaacatcttggggtcattgatcgctggctactgggtgtccacatgctggggcctgtccttcgtcgtgcctggagccatcgtggcagccatggggatagtgtgctttctcttcctcattgaacatccgaacgacgtcaggtgctcctccaccctggtgacgcactcaaaaggctatgagaatggtacaaacagattgagactccagaagcaaatcttgaagagcgaaaagaacaagcctctggacccagagatgcagtgcctgctgctctcagatgggaagggctccatccacccgaaccacgtcgtcattctccccggggacggtgggagtggcacggccgccatcagcttcacaggggccttgaaaattccagtgtcggcacatctgaagcttcaggagaaggatgaaggcagaagggaaatggtcaaggagatactgacagcgctgggcttgctgtcttgcgccaacacgcggaccgggagcctgtcaggtggtcagcgcaagcgcctggccatcgcgctggagctggtgaacaaccctccagtcatgttcttcgatgagcccaccagcggcctggacagcgcctcctgcttccaggtggtctcgctgatgaaagggctcgctcaagggggtcgctccatcatttgcaccatccaccagcccagcgccaaactcttcgagctgttcgaccagctttacgtcctgagtcaaggacaatgtgtgtaccggggaaaagtctgcaatcttgtgccatatttgagggatttgggtctgaactgcccaacctaccacaacccagcagattttgtcatggaggttgcatccggcgagtacggtgatcagaacagtcggctggtgagagcggttcgggagggcatgtgtgactcagaccacaagagagacctcgggggtgatgccgaggtgaacccttttctttggcaccggccctctgaagaggtaaagcagacaaaacgattaaaggggttgagaaaggactcctcgtccatggaaggctgccacagcttctctgccagctgcctcacgcagttctgcatcctcttcaagaggaccttcctcagcatcatgagggactcggtcctgacacacctgcgcatcacctcgcacattgggatcggcctcctcattggcctgctgtacttggggatcgggaacgaagccaagaaggtcttgagcaactccggcttcctcttcttctccatgctgttcctcatgttcgcggccctcatgcctactgttctgacatttcccctggagatgggagtctttcttcgggaacacctgaactactggtacagcctgaaggcctactacctggccaagaccatggcagacgtgccctttcagatcatgttcccagtggcctactgcagcatcgtgtactggatgacgtcgcagccgtccgacgccgtgcgctttgtgctgtttgccgcgctgggcaccatgacctccctggtggcacagtccctgggcctgctgatcggagccgcctccacgtccctgcaggtggccactttcgtgggcccagtgacagccatcccggtgctcctgttctcggggttcttcgtcagcttcgacaccatccccacgtacctacagtggatgtcctacatctcctatgtcaggtatgggttcgaaggggtcatcctctccatctatggcttagaccgggaagatctgcactgtgacatcgacgagacgtgccacttccagaagtcggaggccatcctgcgggagctggacgtggaaaatgccaagctgtacctggacttcatcgtactcgggattttcttcatctccctccgcctcattgcctattttgtcctcaggtacaaaatccgggcagagaggtaaaacacctgaatgccaggaaacaggaagattagacactgtggccgagggcacgtctagaatcgaggaggcaagcctgtgcccgaccgacgacacagagactcttctgatccaacccctagaaccgcgttgggtttgtgggtgtctcgtgctcagccactctgcccagctgggttggatcttctctccattcccctttctagctttaactaggaagatgtaggcagattggtggtttttttttttttaacatacagaattttaaataccacaactggggcagaatttaaagctgcaacacagctggtgatgagaggcttcctcagtccagtcgctccttagcaccaggcaccgtgggtcctggatggggaactgcaagcagcctctcagctgatggctgcacagtcagatgtctggtggcagagagtccgagcatggagcgattccattttatgactgttgtttttcacattttcatctttctaaggtgtgtctcttttccaatgagaagtcatttttgcaagccaaaagtcgatcaatcgcattcattttaagaaattatacctttttagtacttgctgaagaatgattcagggtaaatcacatactttgtttagagaggcgaggggtttaaccgagtcacccagctggtctcatacatagacagcacttgtgaaggattgaatgcaggttccaggtggagggaagacgtggacaccatctccactgagccatgcagacatttttaaaagctatacaaaaaattgtgagaagacattggccaactctttcaaagtctttctttttccacgtgcttcttattttaagcgaaatatattgtttgtttcttcctaa

SEQ ID NO: 196 - DNA, 3297 bp, Homo sapiens
  misc_feature (982)..(982): second gene starts at position 982
atggctcgactccccgctggcattcgcttcatcatctcattctccagggatcagtggtacagagccttcatttttattttgacatttctgctgtatgcaagttttcacttatctcgaaagcctatcagcatagttaagggtgagctccacaagtactgcactgcttgggatgaagctgacgtcaggttcagcagccagaacaggaagtctgggtccgctgccccccaccagctccctgacaatgagaccgactgtggctgggcaccgtttgataagaacaactatcagcagctgcttggggccctggactactccttcctgtgcgcctatgccgtggggatgtacctcagtggcatcattggggagcgcctgccgattaggtattacctaactttcgggatgctcgccagcggagccttcaccgccctgttcggcttagggtatttctacaacatccacagtttcggattctacgtggtaactcaggtcatcaacgggctggtgcagaccaccggctggcccagcgtcgtcacctgcctcggcaactggtttggaaaaggaaggagaggtttgattatgggggtctggaactcccacacctccgtgggcaacatcttggggtcattgatcgctggctactgggtgtccacatgctggggcctgtccttcgtcgtgcctggagccatcgtggcagccatggggatagtgtgctttctcttcctcattgaacatccgaacgacgtcaggtgctcctccaccctggtgacgcactcaaaaggctatgagaatggtacaaacagattgagactccagaagcaaatcttgaagagcgaaaagaacaagcctctggacccagagatgcagtgcctgctgctctcagatgggaagggctccatccacccgaaccacgtcgtcattctccccggggacggtgggagtggcacggccgccatcagcttcacaggggccttgaaaattccagtgtcggcacatctgaagcttcaggagaaggatgaaggcagaagggaaatggtcaaggagatactgacagcgctgggcttgctgtcttgcgccaacacgcggaccgggagcctgtcaggtggtcagcgcaagcgcctggccatcgcgctggagctggtgaacaaccctccagtcatgttcttcgatgagcccaccagcggcctggacagcgcctcctgcttccaggtggtctcgctgatgaaagggctcgctcaagggggtcgctccatcatttgcaccatccaccagcccagcgccaaactcttcgagctgttcgaccagctttacgtcctgagtcaaggacaatgtgtgtaccggggaaaagtctgcaatcttgtgccatatttgagggatttgggtctgaactgcccaacctaccacaacccagcagattttgtcatggaggttgcatccggcgagtacggtgatcagaacagtcggctggtgagagcggttcgggagggcatgtgtgactcagaccacaagagagacctcgggggtgatgccgaggtgaacccttttctttggcaccggccctctgaagaggactcctcgtccatggaaggctgccacagcttctctgccagctgcctcacgcagttctgcatcctcttcaagaggaccttcctcagcatcatgagggactcggtcctgacacacctgcgcatcacctcgcacattgggatcggcctcctcattggcctgctgtacttggggatcgggaacgaagccaagaaggtcttgagcaactccggcttcctcttcttctccatgctgttcctcatgttcgcggccctcatgcctactgttctgacatttcccctggagatgggagtctttcttcgggaacacctgaactactggtacagcctgaaggcctactacctggccaagaccatggcagacgtgccctttcagatcatgttcccagtggcctactgcagcatcgtgtactggatgacgtcgcagccgtccgacgccgtgcgctttgtgctgtttgccgcgctgggcaccatgacctccctggtggcacagtccctgggcctgctgatcggagccgcctccacgtccctgcaggtggccactttcgtgggcccagtgacagccatcccggtgctcctgttctcggggttcttcgtcagcttcgacaccatccccacgtacctacagtggatgtcctacatctcctatgtcaggtatgggttcgaaggggtcatcctctccatctatggcttagaccgggaagatctgcactgtgacatcgacgagacgtgccacttccagaagtcggaggccatcctgcgggagctggacgtggaaaatgccaagctgtacctggacttcatcgtactcgggattttcttcatctccctccgcctcattgcctattttgtcctcaggtacaaaatccgggcagagaggtaaaacacctgaatgccaggaaacaggaagattagacactgtggccgagggcacgtctagaatcgaggaggcaagcctgtgcccgaccgacgacacagagactcttctgatccaacccctagaaccgcgttgggtttgtgggtgtctcgtgctcagccactctgcccagctgggttggatcttctctccattcccctttctagctttaactaggaagatgtaggcagattggtggtttttttttttttaacatacagaattttaaataccacaactggggcagaatttaaagctgcaacacagctggtgatgagaggcttcctcagtccagtcgctccttagcaccaggcaccgtgggtcctggatggggaactgcaagcagcctctcagctgatggctgcacagtcagatgtctggtggcagagagtccgagcatggagcgattccattttatgactgttgtttttcacattttcatctttctaaggtgtgtctcttttccaatgagaagtcatttttgcaagccaaaagtcgatcaatcgcattcattttaagaaattatacctttttagtacttgctgaagaatgattcagggtaaatcacatactttgtttagagaggcgaggggtttaaccgagtcacccagctggtctcatacatagacagcacttgtgaaggattgaatgcaggttccaggtggagggaagacgtggacaccatctccactgagccatgcagacatttttaaaagctatacaaaaaattgtgagaagacattggccaactctttcaaagtctttctttttccacgtgcttcttattttaagcgaaatatattgtttgtttcttcctaa

SEQ ID NO: 197 - DNA, 3297 bp, Homo sapiens; identical to SEQ ID NO: 196
  misc_feature (982)..(982): second gene starts at position 982

SEQ ID NO: 198 - DNA, 3297 bp, Homo sapiens; identical to SEQ ID NO: 196
  misc_feature (982)..(982): second gene starts at position 982

SEQ ID NO: 199 - DNA, 3297 bp, Homo sapiens; identical to SEQ ID NO: 196

SEQ ID NO: 200 - DNA, 3297 bp, Homo sapiens; identical to SEQ ID NO: 196
  misc_feature (982)..(982): second gene starts at position 982

SEQ ID NO: 201 - DNA, 684 bp, Homo sapiens
  misc_feature (227)..(227): second gene starts at position 227
gaaggatcagaatgttctctctccagtcaactgctggaatctcctcttaaaccaggtgaagcgggaaagcagggaccataccaccctgagtgacatctacctgaataatatcattcctcgatttgtacaagtcagcgaggactcaggaagactctttaaaaagagtaaagaagtcggccagcagctccaagatgatttgatgaaggtcctgaacgagctctactcgatgatgaggagtctgatgaggaagctgtgaagaaaaccaacaaatgtgtactagtctgggagggtacagccaaagaccggagctttggagagatgaagtttaaacagtgtcctacagagaacatggctcgtgagcatttcaaaaagcatggggctgaacactactgggaccttgcgctgagtgaatctgtgttagagtccactgattgagactactgcaagcccttgcctctcctcccttgcctttgtctcttcagtcctctcacttattctatttcccaaccccctcccacttgtttgtgtgatctcagaactgtgccaagcagacactgggacaaagggagaatatcttgctcccctcctgagtcagcctggtgttgccctttattccccttatgtgcatatgattaaagagttatttttaaacttggtgtgatatttttcacacattcgtaagta

SEQ ID NO: 202 - DNA, 684 bp, Homo sapiens; identical to SEQ ID NO: 201
  misc_feature (227)..(227): second gene starts at position 227

SEQ ID NO: 203 - DNA, 684 bp, Homo sapiens; identical to SEQ ID NO: 201
  misc_feature (227)..(227): second gene starts at position 227

SEQ ID NO: 204 - DNA, 1030 bp, Homo sapiens
  misc_feature (153)..(153): second gene starts at position 153
gaacgcaagtcccgcttcgctctcgggggcggactcagcggcggaagtggcgctgccggaagatcttcttccgctctgaggcgctactgaggccgcggagccggactgcggttggggcgggaagagccggggccgtggctgacatggagcagctccagatgaagatgagtgagcgggccgcctcgctgagcaccatggtgcccctgcctcgcagcgcctactggcagcacatcacacggcagcacagcacgggacagctctaccgcttgcaagatgtttccagccctctgaagcttcatcgaacagagacttttccagcctacagatctgagcactgacagtaactgccaagaattgttaacacacttgtgatgtgtcagccacagattcacccaggaggtcacagaatgacagcaagggaaatgacgaccaagagaagaagcttaaagtcctggctaattgtgtggtcattggaaaactctgcaatacaataattttctttattttctttttcttttttaaattcttagtgtaattgaaacgtgctctatagatattgactctgtgttccctcttttacagctggacagaaagaagtcaatgtcacgaaatgattttctattgtagatactttgtcccttgcacttctctgaatctgtccttttgtggattcttgtgattttccttccaagtgtttcagttgtatgacagtcagtattgacaataaaatggcttttaattatttgttatttgtttacaccctattcctcagttattattactgtggttctgattaactactggaaattatatttgattatatcaccaattagttaaatcagtgcttcgactcactcttatctgttctgttcaaaactatttgttcaaagaacccgttagtgttgtttacagggttacagtttctctcacatgctttcctcacccctttacccccctttttgaaagcctttattttgttcggagtctcttcataaaacatttgaaaataaaagatcattcttcacccata

SEQ ID NO: 205 - DNA, 1030 bp, Homo sapiens; identical to SEQ ID NO: 204
  misc_feature (153)..(153): second gene starts at position 153

SEQ ID NO: 206 - DNA, 1030 bp, Homo sapiens; identical to SEQ ID NO: 204
  misc_feature (153)..(153): second gene starts at position 153

SEQ ID NO: 207 - DNA, 1059 bp, Homo sapiens
  misc_feature (316)..(316): second gene starts at position 316
atgtctcttttggattgcttctgcacttcaagaacacaagttgaatcactcagacctgaaaaacagtctgaaaccagtatccatcaatacttggttgatgagccaaccctttcctggtcacgtccatccactagagccagtgaagtactatgttccaccaacgtttctcactatgagctccaagtagaaataggaagaggatttgacaacttgacttctgtccatcttgcacggcatactcccacaggaacactggtaactataaaaattacaaatctggaaaactgcaatgaagaacgcctgaaagctttacagatttctcgaatgctggcagccaaaaccgttttggctatccgttatgatgcttttggtgaggattcaagttctgcaatgggagttgagaacagagccaaattagaggccaggttgagaactttggaagacagagggataagaaaaataagtggaacaggaaaagcattagcaaaaacagaaaaatatgaacacaaaagtgaagtgaagacttacgatccttctggtgactccacacttccaacctgttctaaaaaacgcaaaatagaacaggtagataaagaggatgaaattactgaaaagaaagccaaaaaagccaagattaaagttaaagttgaagaagaggaagaagaaaaagtggcagaagaagaagaaacatctgtgaagaagaagaagaaaaggggtaaaaagaaacacattaaggaagaaccactttctgaggaagaaccatgtaccagcacagcaattgctagtccagagaaaaagaagaaaaagaaaaaaaagagagagaacgaggattaacagaaaggaattacgattatatcacccggacacacatcatgcttaagattcaactgggagcataccagggatgctctctaacgtaatcaagggaaggttcagtaagacaaagtgatttatcatctataacttcaaacctatttgtcttgacatcaactctgttaaccttatgtcatcatttcttagagtctttgatatacaaataaaattttctttgtattttaa

SEQ ID NO: 208 - DNA, 6644 bp, Homo sapiens
  misc_feature (570)..(570): second gene starts at position 570
gggccatttctggacaacagctgctattttcacttgagccgaagttaatttctcggggagttctcgggcgcgcacaggcagctcggtttgccctgcgattgagctgcgggtcgcggccggcgccggcctctccaatggcaaatgtgtgtggctggaggcgagcgcgaggctttcggcaaaggcagtcgagtgtttgcagaccggggcgagtcctgtgaaagcagataaaagaaaacatttattaacgtgtcattacgaggggagcgcccggccggggctgtcgcactccccgcggaacatttggctccctccagctccgagagaggagaagaagaaagcggaaaagaggcagattcacgtcgtttccagccaagtggacctgatcgatggccctcctgaatttatcacgatatttgatttattagcgatgccccctggtttgtgtgttacgcacacacacgtgcacacaaggctctggctcgcttccctccctcgtttccagctcctgggcgaatcccacatctgtttcaactctccgccgagggcgagcaggagcgagagtgtgtcgagcctctctgctgatggtggtgccaagcgccaggagcacctatcccgattttccatgcctgacctcagcaaagactctggaatgaatgtgtctgagaagctgagcaacatgggcactcttaactcgtccatgcagttccggagcgcagagtcagttcgcagcctgctctctgcccagcagtaccaggagatggagggaaacctccaccagctcagcaaccccattggctacagagacctgcagtcccacggaaggatgcatcagagctttgattttgatggagggatggcgggcagcaagctgccagggcaggagggcgtgaggatccagcccatgagtgaacgcacccggagaagagctacttcacgcgacgacaaccgccgtttccgacctcacaggtccaggcgttcccgacgctctcgctccgacaacgccctccacctggccagcgaacgcgaggccatctcccggttaaaagataggccccctctgagagccagggaggactatgaccaatttatgcgccagcggagcttccaggagagcatggggcatgggtcccggagggacctgtacggccagtgccctaggactgtgtcggacctggctttgcagaatgcctttggggaccgctggggaccctacttcgccgagtatgattggtgttccacctgctcctcctcttcagagtctgacaacgagggctatttcctaggagaacccatcccccagccagcgcgcctgcgatacgtcacaagcgatgagctgctgcacaaatacagctcctacggcctccccaaatcttccacattaggtggcagaggacagttgcacagcaggaaaagacagaagagcaaaaactgtatcatttcttaatatgattgggatcagggaatgggagaagatgggagctaagaatgtaaagtcagaaacttgcactgttttaaatgttaaagcgcttttgggggtggcttatgggggagaaaagggaaaatgctgtcagtagatggaggcaaggttacaggttgactcaataggtagtcacagttcttggcatgttgaatattatttgcacatttcactttggaaacacagtagactctatcgaggccaggcttggtcacttccttcccatcagttctgtgttgagttgccatctctcaagatggtaaattgtttcctgctcgcttttatcctctctggttctcttacttttaggacccttttttcagtaagtaatttgtttattagccaggacccaagactaagttatttacatgtccattgtaaatgcaatgtaaatgagagttctgataaaatatttttgtattttgtaatatcaaaggaatttctatatcgtaggactcagtggggacttgcatgcacatccaccattgtctctgagtagtattgaaatgtggcccggtaccaccttttttttttttttttttttttctatacaaatttgttacatgtcagtgagacctttttcaaaggaacatattcaatttggctttttgtggctgaaaaaacataactgttagacccaaagcattttatgctccgttccatcttaaggagccatccttaagtctgctcccaccctcagtagaatttattttctacaaagtggtagtaatttttttttaaattgcaaatgtaatttttgccaattagagaaaccaaccggtgtcagtaaaattctgtgagaaatgccatccctgctgggaatgttgaagttacttaatgttgatctatcccttggggaaagtaaaagtgactgtgagtggtgccattgtgtgatgtcagcatgacgttgttttgaatgtggcattatgttctggtgctcatgtttcctggattgtattatctgctttcctttaccaaggcagacagaactgctgccttagcctgacaaccggttgtcctcaaagcaaatgaacttaagcatttgggattgagggacagaaggattctgagggggctctgcgagggacggtgtgtgacatgtcatgcctggagaaggaacaaggctatttgaaaacagaaggcaggtcaagggtagaagttaaaggagaatctgaaggcaggtcagggaaaagaagaactggaaatgaaacagaggacaggtgacaaccacctcgaagagctcccagagattgtagaaagagtccagtgtaaccagcttagtaaccagagtatctggattacccaggaaggttgagctgctgagatttcagtggtgcaatgtctttaaaaaaacaggctttgttgggagggtatttccattttgaactttgaggactgttggtcagaaaatgggctcaaaagtgagtttgcttaatgaagacatttaacggttgtgctgtttatagtaaaataaaactccctaccttgcttcagttaaaaatgaagcacttggtttcttccatcctcctcctccccttaatggattgtggcagttgaaataatccatcggatgacccacctgtagtgagatgtactgtcgatgtagtgcccggtgtatctcagtggccatctgccatggtgaggtgagcgtgatctcttttcagtatagtagttaacattttctagtattttttatggagagaatgtcaaaagtggcatttcagaccccgtcccagatgggtctgaggaaaggaaggctgtaaaggacatggtaatggcactccattcgggatgtattaaaataatttgcttttcaggtattaatatgacatttgtcattgtcactgatttttttaaaaaagcaatgcacatgttggttgtggctgttttccgcatgctatcttcatatctaaatgcttcattaattatccgagcctccggagaattaactctattacgtttgtatagtaagtttgtaaactgcttggcaaactgattaagaaataatttgcaataccgtgctactaaagtggcaggtttctggtagaaattgtgcgagtccaatttggagttttaagttccttgattgatgaaactaaaaaggcaattttggaaaaagagagggggaaaagtagatcacttatcttagcaaacggttgaaaatatgtctgtcctctgtggccccaaatccagtgaaagaaattctcccagtaaaagttgcttcctaactctgtttttctcagaatacctcttacctttctcaaagaaagcttcaaccaccatcatcagaaagaaggtggcctaaaaactgacacatggccagtgcccggaggggtctggaggcataagtctagatgcccagagagcatccaggcactgaactgctcagagcttgagatgaaatgacatacaagcttcagggtaaaactgtctactagcaagattacctccctcaattctaccattgcagatttcttctgaccccaaatgcaaccttacagagaatgctgaatgaggaaggccaattccttacaatgatggcagaacccccaagcgaatgccctattgaggagaaggacatcactgtatttggaattctgcctgctagtgatagctcacacatcacatcccagaatcccactcccaatgcattatttcctgaggcaagaacttaaggtcctcacctaattcctccatcacaaccattaactcttattggacaagctcctcctgtgagtagggcctgtactcacttcctcttagatcataattccatcttcaagagactgatttccagaatagtaatctttttccagcgttctctcttctccaatgccctggttgttatttttcccacctctcctaatattgatcttcttgtcttttggttagaactgcaacttcggagttgagttcatttcctattgctgctcaattcagtagcaacatagctggcttgttcccagacccaggaagtataagtcattgacagtttcctgagtggctctgccaatccataccacccttggtactgtgaaaaggcttcttggcagccaggtggcattgaggatggtattcagggcgctttccttctgtcatatagttgtgggatctctaccaagtgtgaaggtgaatgaggtaagggagatcagaaccatgcttcctggtttttcatacatccaaggaagaagtcctggtgtgggttgtttgacaccttctttccactttcaccttttattttttattccttcctttctacccccaaccagtcgagcaaatgagcaattttgtgtttctaatacaggatctggaagtagtgctttctaatcctcatttcctgtaggatgttcctgcactataacaagattatgttttcttccttctgcagcagctttctgcttcttgggtactactagctattgttcaattcaggtgaggcctgtgatgacatatatgtagcatgtgctctgcgctccctgcaagctgagcagatacaaccaatgcatcactgtatactcttgctgagaatgtggatgcagcctcacagatctttgcaacactccaaccagccaggaccagttgatcagaactgatcttattggtctgataaccaatcttatttgtgaactgattcatatctgtctttccactcttggttctcttgccgtagaacaaaaacagtttaggaagcataattacgaacatttaggaaccaatatgtataagtaattcggagactccaattcacctgcccctcccccatcccaggttgtggaggctcgaggaagctgacttcttaggctaaaggacaaaaaaatctctttacctccttggccattttcatgttctctgccaattactataggcagtcttcattttgcagaggtgaggtaagacttcatcttattcttcatgtaatcccaccttctaacaaaaaataaataaatatttaaattccaaggagaagtgttctttgtgtatttctagcagaaaacagatgcttaagcctaagaaggaagatccgtccatgacaaaggaaagtggaaaactgaaccagttatctgaatacttcatgccaggacagttgctattagcaactgttttgcaccttcagggctttaaaatgggctctgcagacagcatttgcatatgcaagactcagtagccaagcctccactgccaattgttgaaggcagtttcagatcgccaccttttgaggtacatttctttaagcacaagagaagtagaaatggcctttgccttgtctccagtggtttgtccctctggtgcctcagcagataccagagcttattcttatgaccatttggaagtagtcctcaaagtaaagatcaagaaaaaattggattctttttccattttctcataatagtagcctagtcaacacaagactcccataaaatatgactcactattgggagccatactattttataagcttacttcctgctgacaaaactagctttcctcaaggaaatataaaggaggggaaagtcacatagtgttaggaaaacattcctgtgttttgaatacgatgaatccataggatagagaaaaatctgcttgttctattctgagagttctctgagatatcccttcactctgcttggcatttggccattgatattcaacaggtcactgaccaagcttttctaaatttttcagagagagttacttaccagtaaggtctgttcttaaacctacctagttgattttcatatctttccataaagtgtcatgattctgtcatagaccctgacttaacattgtaaggactatgagtcctccattttttaattaatttttttttagcaaattaggacttcggcaggttttcctctcctaaactcattctttcctccacaggattgctttgtccatctcctgctttcatttcaagtgcataaacaaaacctcaaagggcctgggaaggtgaggcaggccagagtctgtgttctgtgttgagtgtcaagctatttgttaagaaggtctgcaacaggcctttggtgtgggctctgccagagactgttctgaacactttgcttgagatccgtgccctgtaaaatggatatgatgttttactgatgtctgtaatacatttgtaaacttccaataaaatttgaataaaagaaatgttgccattcttctc

SEQ ID NO: 209 - DNA, 9644 bp, Homo sapiens
  misc_feature (570)..(570): second gene starts at position 570
atgggccccccgagcctcgtgctgtgcttgctgtccgcaactgtgttctccctgctgggtggaagctcggccttcctgtcgcaccaccgcctgaaaggcaggtttcagagggaccgcaggaacatccgccccaacatcatcctggtgctgacggacgaccaggatgtggagctgggttccatgcaggtgatgaacaagacccggcgcatcatggagcagggcggggcgcacttcatcaacgccttcgtgaccacacccatgtgctgcccctcacgctcctccatcctcactggcaagtacgtccacaaccacaacacctacaccaacaatgagaactgctcctcgccctcctggcaggcacagcacgagagccgcacctttgccgtgtacctcaatagcactggctaccggacagctttcttcgggaagtatcttaatgaatacaacggctcctacgtgccacccggctggaaggagtgggtcggactccttaaaaactcccgcttttataactacacgctgtgtcggaacggggtgaaagagaagcacggctccgactactccaaggattacctcacagacctcatcaccaatgacagcgtgagcttcttccgcacgtccaagaagatgtacccgcacaggccagtcctcatggtcatcagccatgcagccccccacggccctgaggattcagccccacaatattcacgcctcttcccaaacgcatctcagcacatcacgccgagctacaactacgcgcccaacccggacaaacactggatcatgcgctacacggggcccatgaagcccatccacatggaattcaccaacatgctccagcggaagcgcttgcagaccctcatgtcggtggacgactccatggagacgatttacaacatgctggttgagacgggcgagctggacaacacgtacatcgtatacaccgccgaccacggttaccacatcggccagtttggcctggtgaaagggaaatccatgccatatgagtttgacatcagggtcccgttctacgtgaggggccccaacgtggaagccggctgtctgaatccccacatcgtcctcaacattgacctggcccccaccatcctggacattgcaggcctggacatacctgcggatatggacgggaaatccatcctcaagctgctggacacggagcggccggtgaatcggtttcacttgaaaaagaagatgagggtctggcgggactccttcttggtggagagaggcaagctgctacacaagagagacaatgacaaggtggacgcccaggaggagaactttctgcccaagtaccagcgtgtgaaggacctgtgtcagcgtgctgagtaccagacggcgtgtgagcagctgggacagaagtggcagtgtgtggaggacgccacggggaagctgaagctgcataagtgcaagggccccatgcggctgggcggcagcagagccctctccaacctcgtgcccaagtactacgggcagggcagcgaggcctgcacctgtgacagcggggactacaagctcagcctggccggacgccggaaaaaactcttcaagaagaagtacaaggccagctatgtccgcagtcgctccatccgctcagtggccatcgaggtggacggcagggtgtaccacgtaggcctgggtgatgccgcccagccccgaaacctcaccaagcggcactggccaggggcccctgaggaccaagatgacaaggatggtggggacttcagtggcactggaggccttcccgactactcagccgccaaccccattaaagtgacacatcggtgctacatcctagagaacgacacagtccagtgtgacctggacctgtacaagtccctgcaggcctggaaagaccacaagctgcacatcgaccacgagattgaaaccctgcagaacaaaattaagaacctgagggaagtccgaggtcacctgaagaaaaagcggccagaagaatgtgactgtcacaaaatcagctaccacacccagcacaaaggccgcctcaagcacagaggctccagtctgcatcctttcaggaagggcctgcaagagaaggacaaggtgtggctgttgcgggagcagaagcgcaagaagaaactccgcaagctgctcaagcgcctgcagaacaacgacacgtgcagcatgccaggcctcacgtgcttcacccacgacaaccagcactggcagacggcgcctttctggacactggggcctttctgtgcctgcaccagcgccaacaataacacgtactggtgcatgaggaccatcaatgagactcacaatttcctcttctgtgaatttgcaactggcttcctagagtactttgatctcaacacagacccctaccagctgatgaatgcagtgaacacactggacagggatgtcctcaaccagctacacgtacagctcatggagctgaggagctgcaagggttacaagcagtgtaacccccggactcgaaacatggacctgggacttaaagatggaggaagctatgagcaatacaggcagtttcagcgtcgaaagtggccagaaatgaagagaccttcttccaaatcactgggacaactgtgggaaggctgggaaggttaagaaacaacagaggtggacctccaaaaacatagaggcatcacctgactgcacaggcaatgaaaaaccatgtgggtgatttccagcagacctgtggtattggccaggaggcctgagaaagcaagcacgcactctcagtcaacatgacagattctggaggataaccagcaggagcagagataacttcaggaagtccatttttgcccctgcttttgctttggattatacctcaccagctgcacaaaatgcattttttcgtatcaaaaagtcaccactaaccctcccccagaagctcacaaaggaaaacggagagagcgagcgagagagatttccttggaaatttctcccaagggcgaaagtcattggaatttttaaatcataggggaaaagcagtcctgttctaaatcctcttattcttttggtttgtcacaaagaaggaactaagaagcaggacagaggcaacgtggagaggctgaaaacagtgcagagacgtttgacaatgagtcagtagcacaaaagagatgacatttacctagcactataaaccctggttgcctctgaagaaactgccttcattgtatatatgtgactatttacatgtaatcaacatgggaacttttaggggaacctaataagaaatcccaattttcaggagtggtggtgtcaataaacgctctgtggccagtgtaaaagaaaatccctcgcagttgtggacatttctgttcctgtccagataccatttctcctagtatttctttgttatgtcccagaactgatgttttttttttaaggtactgaaaagaaatgaagttgatgtatgtcccaagttttgatgaaactgtatttgtaaaaaaaattttgtagtttaagtattgtcatacagtgttcaaaaccccagccaatgaccagcagttggtatgaagaacctttgacattttgtaaaaggccatttcttgggagcctctctgctgatggtggtgccaagcgccaggagcacctatcccgattttccatgcctgacctcagcaaagactctggaatgaatgtgtctgagaagctgagcaacatgggcactcttaactcgtccatgcagttccggagcgcagagtcagttcgcagcctgctctctgcccagcagtaccaggagatggagggaaacctccaccagctcagcaaccccattggctacagagacctgcagtcccacggaaggatgcatcagagctttgattttgatggagggatggcgggcagcaagctgccagggcaggagggcgtgaggatccagcccatgagtgaacgcacccggagaagagctacttcacgcgacgacaaccgccgtttccgacctcacaggtccaggcgttcccgacgctctcgctccgacaacgccctccacctggccagcgaacgcgaggccatctcccggttaaaagataggccccctctgagagccagggaggactatgaccaatttatgcgccagcggagcttccaggagagcatggggcatgggtcccggagggacctgtacggccagtgccctaggactgtgtcggacctggctttgcagaatgcctttggggaccgctggggaccctacttcgccgagtatgattggtgttccacctgctcctcctcttcagagtctgacaacgagggctatttcctaggagaacccatcccccagccagcgcgcctgcgatacgtcacaagcgatgagctgctgcacaaatacagctcctacggcctccccaaatcttccacattaggtggcagaggacagttgcacagcaggaaaagacagaagagcaaaaactgtatcatttcttaatatgattgggatcagggaatgggagaagatgggagctaagaatgtaaagtcagaaacttgcactgttttaaatgttaaagcgcttttgggggtggcttatgggggagaaaagggaaaatgctgtcagtagatggaggcaaggttacaggttgactcaataggtagtcacagttcttggcatgttgaatattatttgcacatttcactttggaaacacagtagactctatcgaggccaggcttggtcacttccttcccatcagttctgtgttgagttgccatctctcaagatggtaaattgtttcctgctcgcttttatcctctctggttctcttacttttaggacccttttttcagtaagtaatttgtttattagccaggacccaagactaagttatttacatgtccattgtaaatgcaatgtaaatgagagttctgataaaatatttttgtattttgtaatatcaaaggaatttctatatcgtaggactcagtggggacttgcatgcacatccaccattgtctctgagtagtattgaaatgtggcccggtaccaccttttttttttttttttttttttctatacaaatttgttacatgtcagtgagacctttttcaaaggaacatattcaatttggctttttgtggctgaaaaaacataactgttagacccaaagcattttatgctccgttccatcttaaggagccatccttaagtctgctcccaccctcagtagaatttattttctacaaagtggtagtaatttttttttaaattgcaaatgtaatttttgccaattagagaaaccaaccggtgtcagtaaaattctgtgagaaatgccatccctgctgggaatgttgaagttacttaatgttgatctatcccttggggaaagtaaaagtgactgtgagtggtgccattgtgtgatgtcagcatgacgttgttttgaatgtggcattatgttctggtgctcatgtttcctggattgtattatctgctttcctttaccaaggcagacagaactgctgccttagcctgacaaccggttgtcctcaaagcaaatgaacttaagcatttgggattgagggacagaaggattctgagggggctctgcgagggacggtgtgtgacatgtcatgcctggagaaggaacaaggctatttgaaaacagaaggcaggtcaagggtagaagttaaaggagaatctgaaggcaggtcagggaaaagaagaactggaaatgaaacagaggacaggtgacaaccacctcgaagagctcccagagattgtagaaagagtccagtgtaaccagcttagtaaccagagtatctggattacccaggaaggttgagctgctgagatttcagtggtgcaatgtctttaaaaaaacaggctttgttgggagggtatttccattttgaactttgaggactgttggtcagaaaatgggctcaaaagtgagtttgcttaatgaagacatttaacggttgtgctgtttatagtaaaataaaactccctaccttgcttcagttaaaaatgaagcacttggtttcttccatcctcctcctccccttaatggattgtggcagttgaaataatccatcggatgacccacctgtagtgagatgtactgtcgatgtagtgcccggtgtatctcagtggccatctgccatggtgaggtgagcgtgatctcttttcagtatagtagttaacattttctagtattttttatggagagaatgtcaaaagtggcatttcagaccccgtcccagatgggtctgaggaaaggaaggctgtaaaggacatggtaatggcactccattcgggatgtattaaaataatttgcttttcaggtattaatatgacatttgtcattgtcactgatttttttaaaaaagcaatgcacatgttggttgtggctgttttccgcatgctatcttcatatctaaatgcttcattaattatccgagcctccggagaattaactctattacgtttgtatagtaagtttgtaaactgcttggcaaactgattaagaaataatttgcaataccgtgctactaaagtggcaggtttctggtagaaattgtgcgagtccaatttggagttttaagttccttgattgatgaaactaaaaaggcaattttggaaaaagagagggggaaaagtagatcacttatcttagcaaacggttgaaaatatgtctgtcctctgtggccccaaatccagtgaaagaaattctcccagtaaaagttgcttcctaactctgtttttctcagaatacctcttacctttctcaaagaaagcttcaaccaccatcatcagaaagaaggtggcctaaaaactgacacatggccagtgcccggaggggtctggaggcataagtctagatgcccagagagcatccaggcactgaactgctcagagcttgagatgaaatgacatacaagcttcagggtaaaactgtctactagcaagattacctccctcaattctaccattgcagatttcttctgaccccaaatgcaaccttacagagaatgctgaatgaggaaggccaattccttacaatgatggcagaacccccaagcgaatgccctattgaggagaaggacatcactgtatttggaattctgcctgctagtgatagctcacacatcacatcccagaatcccactcccaatgcattatttcctgaggcaagaacttaaggtcctcacctaattcctccatcacaaccattaactcttattggacaagctcctcctgtgagtagggcctgtactcacttcctcttagatcataattccatcttcaagagactgatttccagaatagtaatctttttccagcgttctctcttctccaatgccctggttgttatttttcccacctctcctaatattgatcttcttgtcttttggttagaactgcaacttcggagttgagttcatttcctattgctgctcaattcagtagcaacatagctggcttgttcccagacccaggaagtataagtcattgacagtttcctgagtggctctgccaatccataccacccttggtactgtgaaaaggcttcttggcagccaggtggcattgaggatggtattcagggcgctttccttctgtcatatagttgtgggatctctaccaagtgtgaaggtgaatgaggtaagggagatcagaaccatgcttcctggtttttcatacatccaaggaagaagtcctggtgtgggttgtttgacaccttctttccactttcaccttttattttttattccttcctttctacccccaaccagtcgagcaaatgagcaattttgtgtttctaatacaggatctggaagtagtgctttctaatcctcatttcctgtaggatgttcctgcactataacaagattatgttttcttccttctgcagcagctttctgcttcttgggtactactagctattgttcaattcaggtgaggcctgtgatgacatatatgtagcatgtgctctgcgctccctgcaagctgagcagatacaaccaatgcatcactgtatactcttgctgagaatgtggatgcagcctcacagatctttgcaacactccaaccagccaggaccagttgatcagaactgatcttattggtctgataaccaatcttatttgtgaactgattcatatctgtctttccactcttggttctcttgccgtagaacaaaaacagtttaggaagcataattacgaacatttaggaaccaatatgtataagtaattcggagactccaattcacctgcccctcccccatcccaggttgtggaggctcgaggaagctgacttcttaggctaaaggacaaaaaaatctctttacctccttggccattttcatgttctctgccaattactataggcagtcttcattttgcagaggtgaggtaagacttcatcttattcttcatgtaatcccaccttctaacaaaaaataaataaatatttaaattccaaggagaagtgttctttgtgtatttctagcagaaaacagatgcttaagcctaagaaggaagatccgtccatgacaaaggaaagtggaaaactgaaccagttatctgaatacttcatgccaggacagttgctattagcaactgttttgcaccttcagggctttaaaatgggctctgcagacagcatttgcatatgcaagactcagtagccaagcctccactgccaattgttgaaggcagtttcagatcgccaccttttgaggtacatttctttaagcacaagagaagtagaaatggcctttgccttgtctccagtggtttgtccctctggtgcctcagcagataccagagcttattcttatgaccatttggaagtagtcctcaaagtaaagatcaagaaaaaattggattctttttccattttctcataatagtagcctagtcaacacaagactcccataaaatatgactcactattgggagccatactattttataagcttacttcctgctgacaaaactagctttcctcaaggaaatataaaggaggggaaagtcacatagtgttaggaaaacattcctgtgttttgaatacgatgaatccataggatagagaaaaatctgcttgttctattctgagagttctctgagatatcccttcactctgcttggcatttggccattgatattcaacaggtcactgaccaagcttttctaaatttttcagagagagttacttaccagtaaggtctgttcttaaacctacctagttgattttcatatctttccataaagtgtcatgattctgtcatagaccctgacttaacattgtaaggactatgagtcctccattttttaattaatttttttttagcaaattaggacttcggcaggttttcctctcctaaactcattctttcctccacaggattgctttgtccatctcctgctttcatttcaagtgcataaacaaaacctcaaagggcctgggaaggtgaggcaggccagagtctgtgttctgtgttgagtgtcaagctatttgttaagaaggtctgcaacaggcctttggtgtgggctctgccagagactgttctgaacactttgcttgagatccgtgccctgtaaaatggatatgatgttttactgatgtctgtaatacatttgtaaacttccaataaaatttgaataaaagaaatgttgccattcttctc

SEQ ID NO: 210 - DNA, 6644 bp, Homo sapiens; identical to SEQ ID NO: 208
  misc_feature (570)..(570): second gene starts at position 570

SEQ ID NO: 211 - DNA, 978 bp, Homo sapiens
  misc_feature (287)..(287): second gene starts at position 287
atggccctggagacggtgccgaaggacctgcggcatctgcgggcctgtttgctgtgttcgctggtcaagactatagaccagtttgaatatgatggttgtgacaattgtgatgcatatctacaaatgaagggtaaccgagagatggtatatgactgcactagctcttcctttgatggaatcattgcgatgatgagtccagaggacagctgggtctccaagtggcagcgagtcagtaactttaagccaggtgtatatgcggtgtcagtcactggtcgcctgccccaaggttttacaagatgaattagaaaaccgttctaatcaggtgcgatgtgcagagaaaaaattacaacacaaagaattggagtcacaggaacagataacttacatacgacaagaatatgaaacaaaattgaaaggattgatgccagcatccctaagacaagaacttgaagacaccatttcctccctaaaatcacaggttaattttctgcaaaagagagcttccatccttcaggaagaactgactacatatcaaggcagaaggtaactgcacgagagaatgcaacggatgcaatttccaggctgtgctgtggacttcttccagcaggtttgaagatttggatattgtaaactgtgagatcagtggcattttttaaatccttaaatgtaattaagatcataaaaacatgcatcattcatacactagtggggtggttttatttgtgtctgcctaagttatttttttaacattcctttatttccgattttcatgtttgtgtgcatttgagtatgtgctgagaactgcttatattgggcaaagtgatttcctatgatatgccttgttaatccttttgcatagaattttaccagttgcgtacgatcaaaatcacgtttgtagtatcatatcaaaaattctaacctgtttacattgttttcatgttcatgttcctatgttattaaaatattattttgtactta

SEQ ID NO: 212 - DNA, 978 bp, Homo sapiens; identical to SEQ ID NO: 211
  misc_feature (287)..(287): second gene starts at position 287

SEQ ID NO: 213 - DNA, 2191 bp, Homo sapiens
  misc_feature (152)..(152): second gene starts at position 152
agtgacgcaaggcctactgtcggctgggaggggaggtgtagccggtctttgggggtaggcggtagtggcggaagaggttcggcggctgatggcggatcaggatcggaagcctgcgtaactttctcccttgatccgggagtctttccactggccgacatcggcctggctgcctggggacgcaaggccctggacattgctgagaacgagatgccgggcctgatgcgtatgcgggagcggtactcggcctccaagccactgaagggcgcccgcatcgctggctgcctgcacatgaccgtggagacggccgtcctcattgagaccctcgtcaccctgggtgctgaggtgcagtggtccagctgcaacatcttctccacccaggaccatgcggcggctgccattgccaaggctggcattccggtgtatgcctggaagggcgaaacggacgaggagtacctgtggtgcattgagcagaccctgtacttcaaggacgggcccctcaacatgattctggacgacgggggcgacctcaccaacctcatccacaccaagtacccgcagcttctgccaggcatccgaggcatctctgaggagaccacgactggggtccacaacctctacaagatgatggccaatgggatcctcaaggtgcctgccatcaatgtcaatgactccgtcaccaagagcaagtttgacaacctctatggctgccgggagtccctcatagatggcatcaagcgggccacagatgtgatgattgccggcaaggtagcggtggtagcaggctatggtgatgtgggcaagggctgtgcccaggccctgcggggtttcggagcccgcgtcatcatcaccgagattgaccccatcaacgcactgcaggctgccatggagggctatgaggtgaccaccatggatgaggcctgtcaggagggcaacatctttgtcaccaccacaggctgtattgacatcatccttggccggcactttgagcagatgaaggatgatgccattgtgtgtaacattggacactttgacgtggagatcgatgtcaagtggctcaacgagaacgccgtggagaaggtgaacatcaagccgcaggtggaccggtatcggttgaagaatgggcgccgcatcatcctgctggccgagggtcggctggtcaacctgggttgtgccatgggccaccccagcttcgtgatgagtaactccttcaccaaccaggtgatggcgcagatcgagctgtggacccatccagacaagtaccccgttggggttcatttcctgcccaagaagctggatgaggcagtggctgaagcccacctgggcaagctgaatgtgaagttgaccaagctaactgagaagcaagcccagtacctgggcatgtcctgtgatggccccttcaagccggatcactaccgctactgagagccaggtctgcgtttcaccctccagctgctgtccttgcccaggccccacctctcctccctaagagctaatggcaccaactttgtgattggtttgtcagtgtcccccatcgactctctggggctgatcacttagtttttggcctctgctgcagccgtcatactgttccaaatgtggcagcgggaacagagtaccctcttcaagccccggtcatgatggaggtcccagccacagggaaccatgagctcagtggtcttggaacagctcactaagtcagtccttccttagcctggaagtcagtagtggagtcacaaagcccatgtgttttgccatctaggccttcacctggtctgtggacttatacctgtgtgcttggtttacaggtccagtggttcttcagcccatgacagatgagaaggggctatattgaagggcaaagaggaactgttgtttgaattttcctgagagcctggcttagtgctgggccttctcttaaacctcattacaatgaggttagtacttttagtccctgttttacaggggttagaatagactgttaaggggcaactgagaaagaacagagaagtgacagctaggggttgagaggggccagaaaaacatgaatgcaggcagatttcgtgaaatctgccaccactttataaccagatggttcctttcacaaccctgggtcaaaaagagaataatttggcctataatgttaaaagaaagcaggaaggtgggtaaataaaaatcttggtgcctggaagaa

SEQ ID NO: 214 - DNA, 2191 bp, Homo sapiens; identical to SEQ ID NO: 213
  misc_feature (152)..(152): second gene starts at position 152

SEQ ID NO: 215 - DNA, 2191 bp, Homo sapiens; identical to SEQ ID NO: 213
  misc_feature (152)..(152): second gene starts at position 152

SEQ ID NO: 216 - DNA, 2191 bp, Homo sapiens; identical to SEQ ID NO: 213
  misc_feature (152)..(152): second gene starts at position 152

SEQ ID NO: 217 - DNA, 4014 bp, Homo sapiens
  misc_feature (130)..(130): second gene starts at position 130
atgatggaagacgacgggcagccccggactctatacgtaggtaacctttccagagatgtgacagaagtccttatacttcagttgttcagtcagattggaccctgtaaaagctgtaaaatgataacagagcccaaaatggagttaatcctgactgggagaagaaagtaattgagtattttaaggaaaagctgaaggaaaataatgctcctaagtgggtaccatcactgaacgaagttccccttcattatttgaaacctaatagttttgtgaaatttcgttgcatgattcaggatatgtttgaccctgagttttacatgggagtttatgaaacggttaaccaaaacacaaaagcacatgttcttcattttggaaaatatagagatgtagcagagtgtgggcctcaacaagaacttgatttaaactctccacgaaataccactttggaaagacagactttctattgtgttccggtgcctggggaatctacgtgggtaaaagaagcctatgttaatgcaaaccaagctcgagtcagtccctcaacatcctacactcctagtcgccacaagaggagttatgaagatgatgacgatatggacctacagcccaataagcagaaagaccaacatgcaggtgccagacaagcagggagtgttggtggtcttcaatggtgtggagagccaaaacgtttagaaactgaagcttctactgggcaacagctgaactctctgaacttgtcttctccttttgatttgaattttccattgccaggagagaagggccctgcatgccttgtgaaggtttatgaagattgggattgtttcaaagtaaatgacattcttgagctatatggcatactgtctgtggatcctgtgctgagtatactgaataatgatgaaagggatgcctctgcactgctggatccgatggagtgcacagacacagcagaggagcagagagtacacagtcctcctgcttcattagtgccgagaattcatgtgatcttagcccagaagttgcaacacatcaacccattattgcctgcctgccttaacaaagaggagagcaaaacctgtaagtttgtttcaagtttcatgtccgaattgtctccagtcagagcagaacttcttgggttccttactcatgcccttctgggggatagtttggctgctgaataccttatattacatctcatctccacagtatatacaagaagagatgtccttccactaggaaaatttacagttaacttgagtggttgcccacggaatagtaccttcacagaacacttgtatcgaattattcaacatcttgttccagcatcttttcgtctgcagatgactatagagaacatgaaccatttgaaattcattccccacaaagactacacagccaatcgcttggtcagtgggctcctccagctgcccagcaatacttcccttgtaatcgatgagactctcctggaacaggggcagctggataccccaggtgttcataatgtgacagccctgagcaacctcataacgtggcagaaggtggattatgacttcagctaccatcagatggaattcccctgcaatattaacgttttcattacttcggaggggaggtcactcctcccggcagactgccagattcacttacagccccagctaattccaccaaacatggaggagtacatgaacagccttctctcagcggtgctgccttccgtgctgaacaaattccgcatttatctaactcttttgagattcttggaatatagcatatctgatgaaataaccaaggcagttgaagatgactttgtggaaatgcggaagaacgaccctcagagcatcactgctgatgatcttcaccagctgctcgtggtggctcggtgtctgtctctcagtgctggtcagacaacgctgtcaagagaacgatggctgagagcaaagcagctagagtctttaagaagaacgaggcttcagcagcaaaaatgtgtgaatggaaatgaactttaaagatgtaatacctatgaagagtaatgggcaaactgtagccacataattgtaaaattcagatattcatttataccacattgttttataggtaatttctatcacaaaccagtgacatttcctgaaatcaagcctggtaacacctgatgtttatatgatattcagtaaggacttttaccttactgatttcatggagcttttgaagtttgttttataataattatataaattagtaatgatgtaaaaaaagtatttgatattaaaagtttaatattgataatgttgctgattgtaccatttccttagcttcagctgagtcataggccagactgttgaaatgctgaaatgaagaaggttgttgcagtttcaaagtcagaggaatcgtgcttcggatttcttatgttttctagttctctgtttttccagttcacagtgggttggggtgcattcagtagtccatctttggggaacggaggcgtacttgccattgattcacatgactacatgaaattctgtactgtcatttcccagatgtttggccacagaaactttttcccacttaacatttgttaacagcctgcaaaactaaacttgtacatggcagtggttcccagacttttgtattttatggaccggtagtaatatttccaaaaatctggggtactataaggttgccaatttaccttgccaagtaatccgaataaatcactgtattatcaccatttttttcataaaaggaaaggacaatctatctctgaataagaggagtcctttaaacggaatgaatgtggcttttgggggcaaaagaaaccaagacactacattgtctttattttctcctatcccagtgcatttgagaaccatgcataagggaatgctgtgctacaaagctgtgcccaaatatgaaaacaaaataggaaacttaaaaagcaataccccctttagaaagtttttattttcttaaatgtcattgagttgctttgattctattggatttttggcattttttatgggatcatcagttggttccaagtatgttagatcagctaacatctgctactccagtaacagcctcgtacaactgcaggtaggttttctccagaccaattagttttaatagagcaaactaacaacagactgtagtagcatggttatggcaaccagaatcttcagaaaggttaggacattactttttaagctgtcagtggtatcaaataacttacctagttggaggcagataaaggatcccttacgttttttcctataaggcctaaattgaaattgttaaccaaggaaacagggtcagccttgaaaaatcaaggaattcattgtacctaataactgaagtaaaaataactagttgttcaacttttcctaaactcaaatctatttttataaacaaatgtaaataatgtttatattagagttgaactggttttcatttttataactggtagactagaccttccttaaacttttagaaataaaatgaaggcttcactggatttgtgaggataaaatacattttctttaattgtcctagagcaaagtacattagtcaccatgtgttttttgtgccaatgtaaattgtaatttaccaaagaaaaatacatacattgcttggtcttgcagaaaagttcccttgaaagaacctttccaataaataaaacgtcccaaattagcagtaccttgggctgtttttcatgagtaagaagattcaccatcccatgtgatctgtgtggaaaaagaccatgtcctcttggtggaagacatgagagagctgaactgaagtggaggaggtggtgcaagagggaccttcctgctcaaggcccgcccaggcagcggaatggagtgcagtgcttggctgcagaaaccctttgtccctcacctatatatacacggacagtcaagtttgttgctctaacgtaaggcacagcgttaatcctgtatggccaggaaactgagtagactcctgtgtaaccctgtttggaactttgccttcttaaaatgatttttc

SEQ ID NO: 218 - DNA, 4014 bp, Homo sapiens; identical to SEQ ID NO: 217
  misc_feature (130)..(130): second gene starts at position 130

SEQ ID NO: 219 - DNA, 8609 bp, Homo sapiens
  misc_feature (347)..(347): second gene starts at position 347
atggcgggtgaaattacagagaccggggaactctactcttcctacgttgggctggtgtacatgtttaacctcatcgtgggcacgggcgcactcaccatgcccaaggcattcgccactgccgggtggcttgtcagcctcgtcctgctggtgttcctgggcttcatgagcttcgtgaccaccacctttgtgatagaggccatggctgcagccaacgcgcagctccactggaagaggatggagaacctcaaggaggaggaagatgacgactcctccacagcctcagacagcgatgttctcatccgggacaactacgagcgggcagagaagcggcccatcctgtctgtgcaagtgccgtttcggtttaatctagtgtgtgactgggtctgtgtgagggagagagtgtgtgtggtgtggaggtgaaacggaggcaagaaagggggctacctcaggagcgagggacaaagggggcgtgaggcacctaggccgcggcaccccggcgacaggaagccgtcctgaaccgggctaccgggtaggggaagggcccgcgtagtcctcgcagggccccagagctggagtcggctccacagccccgggccgtcggcttctcacttcctggacctccccggcgcccgggcctgaggactggctcggcggagggagaagaggaaacagacttgagcagctccccgttgtctcgcaactccactgccgaggaactctcatttcttccctcgctccttcaccccccacctcatgtagaagggtgctgaggcgtcgggagggaggaggagcctgggctaccgtccctgccctccccacccccttcccggggcgctttggtgggcgtggagttggggttgggggggtgggtgggggttgctttttggagtgctggggaacttttttcccttcttcaggtcaggggaaagggaatgcccaattcagagagacatgggggcaagaaggacgggagtggaggagcttctggaactttgcagccgtcatcgggaggcggcagctctaacagcagagagcgtcaccgcttggtatcgaagcacaagcggcataagtccaaacactccaaagacatggggttggtgacccccgaagcagcatccctgggcacagttatcaaacctttggtggagtatgatgatatcagctctgattccgacaccttctccgatgacatggccttcaaactagaccgaagggagaacgacgaacgtcgtggatcagatcggagcgaccgcctgcacaaacatcgtcaccaccagcacaggcgttcccgggacttactaaaagctaaacagaccgaaaaagaaaaaagccaagaagtctccagcaagtcgggatcgatgaaggaccggatatcgggaagttcaaagcgttcgaatgaggagactgatgactatgggaaggcgcaggtagccaaaagcagcagcaaggaatccaggtcatccaagctccacaaggagaagaccaggaaagaacgggagctgaagtctgggcacaaagaccggagtaaaagtcatcgaaaaagggaaacacccaaaagttacaaaacagtggacagcccaaaacggagatccaggagcccccacaggaagtggtctgacagctccaaacaagatgatagcccctcgggagcttcttatggccaagattatgaccttagtccctcacgatctcatacctcgagcaattatgactcctacaagaaaagtcctggaagtacctcgagaaggcagtcggtcagtcccccttacaaggagccttcggcctaccagtccagcacccggtcaccgagcccctacagtaggcgacagagatctgtcagtccctatagcaggagacggtcgtccagctacgaaagaagtggctcttacagcgggcgatcgcccagtccctatggtcgaaggcggtccagcagccctttcctgagcaagcggtctctgagtcggagtccactccccagtaggaaatccatgaagtccagaagtagaagtcctgcatattcaagacattcatcttctcatagtaaaaagaagagatccagttcacgcagtcgtcattccagtatctcacctgtcaggcttccacttaattccagtctgggagctgaactcagtaggaaaaagaaggaaagagcagctgctgctgctgcagcaaagatggatggaaaggagtccaagggttcacctgtatttttgcctagaaaagagaacagttcagtagaggctaaggattcaggtttggagtctaaaaagttacccagaagtgtaaaattggaaaaatctgccccagatactgaactggtgaatgtaacacatctaaacacagaggtaaaaaattcttcagatacagggaaagtaaagttggatgagaactccgagaagcatcttgttaaagatttgaaagcacagggaacaagagactctaaacccatagcactgaaagaggagattgttactccaaaggagacagaaacatcagaaaaggagacccctccacctcttcccacaattgcttctcccccaccccctctaccaactactacccctccacctcagacaccccctttgccacctttgcctccaataccagctcttccacagcaaccacctctgcctccttctcagccagcatttagtcaggttcctgcttccagtacttcaactttgcccccttctactcactcaaagacatctgctgtgtcctctcaggcaaattctcagccccctgtacaggtttctgtgaagactcaagtatctgtaacagctgctattccacacctgaaaacttcaacgttgcctcctttgcccctcccacccttattacctggagatgatgacatggatagtccaaaagaaactcttccttcaaaacctgtgaagaaagagaaggaacagaggacacgtcacttactcacagaccttcctctccctccagagctccctggtggagatctgtctcccccagactctccagaaccaaaggcaatcacaccacctcagcaaccatataaaaagagaccaaaaatttgttgtcctcgttatggagaaagaagacaaacagaaagcgactgggggaaacgctgtgtggacaagtttgacattattgggattattggagaaggaacctatggccaagtatataaagccaaggacaaagacacaggagaactagtggctctgaagaaggtgagactagacaatgagaaagagggcttcccaatcacagccattcgtgaaatcaaaatccttcgtcagttaatccaccgaagtgttgttaacatgaaggaaattgtcacagataaacaagatgcactggatttcaagaaggacaaaggtgccttttaccttgtatttgagtatatggaccatgacttaatgggactgctagaatctggtttggtgcacttttctgaggaccatatcaagtcgttcatgaaacagctaatggaaggattggaatactgtcacaaaaagaatttcctgcatcgggatattaagtgttctaacattttgctgaataacagtgggcaaatcaaactagcagattttggacttgctcggctctataactctgaagagagtcgcccttacacaaacaaagtcattactttgtggtaccgacctccagaactactgctaggagaggaacgttacacaccagccatagatgtttggagctgtggatgtattcttggggaactattcacaaagaagcctatttttcaagccaatctggaactggctcagctagaactgatcagccgactttgtggtagcccttgtccagctgtgtggcctgatgttatcaaactgccctacttcaacaccatgaaaccgaagaagcaatatcgaaggcgtctacgagaagaattctctttcattccttctgcagcacttgatttattggaccacatgctgacactagatcctagtaagcggtgcacagctgaacagaccctacagagcgacttccttaaagatgtcgaactcagcaaaatggctcctccagacctcccccactggcaggattgccatgagttgtggagtaagaaacggcgacgtcagcgacaaagtggtgttgtagtcgaagagccacctccatccaaaacttctcgaaaagaaactacctcagggacaagtactgagcctgtgaagaacagcagcccagcaccacctcagcctgctcctggcaaggtggagtctggggctggggatgcaataggccttgctgacatcacacaacagctgaatcaaagtgaattggcagtgttattaaacctgctgcagagccaaaccgacctgagcatccctcaaatggcacagctgcttaacatccactccaacccagagatgcagcagcagctggaagccctgaaccaatccatcagtgccctgacggaagctacttcccagcagcaggactcagagaccatggccccagaggagtctttgaaggaagcaccctctgccccagtgatcctgccttcagcagaacagacgacccttgaagcttcaagcacaccagctgacatgcagaatatattggcagttctcttgagtcagctgatgaaaacccaagagccagcaggcagtctggaggaaaacaacagtgacaagaacagtgggccacaggggccccgaagaactcccacaatgccacaggaggaggcagcagagaagaggccccctgagccccccggacctccaccgccgccacctccaccccctctggttgaaggcgatctttccagcgccccccaggagttgaacccagccgtgacagccgccttgctgcaacttttatcccagcctgaagcagagcctcctggccacctgccacatgagcaccaggccttgagaccaatggagtactccacccgaccccgtccaaacaggacttatggaaacactgatgggcctgaaacagggttcagtgccattgacactgatgaacgaaactctggtccagccttgacagaatccttggtccagaccctggtgaagaacaggaccttctcaggctctctgagccaccttggggagtccagcagttaccagggcacagggtcagtgcagtttccaggggaccaggacctccgttttgccagggtccccttagcgttacacccggtggtcgggcaaccattcctgaaggctgagggaagcagcaattctgtggtacatgcagagaccaaattgcaaaactatggggagctggggccaggaaccactggggccagcagctcaggagcaggccttcactgggggggcccaactcagtcttctgcttatggaaaactctatcgggggcctacaagagtcccaccaagagggggaagagggagaggagttccttactaacccagagacttcagtgtcctgaaagattcctttcctatccatccttccatccagttctctgaatctttaatgaaatcatttgccagagcgaggtaatcatctgcatttggctactgcaaagctgtccgttgtattccttgctcacttgctactagcaggcgacttacgaaataatgatgttggcaccagttccccctggatgggctatagccagaacatttacttcaactctaccttagtagatacaagtagagaatatggagaggatcattacattgaaaagtaaatgttttattagttcattgcctgcacttactgatcggaagagagaaagaacagtttcagtattgagatggctcaggagaggctctttgatttttaaagttttggggtgggggattgtgtgtggtttctttcttttgaattttaatttaggtgttttgggtttttttcctttaaagagaatagtgttcacaaaatttgagctgctctttggcttttgctataagggaaacagagtggcctggctgatttgaataaatgtttctttcctctccaccatctcacattttgcttttaagtgaacactttttccccattgagcatcttgaacatactttttttccaaataaattactcatccttaaagtttactccactttgacaaaagatacgcccttctccctgcacataaagcaggttgtagaacgtggcattcttgggcaagtaggtagactttacccagtctctttccttttttgctgatgtgtgctctctctctctctttctctctctctctctctctctctctctctctctctctctctgtctcgcttgctcgctctcgctgtttctctctctttgaggcatttgtttggaaaaaatcgttgagatgcccaagaacctgggataattctttactttttttgaaataaaggaaaggaaattcagactcttacattgttctctgtaactcttcaattctaaaatgttttgttttttaaaccatgttctgatggggaagttgatttgtaagtgtggacagcttggacattgctgctgagctgtggttagagatgatgcctccattcctagagggctaataacagcatttagcatattgtttacacatatatttttatgtcaaaaaaaaaacaaaaacctttcaaacagagcattgtgatattgtcaaagagaaaaacaaatcctgaagatacatggaaatgtaacctagtttagggtgggtatttttctgaagatacatcaatacctgaccttttttaaaaaaataattttaaaacagcatactgtgaggaagaacagtattgacatacccacatcccagcatgtgtaccctgccagttcttttagggatttttcctccaaagagatttggatttggttttggtaaaaggggttaaattgtgcttccaggcaagaactttgccttatcataaacaggaaatgaaaaagggaagggctgtcaggatgggataatttgggaggcttctcattctggcttctatttctatgtgagtaccagcatatagagtgttttaaaaacagatacatgtcatataatttatctgcacagacttagaccttcaggaaacataggttaagcccccttttacaaagaaaaagtaaacatacttcagcatcttggagggtagttttcaaaactcaagtttcatgtttcaatgccaagttcttattttaaaaaataaaatctacttataagagaaaggtgcattacttaaaaaaaaaaaactttaaagaaatgaaagaagaaccctcttcagatacttacttgaagactgttttcccctgttaatgagatatagctagatatcggtgtgtgtatttctttattattctctggtttttgatctggccttgcctccagggccaaacactgatttagaaagagagccttctagctattttggcattgatggctttttataccagtgtgtccagttagatttactaggcttactgacatgctattggtaaatcgcattaaagttcatctgaaccttctgtctgttgacttcttagtcctcagacatgggcctttgtgttttagaatatttgaatttgagttattgggccccactccctgttttttattaaagaacgtgagcctgggatactttcagaagtatctgttcaatgaaaaaaagttggtttcccatcaaatatgaataaaattctctatatatttcattgtattttggttatcagcagtcatcaataatgtttttccctcccctctcccacctcttatttttaattatgccaaatatcctaaataatatacttaagcctccattccctcatccctactagggaagggggtgagtgtatgtgtgagtgtatgtgtatgtatgatcccatctcacccccacccccattttgggagtcttttaaaatgaaaacaaagtttggtagttttgactatttctaaaagcagaggagaaaaaaaaacttatttaaatatcctggaatctgtatggaggaagaaaaggtatttgttaatttttcagttacgttatctataaacatgatggaagtaaaggtttggcagaatttcaccttgactatttgaaaattacagacccaattaattccattcaaaagtggttttcgttttgttttaattattgtacaatgagagatattgtctattaaatacattattttgaacagatgagaaatctgattctgttcatgagtgggaggcaaaactggtttgaccgtgatcatttttgtggttttgaaaacaaatatacttgacccagtttccttagttttttcttcaactgtccataggaacgataagtatttgaaagcaacatcaaatctatacgtttaaagcagggcagttagcacaaatttgcaagtagaacttctattagcttatgccatagacatcacccaaccacttgtatgtgtgtgtgtatatataatatgcatatatagttaccgtgctaaaatggttaccagcaggttttgagagagaatgctgcatcagaaaagtgtcagttgccacctcattctccctgatttaggttcctgacactgattcctttctctctcgtttttgacccccattgggtgtatcttgtctatgtacagatattttgtaatatattaaatttttttctttcagtttataaaaatggaaagtggagattggaaaattaaatatttcctgttactatacca

SEQ ID NO: 220 - DNA, 4263 bp, Homo sapiens
  misc_feature (347)..(347): second gene starts at position 347
atggcgggtgaaattacagagaccggggaactctactcttcctacgttgggctggtgtacatgtttaacctcatcgtgggcacgggcgcactcaccatgcccaaggcattcgccactgccgggtggcttgtcagcctcgtcctgctggtgttcctgggcttcatgagcttcgtgaccaccacctttgtgatagaggccatggctgcagccaacgcgcagctccactggaagaggatggagaacctcaaggaggaggaagatgacgactcctccacagcctcagacagcgatgttctcatccgggacaactacgagcgggcagagaagcggcccatcctgtctgtgcagaagaggccccctgagccccccggacctccaccgccgccacctccaccccctctggttgaaggcgatctttccagcgccccccaggagttgaacccagccgtgacagccgccttgctgcaacttttatcccagcctgaagcagagcctcctggccacctgccacatgagcaccaggccttgagaccaatggagtactccacccgaccccgtccaaacaggacttatggaaacactgatgggcctgaaacagggttcagtgccattgacactgatgaacgaaactctggtccagccttgacagaatccttggtccagaccctggtgaagaacaggaccttctcaggctctctgagccaccttggggagtccagcagttaccagggcacagggtcagtgcagtttccaggggaccaggacctccgttttgccagggtccccttagcgttacacccggtggtcgggcaaccattcctgaaggctgagggaagcagcaattctgtggtacatgcagagaccaaattgcaaaactatggggagctggggccaggaaccactggggccagcagctcaggagcaggccttcactgggggggcccaactcagtcttctgcttatggaaaactctatcgggggcctacaagagtcccaccaagagggggaagagggagaggagttccttactaacccagagacttcagtgtcctgaaagattcctttcctatccatccttccatccagttctctgaatctttaatgaaatcatttgccagagcgaggtaatcatctgcatttggctactgcaaagctgtccgttgtattccttgctcacttgctactagcaggcgacttacgaaataatgatgttggcaccagttccccctggatgggctatagccagaacatttacttcaactctaccttagtagatacaagtagagaatatggagaggatcattacattgaaaagtaaatgttttattagttcattgcctgcacttactgatcggaagagagaaagaacagtttcagtattgagatggctcaggagaggctctttgatttttaaagttttggggtgggggattgtgtgtggtttctttcttttgaattttaatttaggtgttttgggtttttttcctttaaagagaatagtgttcacaaaatttgagctgctctttggcttttgctataagggaaacagagtggcctggctgatttgaataaatgtttctttcctctccaccatctcacattttgcttttaagtgaacactttttccccattgagcatcttgaacatactttttttccaaataaattactcatccttaaagtttactccactttgacaaaagatacgcccttctccctgcacataaagcaggttgtagaacgtggcattcttgggcaagtaggtagactttacccagtctctttccttttttgctgatgtgtgctctctctctctctttctctctctctctctctctctctctctctctctctctctctgtctcgcttgctcgctctcgctgtttctctctctttgaggcatttgtttggaaaaaatcgttgagatgcccaagaacctgggataattctttactttttttgaaataaaggaaaggaaattcagactcttacattgttctctgtaactcttcaattctaaaatgttttgttttttaaaccatgttctgatggggaagttgatttgtaagtgtggacagcttggacattgctgctgagctgtggttagagatgatgcctccattcctagagggctaataacagcatttagcatattgtttacacatatatttttatgtcaaaaaaaaaacaaaaacctttcaaacagagcattgtgatattgtcaaagagaaaaacaaatcctgaagatacatggaaatgtaacctagtttagggtgggtatttttctgaagatacatcaatacctgaccttttttaaaaaaataattttaaaacagcatactgtgaggaagaacagtattgacatacccacatcccagcatgtgtaccctgccagttcttttagggatttttcctccaaagagatttggatttggttttggtaaaaggggttaaattgtgcttccaggcaagaactttgccttatcataaacaggaaatgaaaaagggaagggctgtcaggatgggataatttgggaggcttctcattctggcttctatttctatgtgagtaccagcatatagagtgttttaaaaacagatacatgtcatataatttatctgcacagacttagaccttcaggaaacataggttaagcccccttttacaaagaaaaagtaaacatacttcagcatcttggagggtagttttcaaaactcaagtttcatgtttcaatgccaagttcttattttaaaaaataaaatctacttataagagaaaggtgcattacttaaaaaaaaaaaactttaaagaaatgaaagaagaaccctcttcagatacttacttgaagactgttttcccctgttaatgagatatagctagatatcggtgtgtgtatttctttattattctctggtttttgatctggccttgcctccagggccaaacactgatttagaaagagagccttctagctattttggcattgatggctttttataccagtgtgtccagttagatttactaggcttactgacatgctattggtaaatcgcattaaagttcatctgaaccttctgtctgttgacttcttagtcctcagacatgggcctttgtgttttagaatatttgaatttgagttattgggccccactccctgttttttattaaagaacgtgagcctgggatactttcagaagtatctgttcaatgaaaaaaagttggtttcccatcaaatatgaataaaattctctatatatttcattgtattttggttatcagcagtcatcaataatgtttttccctcccctctcccacctcttatttttaattatgccaaatatcctaaataatatacttaagcctccattccctcatccctactagggaagggggtgagtgtatgtgtgagtgtatgtgtatgtatgatcccatctcacccccacccccattttgggagtcttttaaaatgaaaacaaagtttggtagttttgactatttctaaaagcagaggagaaaaaaaaacttatttaaatatcctggaatctgtatggaggaagaaaaggtatttgttaatttttcagttacgttatctataaacatgatggaagtaaaggtttggcagaatttcaccttgactatttgaaaattacagacccaattaattccattcaaaagtggttttcgttttgttttaattattgtacaatgagagatattgtctattaaatacattattttgaacagatgagaaatctgattctgttcatgagtgggaggcaaaactggtttgaccgtgatcatttttgtggttttgaaaacaaatatacttgacccagtttccttagttttttcttcaactgtccataggaacgataagtatttgaaagcaacatcaaatctatacgtttaaagcagggcagttagcacaaatttgcaagtagaacttctattagcttatgccatagacatcacccaaccacttgtatgtgtgtgtgtatatataatatgcatatatagttaccgtgctaaaatggttaccagcaggttttgagagagaatgctgcatcagaaaagtgtcagttgccacctcattctccctgatttaggttcctgacactgattcctttctctctcgtttttgacccccattgggtgtatcttgtctatgtacagatattttgtaatatattaaatttttttctttcagtttataaaaatggaaagtggagattggaaaattaaatatttcctgttactatacca

SEQ ID NO: 221 - DNA, 4290 bp, Homo sapiens
  misc_feature (347)..(347): second gene starts at position 347
atggcgggtgaaattacagagaccggggaactctactcttcctacgttgggctggtgtacatgtttaacctcatcgtgggcacgggcgcactcaccatgcccaaggcattcgccactgccgggtggcttgtcagcctcgtcctgctggtgttcctgggcttcatgagcttcgtgaccaccacctttgtgatagaggccatggctgcagccaacgcgcagctccactggaagaggatggagaacctcaaggaggaggaagatgacgactcctccacagcctcagacagcgatgttctcatccgggacaactacgagcgggcagagaagcggcccatcctgtctgtgccatgtcctcctcacattcttccaccagagaagaggccccctgagccccccggacctccaccgccgccacctccaccccctctggttgaaggcgatctttccagcgccccccaggagttgaacccagccgtgacagccgccttgctgcaacttttatcccagcctgaagcagagcctcctggccacctgccacatgagcaccaggccttgagaccaatggagtactccacccgaccccgtccaaacaggacttatggaaacactgatgggcctgaaacagggttcagtgccattgacactgatgaacgaaactctggtccagccttgacagaatccttggtccagaccctggtgaagaacaggaccttctcaggctctctgagccaccttggggagtccagcagttaccagggcacagggtcagtgcagtttccaggggaccaggacctccgttttgccagggtccccttagcgttacacccggtggtcgggcaaccattcctgaaggctgagggaagcagcaattctgtggtacatgcagagaccaaattgcaaaactatggggagctggggccaggaaccactggggccagcagctcaggagcaggccttcactgggggggcccaactcagtcttctgcttatggaaaactctatcgggggcctacaagagtcccaccaagagggggaagagggagaggagttccttactaacccagagacttcagtgtcctgaaagattcctttcctatccatccttccatccagttctctgaatctttaatgaaatcatttgccagagcgaggtaatcatctgcatttggctactgcaaagctgtccgttgtattccttgctcacttgctactagcaggcgacttacgaaataatgatgttggcaccagttccccctggatgggctatagccagaacatttacttcaactctaccttagtagatacaagtagagaatatggagaggatcattacattgaaaagtaaatgttttattagttcattgcctgcacttactgatcggaagagagaaagaacagtttcagtattgagatggctcaggagaggctctttgatttttaaagttttggggtgggggattgtgtgtggtttctttcttttgaattttaatttaggtgttttgggtttttttcctttaaagagaatagtgttcacaaaatttgagctgctctttggcttttgctataagggaaacagagtggcctggctgatttgaataaatgtttctttcctctccaccatctcacattttgcttttaagtgaacactttttccccattgagcatcttgaacatactttttttccaaataaattactcatccttaaagtttactccactttgacaaaagatacgcccttctccctgcacataaagcaggttgtagaacgtggcattcttgggcaagtaggtagactttacccagtctctttccttttttgctgatgtgtgctctctctctctctttctctctctctctctctctctctctctctctctctctctctgtctcgcttgctcgctctcgctgtttctctctctttgaggcatttgtttggaaaaaatcgttgagatgcccaagaacctgggataattctttactttttttgaaataaaggaaaggaaattcagactcttacattgttctctgtaactcttcaattctaaaatgttttgttttttaaaccatgttctgatggggaagttgatttgtaagtgtggacagcttggacattgctgctgagctgtggttagagatgatgcctccattcctagagggctaataacagcatttagcatattgtttacacatatatttttatgtcaaaaaaaaaacaaaaacctttcaaacagagcattgtgatattgtcaaagagaaaaacaaatcctgaagatacatggaaatgtaacctagtttagggtgggtatttttctgaagatacatcaatacctgaccttttttaaaaaaataattttaaaacagcatactgtgaggaagaacagtattgacatacccacatcccagcatgtgtaccctgccagttcttttagggatttttcctccaaagagatttggatttggttttggtaaaaggggttaaattgtgcttccaggcaagaactttgccttatcataaacaggaaatgaaaaagggaagggctgtcaggatgggataatttgggaggcttctcattctggcttctatttctatgtgagtaccagcatatagagtgttttaaaaacagatacatgtcatataatttatctgcacagacttagaccttcaggaaacataggttaagcccccttttacaaagaaaaagtaaacatacttcagcatcttggagggtagttttcaaaactcaagtttcatgtttcaatgccaagttcttattttaaaaaataaaatctacttataagagaaaggtgcattacttaaaaaaaaaaaactttaaagaaatgaaagaagaaccctcttcagatacttacttgaagactgttttcccctgttaatgagatatagctagatatcggtgtgtgtatttctttattattctctggtttttgatctggccttgcctccagggccaaacactgatttagaaagagagccttctagctattttggcattgatggctttttataccagtgtgtccagttagatttactaggcttactgacatgctattggtaaatcgcattaaagttcatctgaaccttctgtctgttgacttcttagtcctcagacatgggcctttgtgttttagaatatttgaatttgagttattgggccccactccctgttttttattaaagaacgtgagcctgggatactttcagaagtatctgttcaatgaaaaaaagttggtttcccatcaaatatgaataaaattctctatatatttcattgtattttggttatcagcagtcatcaataatgtttttccctcccctctcccacctcttatttttaattatgccaaatatcctaaataatatacttaagcctccattccctcatccctactagggaagggggtgagtgtatgtgtgagtgtatgtgtatgtatgatcccatctcacccccacccccattttgggagtcttttaaaatgaaaacaaagtttggtagttttgactatttctaaaagcagaggagaaaaaaaaacttatttaaatatcctggaatctgtatggaggaagaaaaggtatttgttaatttttcagttacgttatctataaacatgatggaagtaaaggtttggcagaatttcaccttgactatttgaaaattacagacccaattaattccattcaaaagtggttttcgttttgttttaattattgtacaatgagagatattgtctattaaatacattattttgaacagatgagaaatctgattctgttcatgagtgggaggcaaaactggtttgaccgtgatcatttttgtggttttgaaaacaaatatacttgacccagtttccttagttttttcttcaactgtccataggaacgataagtatttgaaagcaacatcaaatctatacgtttaaagcagggcagttagcacaaatttgcaagtagaacttctattagcttatgccatagacatcacccaaccacttgtatgtgtgtgtgtatatataatatgcatatatagttaccgtgctaaaatggttaccagcaggttttgagagagaatgctgcatcagaaaagtgtcagttgccacctcattctccctgatttaggttcctgacactgattcctttctctctcgtttttgacccccattgggtgtatcttgtctatgtacagatattttgtaatatattaaatttttttctttcagtttataaaaatggaaagtggagattggaaaattaaatatttcctgttactatacca

SEQ ID NO: 222 - DNA, 8636 bp, Homo sapiens
  misc_feature (347)..(347): second gene starts at position 347
atggcgggtgaaattacagagaccggggaactctactcttcctacgttgggctggtgtacatgtttaacctcatcgtgggcacgggcgcactcaccatgcccaaggcattcgccactgccgggtggcttgtcagcctcgtcctgctggtgttcctgggcttcatgagcttcgtgaccaccacctttgtgatagaggccatggctgcagccaacgcgcagctccactggaagaggatggagaacctcaaggaggaggaagatgacgactcctccacagcctcagacagcgatgttctcatccgggacaactacgagcgggcagagaagcggcccatcctgtctgtgcaagtgccgtttcggtttaatctagtgtgtgactgggtctgtgtgagggagagagtgtgtgtggtgtggaggtgaaacggaggcaagaaagggggctacctcaggagcgagggacaaagggggcgtgaggcacctaggccgcggcaccccggcgacaggaagccgtcctgaaccgggctaccgggtaggggaagggcccgcgtagtcctcgcagggccccagagctggagtcggctccacagccccgggccgtcggcttctcacttcctggacctccccggcgcccgggcctgaggactggctcggcggagggagaagaggaaacagacttgagcagctccccgttgtctcgcaactccactgccgaggaactctcatttcttccctcgctccttcaccccccacctcatgtagaagggtgctgaggcgtcgggagggaggaggagcctgggctaccgtccctgccctccccacccccttcccggggcgctttggtgggcgtggagttggggttgggggggtgggtgggggttgctttttggagtgctggggaacttttttcccttcttcaggtcaggggaaagggaatgcccaattcagagagacatgggggcaagaaggacgggagtggaggagcttctggaactttgcagccgtcatcgggaggcggcagctctaacagcagagagcgtcaccgcttggtatcgaagcacaagcggcataagtccaaacactccaaagacatggggttggtgacccccgaagcagcatccctgggcacagttatcaaacctttggtggagtatgatgatatcagctctgattccgacaccttctccgatgacatggccttcaaactagaccgaagggagaacgacgaacgtcgtggatcagatcggagcgaccgcctgcacaaacatcgtcaccaccagcacaggcgttcccgggacttactaaaagctaaacagaccgaaaaagaaaaaagccaagaagtctccagcaagtcgggatcgatgaaggaccggatatcgggaagttcaaagcgttcgaatgaggagactgatgactatgggaaggcgcaggtagccaaaagcagcagcaaggaatccaggtcatccaagctccacaaggagaagaccaggaaagaacgggagctgaagtctgggcacaaagaccggagtaaaagtcatcgaaaaagggaaacacccaaaagttacaaaacagtggacagcccaaaacggagatccaggagcccccacaggaagtggtctgacagctccaaacaagatgatagcccctcgggagcttcttatggccaagattatgaccttagtccctcacgatctcatacctcgagcaattatgactcctacaagaaaagtcctggaagtacctcgagaaggcagtcggtcagtcccccttacaaggagccttcggcctaccagtccagcacccggtcaccgagcccctacagtaggcgacagagatctgtcagtccctatagcaggagacggtcgtccagctacgaaagaagtggctcttacagcgggcgatcgcccagtccctatggtcgaaggcggtccagcagccctttcctgagcaagcggtctctgagtcggagtccactccccagtaggaaatccatgaagtccagaagtagaagtcctgcatattcaagacattcatcttctcatagtaaaaagaagagatccagttcacgcagtcgtcattccagtatctcacctgtcaggcttccacttaattccagtctgggagctgaactcagtaggaaaaagaaggaaagagcagctgctgctgctgcagcaaagatggatggaaaggagtccaagggttcacctgtatttttgcctagaaaagagaacagttcagtagaggctaaggattcaggtttggagtctaaaaagttacccagaagtgtaaaattggaaaaatctgccccagatactgaactggtgaatgtaacacatctaaacacagaggtaaaaaattcttcagatacagggaaagtaaagttggatgagaactccgagaagcatcttgttaaagatttgaaagcacagggaacaagagactctaaacccatagcactgaaagaggagattgttactccaaaggagacagaaacatcagaaaaggagacccctccacctcttcccacaattgcttctcccccaccccctctaccaactactacccctccacctcagacaccccctttgccacctttgcctccaataccagctcttccacagcaaccacctctgcctccttctcagccagcatttagtcaggttcctgcttccagtacttcaactttgcccccttctactcactcaaagacatctgctgtgtcctctcaggcaaattctcagccccctgtacaggtttctgtgaagactcaagtatctgtaacagctgctattccacacctgaaaacttcaacgttgcctcctttgcccctcccacccttattacctggagatgatgacatggatagtccaaaagaaactcttccttcaaaacctgtgaagaaagagaaggaacagaggacacgtcacttactcacagaccttcctctccctccagagctccctggtggagatctgtctcccccagactctccagaaccaaaggcaatcacaccacctcagcaaccatataaaaagagaccaaaaatttgttgtcctcgttatggagaaagaagacaaacagaaagcgactgggggaaacgctgtgtggacaagtttgacattattgggattattggagaaggaacctatggccaagtatataaagccaaggacaaagacacaggagaactagtggctctgaagaaggtgagactagacaatgagaaagagggcttcccaatcacagccattcgtgaaatcaaaatccttcgtcagttaatccaccgaagtgttgttaacatgaaggaaattgtcacagataaacaagatgcactggatttcaagaaggacaaaggtgccttttaccttgtatttgagtatatggaccatgacttaatgggactgctagaatctggtttggtgcacttttctgaggaccatatcaagtcgttcatgaaacagctaatggaaggattggaatactgtcacaaaaagaatttcctgcatcgggatattaagtgttctaacattttgctgaataacagtgggcaaatcaaactagcagattttggacttgctcggctctataactctgaagagagtcgcccttacacaaacaaagtcattactttgtggtaccgacctccagaactactgctaggagaggaacgttacacaccagccatagatgtttggagctgtggatgtattcttggggaactattcacaaagaagcctatttttcaagccaatctggaactggctcagctagaactgatcagccgactttgtggtagcccttgtccagctgtgtggcctgatgttatcaaactgccctacttcaacaccatgaaaccgaagaagcaatatcgaaggcgtctacgagaagaattctctttcattccttctgcagcacttgatttattggaccacatgctgacactagatcctagtaagcggtgcacagctgaacagaccctacagagcgacttccttaaagatgtcgaactcagcaaaatggctcctccagacctcccccactggcaggattgccatgagttgtggagtaagaaacggcgacgtcagcgacaaagtggtgttgtagtcgaagagccacctccatccaaaacttctcgaaaagaaactacctcagggacaagtactgagcctgtgaagaacagcagcccagcaccacctcagcctgctcctggcaaggtggagtctggggctggggatgcaataggccttgctgacatcacacaacagctgaatcaaagtgaattggcagtgttattaaacctgctgcagagccaaaccgacctgagcatccctcaaatggcacagctgcttaacatccactccaacccagagatgcagcagcagctggaagccctgaaccaatccatcagtgccctgacggaagctacttcccagcagcaggactcagagaccatggccccagaggagtctttgaaggaagcaccctctgccccagtgatcctgccttcagcagaacagacgacccttgaagcttcaagcacaccagctgacatgcagaatatattggcagttctcttgagtcagctgatgaaaacccaagagccagcaggcagtctggaggaaaacaacagtgacaagaacagtgggccacaggggccccgaagaactcccacaatgccacaggaggaggcagcagcatgtcctcctcacattcttccaccagagaagaggccccctgagccccccggacctccaccgccgccacctccaccccctctggttgaaggcgatctttccagcgccccccaggagttgaacccagccgtgacagccgccttgctgcaacttttatcccagcctgaagcagagcctcctggccacctgccacatgagcaccaggccttgagaccaatggagtactccacccgaccccgtccaaacaggacttatggaaacactgatgggcctgaaacagggttcagtgccattgacactgatgaacgaaactctggtccagccttgacagaatccttggtccagaccctggtgaagaacaggaccttctcaggctctctgagccaccttggggagtccagcagttaccagggcacagggtcagtgcagtttccaggggaccaggacctccgttttgccagggtccccttagcgttacacccggtggtcgggcaaccattcctgaaggctgagggaagcagcaattctgtggtacatgcagagaccaaattgcaaaactatggggagctggggccaggaaccactggggccagcagctcaggagcaggccttcactgggggggcccaactcagtcttctgcttatggaaaactctatcgggggcctacaagagtcccaccaagagggggaagagggagaggagttccttactaacccagagacttcagtgtcctgaaagattcctttcctatccatccttccatccagttctctgaatctttaatgaaatcatttgccagagcgaggtaatcatctgcatttggctactgcaaagctgtccgttgtattccttgctcacttgctactagcaggcgacttacgaaataatgatgttggcaccagttccccctggatgggctatagccagaacatttacttcaactctaccttagtagatacaagtagagaatatggagaggatcattacattgaaaagtaaatgttttattagttcattgcctgcacttactgatcggaagagagaaagaacagtttcagtattgagatggctcaggagaggctctttgatttttaaagttttggggtgggggattgtgtgtggtttctttcttttgaattttaatttaggtgttttgggtttttttcctttaaagagaatagtgttcacaaaatttgagctgctctttggcttttgctataagggaaacagagtggcctggctgatttgaataaatgtttctttcctctccaccatctcacattttgcttttaagtgaacactttttccccattgagcatcttgaacatactttttttccaaataaattactcatccttaaagtttactccactttgacaaaagatacgcccttctccctgcacataaagcaggttgtagaacgtggcattcttgggcaagtaggtagactttacccagtctctttccttttttgctgatgtgtgctctctctctctctttctctctctctctctctctctctctctctctctctctctctgtctcgcttgctcgctctcgctgtttctctctctttgaggcatttgtttggaaaaaatcgttgagatgcccaagaacctgggataattctttactttttttgaaataaaggaaaggaaattcagactcttacattgttctctgtaactcttcaattctaaaatgttttgttttttaaaccatgttctgatggggaagttgatttgtaagtgtggacagcttggacattgctgctgagctgtggttagagatgatgcctccattcctagagggctaataacagcatttagcatattgtttacacatatatttttatgtcaaaaaaaaaacaaaaacctttcaaacagagcattgtgatattgtcaaagagaaaaacaaatcctgaagatacatggaaatgtaacctagtttagggtgggtatttttctgaagatacatcaatacctgaccttttttaaaaaaataattttaaaacagcatactgtgaggaagaacagtattgacatacccacatcccagcatgtgtaccctgccagttcttttagggatttttcctccaaagagatttggatttggttttggtaaaaggggttaaattgtgcttccaggcaagaactttgccttatcataaacaggaaatgaaaaagggaagggctgtcaggatgggataatttgggaggcttctcattctggcttctatttctatgtgagtaccagcatatagagtgttttaaaaacagatacatgtcatataatttatctgcacagacttagaccttcaggaaacataggttaagcccccttttacaaagaaaaagtaaacatacttcagcatcttggagggtagttttcaaaactcaagtttcatgtttcaatgccaagttcttattttaaaaaataaaatctacttataagagaaaggtgcattacttaaaaaaaaaaaactttaaagaaatgaaagaagaaccctcttcagatacttacttgaagactgttttcccctgttaatgagatatagctagatatcggtgtgtgtatttctttattattctctggtttttgatctggccttgcctccagggccaaacactgatttagaaagagagccttctagctattttggcattgatggctttttataccagtgtgtccagttagatttactaggcttactgacatgctattggtaaatcgcattaaagttcatctgaaccttctgtctgttgacttcttagtcctcagacatgggcctttgtgttttagaatatttgaatttgagttattgggccccactccctgttttttattaaagaacgtgagcctgggatactttcagaagtatctgttcaatgaaaaaaagttggtttcccatcaaatatgaataaaattctctatatatttcattgtattttggttatcagcagtcatcaataatgtttttccctcccctctcccacctcttatttttaattatgccaaatatcctaaataatatacttaagcctccattccctcatccctactagggaagggggtgagtgtatgtgtgagtgtatgtgtatgtatgatcccatctcacccccacccccattttgggagtcttttaaaatgaaaacaaagtttggtagttttgactatttctaaaagcagaggagaaaaaaaaacttatttaaatatcctggaatctgtatggaggaagaaaaggtatttgttaatttttcagttacgttatctataaacatgatggaagtaaaggtttggcagaatttcaccttgactatttgaaaattacagacccaattaattccattcaaaagtggttttcgttttgttttaattattgtacaatgagagatattgtctattaaatacattattttgaacagatgagaaatctgattctgttcatgagtgggaggcaaaactggtttgaccgtgatcatttttgtggttttgaaaacaaatatacttgacccagtttccttagttttttcttcaactgtccataggaacgataagtatttgaaagcaacatcaaatctatacgtttaaagcagggcagttagcacaaatttgcaagtagaacttctattagcttatgccatagacatcacccaaccacttgtatgtgtgtgtgtatatataatatgcatatatagttaccgtgctaaaatggttaccagcaggttttgagagagaatgctgcatcagaaaagtgtcagttgccacctcattctccctgatttaggttcctgacactgattcctttctctctcgtttttgacccccattgggtgtatcttgtctatgtacagatattttgtaatatattaaatttttttctttcagtttataaaaatggaaagtggagattggaaaattaaatatttcctgttactatacca

SEQ ID NO: 223 - DNA, 1181 bp, Homo sapiens
  misc_feature (298)..(298): second gene starts at position 298
atggcggcggcgccggtagcggctgggtctggagccggccgagggagacggtcggcagccacagtggcggcttggggcggatggggcggccggccgcggcctggtaacattctgctgcagctgcggcagggccagctgaccggccggggcctggtccgggcggtgcagttcactgagacttttttgacggagagggacaaacaatccaagtggagtggaattcctcagctgctcctcaagctgcacaccaccagccacctccacagtgactttgttgagtgtcaaaacatcctcaagactctggccatctatgaccggtttggccggttgatgtatggacaggaagatgtacccaaggatgtcctggagtatgttgtattcgaaaagcagttgacaaacccctatggaagctggagaatgcataccaagatcgttcccccatgggcaccccctaagcagcccatccttaagacggtgatgatccctggccctcagctgaaaccagaagaagaatatgaagaggcacaaggagaggcccagaagcctcagctagcctgatgacaaaaatgacttctagggtgaagcctgggtgatgaggctgctggaagctttgaagtctcccattcccctcatgctataaaaagaactacctttgttctctcccatcctgctcaggtcttttcagcagtctcatcatcagcaaccatgactgatgactgggccctagcaggtggcaggtataacatggccatggacactcttcttttttaaattttatgtctagcttctgagtctagatgaaagacagtatgtttcagagaacattggatatcagtttttcccacagcagggactgtgagagacaaccagcagcatcctctttgtaatcacagggcagggatcagagtttgaaatgaaatgttgtcagggtgttggaaaaattttggtgagttctgcacatttcccctggttcaggctgggcatggaccagccttcagatggcagaagtggaagatgagcctacttgtgagcgatgtgactttaaggaaatgaagactggggaagaataattagtgtttataagacatttaagaggccctttttcatatactgactcactgatgaatcagcatttgcattttatggaaaaatataaatccaaagaaataatttatccctta

SEQ ID NO: 224 - DNA, 1181 bp, Homo sapiens; identical to SEQ ID NO: 223
  misc_feature (298)..(298): second gene starts at position 298

SEQ ID NO: 225 - DNA, 2628 bp, Homo sapiens
  misc_feature (63)..(63): second gene starts at position 63
atgacgtccatccatttcgtggttcacccgctgccgggcaccgaggaccagctcaatgacagtgagtgatggattggaactgagaccgaaatataatggaattttacattgcttgactaccatttggaaacttgatggactacggggactttatcaaggagtaaccccaaatatatggggtgcaggtttatcctggggactctactttttcttttacaatgccatcaagtcatataaaacagaaggaagagctgaacgtttagaggcaacagaataccttgtctcagctgctgaagctggagccatgaccctctgcattacaaacccattatgggtaacaaaaactcgccttatgttacagtatgatgctgttgttaactccccacaccgacaatataaaggaatgtttgatacacttgtgaaaatatataagtatgaaggtgtgcgtggattatataagggatttgttcctgggctgtttggaacatcgcatggtgcccttcagtttatggcatatgaattgctgaagttgaagtacaaccagcatatcaatagattaccagaagcccagttgagcacagtagaatatatatctgttgcagcactatccaaaatatttgctgtcgcagcaacatacccatatcaagtcgtaagagctcgtcttcaggatcaacacatgttttacagtggtgtaatagatgtaatcacaaagacatggaggaaagaaggcgtcggtggattttacaagggaattgctcctaatttgattagagtgactccagcctgctgtattacctttgtggtatatgaaaacgtctcacattttttacttgaccttagagaaaagagaaagtaagctcaaagaggacaattccagtatatctgcccaaggcagcaacaagctcttttgtgtttaaggcataaaagaagaattctgcatagaaacatggctcatattcgaaattgctctatagtcattagaagccagagaactgctaagtctcctgcaatgtttttcttgctttttgccttccccatatatatggaacttggctacctctgcctgaaatggctgccatcaacacaatgttaaaactgacacgaaggatagagtttcacagatttctacgttttattggtggaagctgatttgcaacatttgctaaatggattagatgaatgtacttctttttgtgagcttacttgcctggattgctttaaaattaacctttgtgcaataccaagaaaatagctctttaaaagaatgtctttgtatgtctcaaggtaaattaaggatttactgaataaggtgttgaccaaatccagaccattttattttatttttttatttatttattttttgagatggagtcttgctttgtcgcccaggctggagtgcagtggcgtgatctcagctcactgcaacctccacctcccgggttcacgccattctcctgcctcagcctcctgagtagctgggactacaggcacctgccaccacgcctggctaacttttttttatattttgagtagaaatggggtttcaccatgttagccaggatggtctcaatctcctgaccttgtgatccgcctgccttggcctcccaaagtgctgggattacaggcgtgagccactgcgcctggccagaccattttagaattgggaaattttagtgagaaaaaatgcactgtaaatatgctttagttttaattcagttgggatgcactacctagcgaaaattgagaaactatatacttctcagagaaatatctgacatctattgtcattccattgctattttttttccccagagacttccataatttaaaataaaatcctagatccagttcttgttttttggcataaatacttaatctattttaaatttataaaatctgagcttctaggatccagctgtgtcaacctttatttagcatatataactataaatcacttattacagatgctaaatagatcaccttttacagatgctgaaatgtttgggatatgtttgttgacaaggtaaatggaaatgagaaactttatacttcagttttcagatatatggatctagatcccaaataaatgattaatcttcattggtttctcaaattcaggttgaaatacaaattaatagcctttattgattttacttttatgagtcattgtagacatctataaatataaaagggcctgtacccaaaggatgccagaatactagtatttttatttatcgtaaacatccacgagtgctgttgcactaccatctatttgttgtaaataaaagtgttgttttcaaagccatctttaaatagttctttaaaaataggtcttttttttatattttggaaaaggcattgtttttaaagtaaagataaaatggtaagtacctaattgtatttactgtaatatcttataacatgcagatgaatgctttataagttaaatatgatgtattttttcatacttctggattatactataattcatatgaaatcttgatattagtccccacacggaaaaagtgaactgcagttgatatttggtgtttaagatagcaccattgtttaaataccgcctatgtactcccaaatgaataaaacataattcttgtcctctgagagcat

SEQ ID NO: 226 - DNA, 4678 bp, Homo sapiens
  misc_feature (172)..(172): second gene starts at position 172
ggggacggtgggagcagatccatttccgggttggcaaaaggggcggtggcggcggcggcggcggcggcggcggcggcgacggcgagaaagagcttgccggggggcgagcaggacaggacgaagccggagtgtaggcggcagaggattcgctcccagagcagctgcggccaggtggcaaagcaaagctatattcaagaccacatgcaaagctactccctgagcaaagagtcacagataaaacgggggcaccagtagaatggccaggacaaacgcagtgcagcacagagactcagaccctggcagccatgcctgcgcaggcagtgatgagagtgacatgtactgttgtggacatgcacaaaagtgagtgtgcaccggcacagacatgaagctgcggctccctgccagtcccgagacccacctggacatgctccgccacctctaccagggctgccaggtggtgcagggaaacctggaactcacctacctgcccaccaatgccagcctgtccttcctgcaggatatccaggaggtgcagggctacgtgctcatcgctcacaaccaagtgaggcaggtcccactgcagaggctgcggattgtgcgaggcacccagctctttgaggacaactatgccctggccgtgctagacaatggagacccgctgaacaataccacccctgtcacaggggcctccccaggaggcctgcgggagctgcagcttcgaagcctcacagagatcttgaaaggaggggtcttgatccagcggaacccccagctctgctaccaggacacgattttgtggaaggacatcttccacaagaacaaccagctggctctcacactgatagacaccaaccgctctcgggcctgccacccctgttctccgatgtgtaagggctcccgctgctggggagagagttctgaggattgtcagagcctgacgcgcactgtctgtgccggtggctgtgcccgctgcaaggggccactgcccactgactgctgccatgagcagtgtgctgccggctgcacgggccccaagcactctgactgcctggcctgcctccacttcaaccacagtggcatctgtgagctgcactgcccagccctggtcacctacaacacagacacgtttgagtccatgcccaatcccgagggccggtatacattcggcgccagctgtgtgactgcctgtccctacaactacctttctacggacgtgggatcctgcaccctcgtctgccccctgcacaaccaagaggtgacagcagaggatggaacacagcggtgtgagaagtgcagcaagccctgtgcccgagtgtgctatggtctgggcatggagcacttgcgagaggtgagggcagttaccagtgccaatatccaggagtttgctggctgcaagaagatctttgggagcctggcatttctgccggagagctttgatggggacccagcctccaacactgccccgctccagccagagcagctccaagtgtttgagactctggaagagatcacaggttacctatacatctcagcatggccggacagcctgcctgacctcagcgtcttccagaacctgcaagtaatccggggacgaattctgcacaatggcgcctactcgctgaccctgcaagggctgggcatcagctggctggggctgcgctcactgagggaactgggcagtggactggccctcatccaccataacacccacctctgcttcgtgcacacggtgccctgggaccagctctttcggaacccgcaccaagctctgctccacactgccaaccggccagaggacgagtgtgtgggcgagggcctggcctgccaccagctgtgcgcccgagggcactgctggggtccagggcccacccagtgtgtcaactgcagccagttccttcggggccaggagtgcgtggaggaatgccgagtactgcaggggctccccagggagtatgtgaatgccaggcactgtttgccgtgccaccctgagtgtcagccccagaatggctcagtgacctgttttggaccggaggctgaccagtgtgtggcctgtgcccactataaggaccctcccttctgcgtggcccgctgccccagcggtgtgaaacctgacctctcctacatgcccatctggaagtttccagatgaggagggcgcatgccagccttgccccatcaactgcacccactcctgtgtggacctggatgacaagggctgccccgccgagcagagagccagccctctgacgtccatcatctctgcggtggttggcattctgctggtcgtggtcttgggggtggtctttgggatcctcatcaagcgacggcagcagaagatccggaagtacacgatgcggagactgctgcaggaaacggagctggtggagccgctgacacctagcggagcgatgcccaaccaggcgcagatgcggatcctgaaagagacggagctgaggaaggtgaaggtgcttggatctggcgcttttggcacagtctacaagggcatctggatccctgatggggagaatgtgaaaattccagtggccatcaaagtgttgagggaaaacacatcccccaaagccaacaaagaaatcttagacgaagcatacgtgatggctggtgtgggctccccatatgtctcccgccttctgggcatctgcctgacatccacggtgcagctggtgacacagcttatgccctatggctgcctcttagaccatgtccgggaaaaccgcggacgcctgggctcccaggacctgctgaactggtgtatgcagattgccaaggggatgagctacctggaggatgtgcggctcgtacacagggacttggccgctcggaacgtgctggtcaagagtcccaaccatgtcaaaattacagacttcgggctggctcggctgctggacattgacgagacagagtaccatgcagatgggggcaaggtgcccatcaagtggatggcgctggagtccattctccgccggcggttcacccaccagagtgatgtgtggagttatggtgtgactgtgtgggagctgatgacttttggggccaaaccttacgatgggatcccagcccgggagatccctgacctgctggaaaagggggagcggctgccccagccccccatctgcaccattgatgtctacatgatcatggtcaaatgttggatgattgactctgaatgtcggccaagattccgggagttggtgtctgaattctcccgcatggccagggacccccagcgctttgtggtcatccagaatgaggacttgggcccagccagtcccttggacagcaccttctaccgctcactgctggaggacgatgacatgggggacctggtggatgctgaggagtatctggtaccccagcagggcttcttctgtccagaccctgccccgggcgctgggggcatggtccaccacaggcaccgcagctcatctaccaggagtggcggtggggacctgacactagggctggagccctctgaagaggaggcccccaggtctccactggcaccctccgaaggggctggctccgatgtatttgatggtgacctgggaatgggggcagccaaggggctgcaaagcctccccacacatgaccccagccctctacagcggtacagtgaggaccccacagtacccctgccctctgagactgatggctacgttgcccccctgacctgcagcccccagcctgaatatgtgaaccagccagatgttcggccccagcccccttcgccccgagagggccctctgcctgctgcccgacctgctggtgccactctggaaaggcccaagactctctccccagggaagaatggggtcgtcaaagacgtttttgcctttgggggtgccgtggagaaccccgagtacttgacaccccagggaggagctgcccctcagccccaccctcctcctgccttcagcccagccttcgacaacctctattactgggaccaggacccaccagagcggggggctccacccagcaccttcaaagggacacctacggcagagaacccagagtacctgggtctggacgtgccagtgtgaaccagaaggccaagtccgcagaagccctgatgtgtcctcagggagcagggaaggcctgacttctgctggcatcaagaggtgggagggccctccgaccacttccaggggaacctgccatgccaggaacctgtcctaaggaaccttccttcctgcttgagttcccagatggctggaaggggtccagcctcgttggaagaggaacagcactggggagtctttgtggattctgaggccctgcccaatgagactctagggtccagtggatgccacagcccagcttggccctttccttccagatcctgggtactgaaagccttagggaagctggcctgagaggggaagcggccctaagggagtgtctaagaacaaaagcgacccattcagagactgtccctgaaacctagtactgccccccatgaggaaggaacagcaatggtgtcagtatccaggctttgtacagagtgcttttctgtttagtttttactttttttgttttgtttttttaaagatgaaataaagacccagggggagaatgggtgttgtatggggaggcaagtgtggggggtccttctccacacccactttgtccatttgcaaatatattttggaaaacagcta

SEQ ID NO: 227 - DNA, 4484 bp, Homo sapiens
  misc_feature (172)..(172): second gene starts at position 172
ggggacggtgggagcagatccatttccgggttggcaaaaggggcggtggcggcggcggcggcggcggcggcggcggcgacggcgagaaagagcttgccggggggcgagcaggacaggacgaagccggagtgtaggcggcagaggattcgctcccagagcagctgcggccagtgtgcaccggcacagacatgaagctgcggctccctgccagtcccgagacccacctggacatgctccgccacctctaccagggctgccaggtggtgcagggaaacctggaactcacctacctgcccaccaatgccagcctgtccttcctgcaggatatccaggaggtgcagggctacgtgctcatcgctcacaaccaagtgaggcaggtcccactgcagaggctgcggattgtgcgaggcacccagctctttgaggacaactatgccctggccgtgctagacaatggagacccgctgaacaataccacccctgtcacaggggcctccccaggaggcctgcgggagctgcagcttcgaagcctcacagagatcttgaaaggaggggtcttgatccagcggaacccccagctctgctaccaggacacgattttgtggaaggacatcttccacaagaacaaccagctggctctcacactgatagacaccaaccgctctcgggcctgccacccctgttctccgatgtgtaagggctcccgctgctggggagagagttctgaggattgtcagagcctgacgcgcactgtctgtgccggtggctgtgcccgctgcaaggggccactgcccactgactgctgccatgagcagtgtgctgccggctgcacgggccccaagcactctgactgcctggcctgcctccacttcaaccacagtggcatctgtgagctgcactgcccagccctggtcacctacaacacagacacgtttgagtccatgcccaatcccgagggccggtatacattcggcgccagctgtgtgactgcctgtccctacaactacctttctacggacgtgggatcctgcaccctcgtctgccccctgcacaaccaagaggtgacagcagaggatggaacacagcggtgtgagaagtgcagcaagccctgtgcccgagtgtgctatggtctgggcatggagcacttgcgagaggtgagggcagttaccagtgccaatatccaggagtttgctggctgcaagaagatctttgggagcctggcatttctgccggagagctttgatggggacccagcctccaacactgccccgctccagccagagcagctccaagtgtttgagactctggaagagatcacaggttacctatacatctcagcatggccggacagcctgcctgacctcagcgtcttccagaacctgcaagtaatccggggacgaattctgcacaatggcgcctactcgctgaccctgcaagggctgggcatcagctggctggggctgcgctcactgagggaactgggcagtggactggccctcatccaccataacacccacctctgcttcgtgcacacggtgccctgggaccagctctttcggaacccgcaccaagctctgctccacactgccaaccggccagaggacgagtgtgtgggcgagggcctggcctgccaccagctgtgcgcccgagggcactgctggggtccagggcccacccagtgtgtcaactgcagccagttccttcggggccaggagtgcgtggaggaatgccgagtactgcaggggctccccagggagtatgtgaatgccaggcactgtttgccgtgccaccctgagtgtcagccccagaatggctcagtgacctgttttggaccggaggctgaccagtgtgtggcctgtgcccactataaggaccctcccttctgcgtggcccgctgccccagcggtgtgaaacctgacctctcctacatgcccatctggaagtttccagatgaggagggcgcatgccagccttgccccatcaactgcacccactcctgtgtggacctggatgacaagggctgccccgccgagcagagagccagccctctgacgtccatcatctctgcggtggttggcattctgctggtcgtggtcttgggggtggtctttgggatcctcatcaagcgacggcagcagaagatccggaagtacacgatgcggagactgctgcaggaaacggagctggtggagccgctgacacctagcggagcgatgcccaaccaggcgcagatgcggatcctgaaagagacggagctgaggaaggtgaaggtgcttggatctggcgcttttggcacagtctacaagggcatctggatccctgatggggagaatgtgaaaattccagtggccatcaaagtgttgagggaaaacacatcccccaaagccaacaaagaaatcttagacgaagcatacgtgatggctggtgtgggctccccatatgtctcccgccttctgggcatctgcctgacatccacggtgcagctggtgacacagcttatgccctatggctgcctcttagaccatgtccgggaaaaccgcggacgcctgggctcccaggacctgctgaactggtgtatgcagattgccaaggggatgagctacctggaggatgtgcggctcgtacacagggacttggccgctcggaacgtgctggtcaagagtcccaaccatgtcaaaattacagacttcgggctggctcggctgctggacattgacgagacagagtaccatgcagatgggggcaaggtgcccatcaagtggatggcgctggagtccattctccgccggcggttcacccaccagagtgatgtgtggagttatggtgtgactgtgtgggagctgatgacttttggggccaaaccttacgatgggatcccagcccgggagatccctgacctgctggaaaagggggagcggctgccccagccccccatctgcaccattgatgtctacatgatcatggtcaaatgttggatgattgactctgaatgtcggccaagattccgggagttggtgtctgaattctcccgcatggccagggacccccagcgctttgtggtcatccagaatgaggacttgggcccagccagtcccttggacagcaccttctaccgctcactgctggaggacgatgacatgggggacctggtggatgctgaggagtatctggtaccccagcagggcttcttctgtccagaccctgccccgggcgctgggggcatggtccaccacaggcaccgcagctcatctaccaggagtggcggtggggacctgacactagggctggagccctctgaagaggaggcccccaggtctccactggcaccctccgaaggggctggctccgatgtatttgatggtgacctgggaatgggggcagccaaggggctgcaaagcctccccacacatgaccccagccctctacagcggtacagtgaggaccccacagtacccctgccctctgagactgatggctacgttgcccccctgacctgcagcccccagcctgaatatgtgaaccagccagatgttcggccccagcccccttcgccccgagagggccctctgcctgctgcccgacctgctggtgccactctggaaaggcccaagactctctccccagggaagaatggggtcgtcaaagacgtttttgcctttgggggtgccgtggagaaccccgagtacttgacaccccagggaggagctgcccctcagccccaccctcctcctgccttcagcccagccttcgacaacctctattactgggaccaggacccaccagagcggggggctccacccagcaccttcaaagggacacctacggcagagaacccagagtacctgggtctggacgtgccagtgtgaaccagaaggccaagtccgcagaagccctgatgtgtcctcagggagcagggaaggcctgacttctgctggcatcaagaggtgggagggccctccgaccacttccaggggaacctgccatgccaggaacctgtcctaaggaaccttccttcctgcttgagttcccagatggctggaaggggtccagcctcgttggaagaggaacagcactggggagtctttgtggattctgaggccctgcccaatgagactctagggtccagtggatgccacagcccagcttggccctttccttccagatcctgggtactgaaagccttagggaagctggcctgagaggggaagcggccctaagggagtgtctaagaacaaaagcgacccattcagagactgtccctgaaacctagtactgccccccatgaggaaggaacagcaatggtgtcagtatccaggctttgtacagagtgcttttctgtttagtttttactttttttgttttgtttttttaaagatgaaataaagacccagggggagaatgggtgttgtatggggaggcaagtgtggggggtccttctccacacccactttgtccatttgcaaatatattttggaaaacagcta

SEQ ID NO: 228 - DNA, 4484 bp, Homo sapiens; identical to SEQ ID NO: 227
  misc_feature (172)..(172): second gene starts at position 172

SEQ ID NO: 229 - DNA, 8208 bp, Homo sapiens
  misc_feature (119)..(119): second gene starts at position 119
atgcatccacagagcttggctgaagaggaaataaaaacagaacaggaggtggtagagggcatggatatctctactcgctccaaagatcctggctctgcagagagaacagcccagaaaagaaagttccccagccctccacattcttccaatggccactcgccgcaggacacatcaacaagccccattaaaaagaaaaagaaacctggcttactgaacagtaacaataaggagcagtcagaactaagacatggtccgttttactatatgaagcagccactcaccacagaccctgttgatgttgtaccgcaggatggacggaatgatttctactgctgggtttgtcaccgggaaggccaagtcctttgctgtgagctctgtccccgggtttatcacgctaagtgtctgagactgacatcggaaccagagggggactggttttgtcctgaatgtgagaaaattacagtagcagaatgcatcgagacccagagtaaagccatgacaatgctcaccattgaacagttatcctacctgctcaagtttgccattcagaaaatgaaacagccagggacagatgcattccagaagcccgttccattggaacagcaccctgactatgcggaatacatcttccatccaatggacctttgtacattggaaaagaatgcgaaaaagaaaatgtatggctgcacagaagccttcctggctgatgcaaagtggattttgcacaactgcatcatttataatgggggaaatcacaaattgacgcaaatagcgaaagtagtcatcaaaatctgtgaacatgagatgaatgaaatcgaagtatgtccagaatgttatctagctgcttgccaaaaacgagataactggttttgtgagccttgtagcaatccacatcctttggtctgggccaaactgaaggggtttccattctggcctgcaaaagctctaagggataaagacgggcaggtcgatgcccgattctttggacaacatgacagggcctgggttccaataaataattgctacctcatgtctaaagaaattcctttttctgtgaaaaagactaagagcatcttcaacagtgccatgcaagagatggaggtttacgtggagaacatccgcaggaagtttggggtttttaattactctccatttaggacaccctacacacccaacagccagtatcaaatgctgctcgatcccaccaaccccagcgccggcactgccaagatagacaagcaggagaaggtcaagctcaactttgacatgacggcatcccccaagatcctgatgagcaagcctgtgctgagtgggggcacaggccgccggatttccttgtcggatatgccgcgctcccccatgagcacaaactcttctgtgcacacgggctccgacgtggagcaggatgctgagaagaaggccacgtcgagccacttcagtgcgagcgaggagtccatggacttcctggataagagcacagcttcaccagcctccaccaagacgggacaagcagggagtttatccggcagcccaaagcccttctctcctcaactgtcagctcctatcacgacgaaaacggacaaaacctccaccaccggcagcatcctgaatcttaacctggatcgaagcaaagctgagatggatttgaaggagctgagcgagtcggtccagcaacagtccacccctgttcctctcatctctcccaagcgccagattcgtagcaggttccagctgaatcttgacaagaccatagagagttgcaaagcacaattaggcataaatgaaatctcggaagatgtctatacggccgtagagcacagcgattcggaggattctgagaagtcagatagtagcgatagtgagtatatcagtgatgatgagcagaagtctaagaacgagccagaagacacagaggacaaagaaggttgtcagatggacaaagagccatctgctgttaaaaaaaagcccaagcctacaaacccagtggagattaaagaggagctgaaaagcacgtcaccagccagcgagaaggcagaccctggagcagtcaaggacaaggccagccctgagcctgagaaggacttttccgaaaaggcaaaaccttcacctcaccccataaaggataaactgaagggaaaagatgagacggattccccaacagtccatttgggcctggactctgattcagagagcgaacttgtcatagatttaggagaagaccattctgggcgggagggtcgaaaaaataagaaggaacccaaagaaccatctcccaaacaggatgttgtaggtaaaactccaccatccacgacggtgggcagccattctcccccggaaacaccggtgctcacccgctcttccgcccaaacttccgcggctggcgccacagccaccaccagcacgtcctccacggtcaccgtcacggccccggcccccgccgccacaggaagcccagtgaaaaagcagaggccgcttttaccgaaggagactgccccggccgtgcagcgggtcgtgtggaactcatcaactgtccagcagaaggagatcacacagagcccatccacgtccaccatcaccctggtgaccagcacacagtcatcgcccctggtcaccagctcggggtccatgagcacccttgtgtcctcagtcaacgctgacctgcccatcgccactgcctcagctgatgtcgccgctgatattgccaagtacactagcaaaatgatggatgcaataaaaggaacaatgacagaaatatacaacgatctttctaaaaacactactggaagcacaatagctgagattcgcaggctgaggatcgagatagagaagctccagtggctgcaccagcaagagctctccgaaatgaaacacaacttagagctgaccatggcggagatgcggcagagcctggagcaggagcgggaccggctcatcgccgaggtgaagaagcagctggagttggagaagcagcaggcggtggatgagaccaagaagaagcagtggtgcgccaactgcaagaaggaggccatcttttactgctgttggaacactagctactgtgactacccctgccagcaagcccactggcctgagcacatgaagtcctgcacccagtcaggagaaggagcgctcctggcaccagcaggagctggcaaaggctctggagagcttagaaagggaaaaaatggagctggaaatgaggctaaaggagcagcagacagaaatggaggccatccaggcccagagggaagaagaacggacccaggcagagagtgccctatgccagatgcagctggaaacagagaaggagagagtatccctcctggagacactgctgcagacgcagaaggagctagcagatgccagccaacaactggaacgactgaggcaggacatgaaagtccagaaattaaaggagcaggagaccactgggatactacagacccagctccaggaggctcaacgggagctgaaggaggcagcccggcagcacagagatgaccttgctgccctccaagaagagagcagctccctgctgcaggataagatggacctgcagaagcaggtggaggacttgaagtctcagctggtggcccaggatgactcccagaggctggtggagcaggaggttcaggagaagctgagagagacccaggagtataaccgaattcagaaggagctggagagagagaaagccagcctgactctgtcactgatggaaaaggaacagagactccttgttttacaagaagctgactctattcgacaacaagagctgagtgccctgcgccaggacatgcaggaggcccagggagaacagaaagagctcagtgctcagatggaattactaaggcaagaggtgaaggaaaaggaggctgactttctggcccaggaagcacagctgctggaggagctggaggcgtctcatatcacggagcagcagctgcgagcctccttgtgggcccaggaagccaaggcagcccaactacagctgcgactgcgcagcacagagagccagctagaagcgctggccgcagagcagcagcccgggaaccaggcccaggcccaggcccagctggccagcctctactctgccctgcagcaggccctggggtctgtttgtgagagcaggcctgagctgagtggtgggggagactctgctccttccgtctggggccttgagccagaccagaatggagctaggagcctctttaagagagggcccctgctgactgctctctccgctgaggcagtagcatctgccctccacaagcttcatcaagacctgtggaagactcaacagacccgggatgttctgagggatcaggtccagaaactggaagagcgtctaactgatactgaggctgagaagagccaggtccacacagagttgcaggatctgcagagacagctctcccagaatcaggaagagaaatccaagtgggaaggaaagcagaactccctagaatctgagctgatggaactacatgaaactatggcatccttacagagtcgcctgcggagagcagagctacagcgaatggaagcccagggtgagcgagagttacttcaggcagccaaggagaacctgacagcccaggtggaacacctgcaagcagctgtcgtagaagccagggctcaggcaagtgctgctggcatcctggaagaagacctgagaacggctcgctcagcactgaagctgaaaaatgaggaagtagagagtgagcgtgagagagcccaggctctgcaagagcagggcgaactgaaggtggcccaagggaaggctctgcaagagaatttggccctcctgacccagaccctagctgaaagagaagaggaggtggagactctgcggggacaaatccaggaactggagaagcaacgggaaatgcagaaggctgctttggaattgctgtctctggacctgaagaagaggaaccaagaggtagatctgcagcaagaacagattcaggagctagagaagtgtaggtctgttttagagcatctgcccatggccgtccaggagcgagagcagaagctgactgtgcagagggagcagatcagagagctcgagaaggatcgggagactcagaggaacgtcttggagcatcagcttctagaacttgagaagaaagaccaaatgattgagtcccagagaggacaggttcaggacctgaaaaagcagttggttactctggaatgcctggccctggaactggaggaaaaccatcacaagatggagtgccagcaaaaactgatcaaggagctggagggccagagggaaacccagagagtggctttgacccaccttacgctggacctagaagaaaggagccaggagctgcaggcacaaagcagccagatccatgacctggagagccacagcaccgttctggcaagagagctgcaggagagggaccaggaggtgaagtctcagcgagaacagatcgaggagctgcagaggcagaaagagcatctgactcaggatctcgagaggagagaccaggagctgatgctgcagaaggagaggattcaggttctcgaggatcagaggacccggcagaccaagatcctggaggaggacctggaacagatcaagctgtccttgagagagcgaggccgggagctgaccactcagaggcagctgatgcaggaacgggcagaggaagggaagggcccaagtaaagcacagcgcgggagcctagagcacatgaagctgatcctgcgtgataaggagaaggaggtggaatgtcagcaggagcatatccatgaactccaggagctcaaagaccagctggagcagcagctccagggcctgcacaggaaggtaggtgagaccagcctcctcctgtcccagcgagagcaggaaatagtggtcctgcagcagcaactgcaggaagccagggaacaaggggagctgaaggagcagtcacttcagagtcaactggatgaggcccagagagccctagcccagagggaccaggaactggaggctctgcagcaagaacagcagcaggcccagggacaggaggagagggtgaaggaaaaggcagacgccctccagggagctctggagcaagcccatatgacactgaaggagcgtcatggagagcttcaggaccacaaggaacaggcacgaaggctggaggaagagctggcagtggagggacggcgggtccaggccctggaggaggtgctgggagacctaagggctgagtctcgggaacaggagaaagctctgttggccctccagcagcagtgtgctgagcaggcacaggagcatgaggtggagaccagggccctgcaggacagctggctgcaggcccaggcagtgctcaaggaacgggaccaggagctggaagctctgcgggcagaaagtcagtcctcccggcatcaggaggaggctgcccgggcccgggctgaggctctgcaggaggcccttggcaaggctcatgctgccctgcaggggaaagagcagcatctcctcgagcaggcagaattgagccgcagtctggaggccagcactgcaaccctgcaagcctccctggatgcctgccaggcacacagtcggcagctggaggaggctctgaggatacaagaaggtgagatccaggaccaggatctccgataccaggaggatgtgcagcagctgcagcaggcacttgcccagagggatgaagagctgagacatcagcaggaacgggagcagctgctggagaagtctctggcccagagggtccaagagaatatgatccaagagaagcagaatctggggcaagagagagaagaggaggagataaggggccttcatcagagtgtaagggagctacagctgactctagcccaaaaggaacaggagattctggagctgagggagacccagcaaaggaacaacctggaagccttaccccacagccacaaaacctccccaatggaggaacaatctctaaaacttgattctttagagcccaggctgcagcgggagctggagcggctacaggcagccctgagacagacagaagccagggagattgagtggagggagaaggcccaggacttggcactctccctagcgcagaccaaggccagtgtcagcagtctgcaggaggtagccatgttcctacaagcctctgtcctggagcgggactcagaacagcaaaggctgcaggatgaactggagctcaccagacgggctctggagaaggagcggctacacagcccaggtgcaaccagcacagcagaactggggtccagaggggagcagggtgtgcagctgggagaggtctcaggagtggaggctgagcctagtcctgatggaatggagaagcagtcatggagacaaaggcttgaacacctgcagcaagcagtggcccggctggagattgacaggagcaggctgcagcgccacaatgtccagctgcggagtaccttggagcaggtggagcgagaacggaggaagctgaagagggaggccatgcgtgcggcccaggcagggtccctagagatcagcaaggccacggcttcttcacccacacagcaggatgggagaggacagaagaactcagatgccaagtgtgtggctgaactgcagaaagaggtggtcctgctgcaagctcagctgactttggagcggaagcagaagcaggactacatcacccgctcagcacagaccagccgtgagctagcaggcctgcaccacagcctctcacactcacttcttgccgtggcccaggcccctgaggccactgtcctggaggcagagacccgcaggctggatgagtccctgactcaaagtctgacatccccagggccagtcctgctacaccccagccccagcactacccaagccgcctccaggtagcagccacagccaggagcacacagacagaagactgtgtcatgggtcatggcccctccgcacacctacaggtttgccaaaggaaaagcctggctctgttaggcacccaggagccccaggtcggcgggtgttcccaggaagaggaagtaaatctgcaaccctggggaggaccccaactcacctgggaatgaggcaaattgcatttgcttgctccctatggaatcacccagaggggtgccttgccctggctgagggacatgtactgcctctcatctagaatttattttcctagcacttcaccacctccttcatcttctccttcaacaataaaccctgagatctttgcattc

SEQ ID NO: 230 - DNA, 8040 bp, Homo sapiens
  misc_feature (119)..(119): second gene starts at position 119
atgcatccacagagcttggctgaagaggaaataaaaacagaacaggaggtggtagagggcatggatatctctactcgctccaaagatcctggctctgcagagagaacagcccagaaaagaaagttccccagccctccacattcttccaatggccactcgccgcaggacacatcaacaagccccattaaaaagaaaaagaaacctggcttactgaacagtaacaataaggagcagtcagaactaagacatggtccgttttactatatgaagcagccactcaccacagaccctgttgatgttgtaccgcaggatggacggaatgatttctactgctgggtttgtcaccgggaaggccaagtcctttgctgtgagctctgtccccgggtttatcacgctaagtgtctgagactgacatcggaaccagagggggactggttttgtcctgaatgtgagaaaattacagtagcagaatgcatcgagacccagagtaaagccatgacaatgctcaccattgaacagttatcctacctgctcaagtttgccattcagaaaatgaaacagccagggacagatgcattccagaagcccgttccattggaacagcaccctgactatgcggaatacatcttccatccaatggacctttgtacattggaaaagaatgcgaaaaagaaaatgtatggctgcacagaagccttcctggctgatgcaaagtggattttgcacaactgcatcatttataatgggggaaatcacaaattgacgcaaatagcgaaagtagtcatcaaaatctgtgaacatgagatgaatgaaatcgaagtatgtccagaatgttatctagctgcttgccaaaaacgagataactggttttgtgagccttgtagcaatccacatcctttggtctgggccaaactgaaggggtttccattctggcctgcaaaagctctaagggataaagacgggcaggtcgatgcccgattctttggacaacatgacagggcctgggttccaataaataattgctacctcatgtctaaagaaattcctttttctgtgaaaaagactaagagcatcttcaacagtgccatgcaagagatggaggtttacgtggagaacatccgcaggaagtttggggtttttaattactctccatttaggacaccctacacacccaacagccagtatcaaatgctgctcgatcccaccaaccccagcgccggcactgccaagatagacaagcaggagaaggtcaagctcaactttgacatgacggcatcccccaagatcctgatgagcaagcctgtgctgagtgggggcacaggccgccggatttccttgtcggatatgccgcgctcccccatgagcacaaactcttctgtgcacacgggctccgacgtggagcaggatgctgagaagaaggccacgtcgagccacttcagtgcgagcgaggagtccatggacttcctggataagagcacagcttcaccagcctccaccaagacgggacaagcagggagtttatccggcagcccaaagcccttctctcctcaactgtcagctcctatcacgacgaaaacggacaaaacctccaccaccggcagcatcctgaatcttaacctggatcgaagcaaagctgagatggatttgaaggagctgagcgagtcggtccagcaacagtccacccctgttcctctcatctctcccaagcgccagattcgtagcaggttccagctgaatcttgacaagaccatagagagttgcaaagcacaattaggcataaatgaaatctcggaagatgtctatacggccgtagagcacagcgattcggaggattctgagaagtcagatagtagcgatagtgagtatatcagtgatgatgagcagaagtctaagaacgagccagaagacacagaggacaaagaaggttgtcagatggacaaagagccatctgctgttaaaaaaaagcccaagcctacaaacccagtggagattaaagaggagctgaaaagcacgtcaccagccagcgagaaggcagaccctggagcagtcaaggacaaggccagccctgagcctgagaaggacttttccgaaaaggcaaaaccttcacctcaccccataaaggataaactgaagggaaaagatgagacggattccccaacagtccatttgggcctggactctgattcagagagcgaacttgtcatagatttaggagaagaccattctgggcgggagggtcgaaaaaataagaaggaacccaaagaaccatctcccaaacaggatgttgtaggtaaaactccaccatccacgacggtgggcagccattctcccccggaaacaccggtgctcacccgctcttccgcccaaacttccgcggctggcgccacagccaccaccagcacgtcctccacggtcaccgtcacggccccggcccccgccgccacaggaagcccagtgaaaaagcagaggccgcttttaccgaaggagactgccccggccgtgcagcgggtcgtgtggaactcatcaactgtccagcagaaggagatcacacagagcccatccacgtccaccatcaccctggtgaccagcacacagtcatcgcccctggtcaccagctcggggtccatgagcacccttgtgtcctcagtcaacgctgacctgcccatcgccactgcctcagctgatgtcgccgctgatattgccaagtacactagcaaaatgatggatgcaataaaaggaacaatgacagaaatatacaacgatctttctaaaaacactactggaagcacaatagctgagattcgcaggctgaggatcgagatagagaagctccagtggctgcaccagcaagagctctccgaaatgaaacacaacttagagctgaccatggcggagatgcggcagagcctggagcaggagcgggaccggctcatcgccgaggtgaagaagcagctggagttggagaagcagcaggcggtggatgagaccaagaagaagcagtggtgcgccaactgcaagaaggaggccatcttttactgctgttggaacactagctactgtgactacccctgccagcaagcccactggcctgagcacatgaagtcctgcacccagtcagatgcagctggaaacagagaaggagagagtatccctcctggagacactgctgcagacgcagaaggagctagcagatgccagccaacaactggaacgactgaggcaggacatgaaagtccagaaattaaaggagcaggagaccactgggatactacagacccagctccaggaggctcaacgggagctgaaggaggcagcccggcagcacagagatgaccttgctgccctccaagaagagagcagctccctgctgcaggataagatggacctgcagaagcaggtggaggacttgaagtctcagctggtggcccaggatgactcccagaggctggtggagcaggaggttcaggagaagctgagagagacccaggagtataaccgaattcagaaggagctggagagagagaaagccagcctgactctgtcactgatggaaaaggaacagagactccttgttttacaagaagctgactctattcgacaacaagagctgagtgccctgcgccaggacatgcaggaggcccagggagaacagaaagagctcagtgctcagatggaattactaaggcaagaggtgaaggaaaaggaggctgactttctggcccaggaagcacagctgctggaggagctggaggcgtctcatatcacggagcagcagctgcgagcctccttgtgggcccaggaagccaaggcagcccaactacagctgcgactgcgcagcacagagagccagctagaagcgctggccgcagagcagcagcccgggaaccaggcccaggcccaggcccagctggccagcctctactctgccctgcagcaggccctggggtctgtttgtgagagcaggcctgagctgagtggtgggggagactctgctccttccgtctggggccttgagccagaccagaatggagctaggagcctctttaagagagggcccctgctgactgctctctccgctgaggcagtagcatctgccctccacaagcttcatcaagacctgtggaagactcaacagacccgggatgttctgagggatcaggtccagaaactggaagagcgtctaactgatactgaggctgagaagagccaggtccacacagagttgcaggatctgcagagacagctctcccagaatcaggaagagaaatccaagtgggaaggaaagcagaactccctagaatctgagctgatggaactacatgaaactatggcatccttacagagtcgcctgcggagagcagagctacagcgaatggaagcccagggtgagcgagagttacttcaggcagccaaggagaacctgacagcccaggtggaacacctgcaagcagctgtcgtagaagccagggctcaggcaagtgctgctggcatcctggaagaagacctgagaacggctcgctcagcactgaagctgaaaaatgaggaagtagagagtgagcgtgagagagcccaggctctgcaagagcagggcgaactgaaggtggcccaagggaaggctctgcaagagaatttggccctcctgacccagaccctagctgaaagagaagaggaggtggagactctgcggggacaaatccaggaactggagaagcaacgggaaatgcagaaggctgctttggaattgctgtctctggacctgaagaagaggaaccaagaggtagatctgcagcaagaacagattcaggagctagagaagtgtaggtctgttttagagcatctgcccatggccgtccaggagcgagagcagaagctgactgtgcagagggagcagatcagagagctcgagaaggatcgggagactcagaggaacgtcttggagcatcagcttctagaacttgagaagaaagaccaaatgattgagtcccagagaggacaggttcaggacctgaaaaagcagttggttactctggaatgcctggccctggaactggaggaaaaccatcacaagatggagtgccagcaaaaactgatcaaggagctggagggccagagggaaacccagagagtggctttgacccaccttacgctggacctagaagaaaggagccaggagctgcaggcacaaagcagccagatccatgacctggagagccacagcaccgttctggcaagagagctgcaggagagggaccaggaggtgaagtctcagcgagaacagatcgaggagctgcagaggcagaaagagcatctgactcaggatctcgagaggagagaccaggagctgatgctgcagaaggagaggattcaggttctcgaggatcagaggacccggcagaccaagatcctggaggaggacctggaacagatcaagctgtccttgagagagcgaggccgggagctgaccactcagaggcagctgatgcaggaacgggcagaggaagggaagggcccaagtaaagcacagcgcgggagcctagagcacatgaagctgatcctgcgtgataaggagaaggaggtggaatgtcagcaggagcatatccatgaactccaggagctcaaagaccagctggagcagcagctccagggcctgcacaggaaggtaggtgagaccagcctcctcctgtcccagcgagagcaggaaatagtggtcctgcagcagcaactgcaggaagccagggaacaaggggagctgaaggagcagtcacttcagagtcaactggatgaggcccagagagccctagcccagagggaccaggaactggaggctctgcagcaagaacagcagcaggcccagggacaggaggagagggtgaaggaaaaggcagacgccctccagggagctctggagcaagcccatatgacactgaaggagcgtcatggagagcttcaggaccacaaggaacaggcacgaaggctggaggaagagctggcagtggagggacggcgggtccaggccctggaggaggtgctgggagacctaagggctgagtctcgggaacaggagaaagctctgttggccctccagcagcagtgtgctgagcaggcacaggagcatgaggtggagaccagggccctgcaggacagctggctgcaggcccaggcagtgctcaaggaacgggaccaggagctggaagctctgcgggcagaaagtcagtcctcccggcatcaggaggaggctgcccgggcccgggctgaggctctgcaggaggcccttggcaaggctcatgctgccctgcaggggaaagagcagcatctcctcgagcaggcagaattgagccgcagtctggaggccagcactgcaaccctgcaagcctccctggatgcctgccaggcacacagtcggcagctggaggaggctctgaggatacaagaaggtgagatccaggaccaggatctccgataccaggaggatgtgcagcagctgcagcaggcacttgcccagagggatgaagagctgagacatcagcaggaacgggagcagctgctggagaagtctctggcccagagggtccaagagaatatgatccaagagaagcagaatctggggcaagagagagaagaggaggagataaggggccttcatcagagtgtaagggagctacagctgactctagcccaaaaggaacaggagattctggagctgagggagacccagcaaaggaacaacctggaagccttaccccacagccacaaaacctccccaatggaggaacaatctctaaaacttgattctttagagcccaggctgcagcgggagctggagcggctacaggcagccctgagacagacagaagccagggagattgagtggagggagaaggcccaggacttggcactctccctagcgcagaccaaggccagtgtcagcagtctgcaggaggtagccatgttcctacaagcctctgtcctggagcgggactcagaacagcaaaggctgcaggatgaactggagctcaccagacgggctctggagaaggagcggctacacagcccaggtgcaaccagcacagcagaactggggtccagaggggagcagggtgtgcagctgggagaggtctcaggagtggaggctgagcctagtcctgatggaatggagaagcagtcatggagacaaaggcttgaacacctgcagcaagcagtggcccggctggagattgacaggagcaggctgcagcgccacaatgtccagctgcggagtaccttggagcaggtggagcgagaacggaggaagctgaagagggaggccatgcgtgcggcccaggcagggtccctagagatcagcaaggccacggcttcttcacccacacagcaggatgggagaggacagaagaactcagatgccaagtgtgtggctgaactgcagaaagaggtggtcctgctgcaagctcagctgactttggagcggaagcagaagcaggactacatcacccgctcagcacagaccagccgtgagctagcaggcctgcaccacagcctctcacactcacttcttgccgtggcccaggcccctgaggccactgtcctggaggcagagacccgcaggctggatgagtccctgactcaaagtctgacatccccagggccagtcctgctacaccccagccccagcactacccaagccgcctccaggtagcagccacagccaggagcacacagacagaagactgtgtcatgggtcatggcccctccgcacacctacaggtttgccaaaggaaaagcctggctctgttaggcacccaggagccccaggtcggcgggtgttcccaggaagaggaagtaaatctgcaaccctggggaggaccccaactcacctgggaatgaggcaaattgcatttgcttgctccctatggaatcacccagaggggtgccttgccctggctgagggacatgtactgcctctcatctagaatttattttcctagcacttcaccacctccttcatcttctccttcaacaataaaccctgagatctttgcattc

SEQ ID NO: 231 - DNA, 8208 bp, Homo sapiens; identical to SEQ ID NO: 229
  misc_feature (119)..(119): second gene starts at position 119

SEQ ID NO: 232 - DNA, 8040 bp, Homo sapiens; identical to SEQ ID NO: 230
  misc_feature (119)..(119): second gene starts at position 119

SEQ ID NO: 233 - DNA, 8133 bp, Homo sapiens
  misc_feature (44)..(44): second gene starts at position 44
atgcatccacagagcttggctgaagaggaaataaaaacagaacaggaggtggtagagggcatggatatctctactcgctccaaagatcctggctctgcagagagaacagcccagaaaagaaagttccccagccctccacattcttccaatggccactcgccgcaggacacatcaacaagccccattaaaaagaaaaagaaacctggcttactgaacagtaacaataaggagcaggatggacggaatgatttctactgctgggtttgtcaccgggaaggccaagtcctttgctgtgagctctgtccccgggtttatcacgctaagtgtctgagactgacatcggaaccagagggggactggttttgtcctgaatgtgagaaaattacagtagcagaatgcatcgagacccagagtaaagccatgacaatgctcaccattgaacagttatcctacctgctcaagtttgccattcagaaaatgaaacagccagggacagatgcattccagaagcccgttccattggaacagcaccctgactatgcggaatacatcttccatccaatggacctttgtacattggaaaagaatgcgaaaaagaaaatgtatggctgcacagaagccttcctggctgatgcaaagtggattttgcacaactgcatcatttataatgggggaaatcacaaattgacgcaaatagcgaaagtagtcatcaaaatctgtgaacatgagatgaatgaaatcgaagtatgtccagaatgttatctagctgcttgccaaaaacgagataactggttttgtgagccttgtagcaatccacatcctttggtctgggccaaactgaaggggtttccattctggcctgcaaaagctctaagggataaagacgggcaggtcgatgcccgattctttggacaacatgacagggcctgggttccaataaataattgctacctcatgtctaaagaaattcctttttctgtgaaaaagactaagagcatcttcaacagtgccatgcaagagatggaggtttacgtggagaacatccgcaggaagtttggggtttttaattactctccatttaggacaccctacacacccaacagccagtatcaaatgctgctcgatcccaccaaccccagcgccggcactgccaagatagacaagcaggagaaggtcaagctcaactttgacatgacggcatcccccaagatcctgatgagcaagcctgtgctgagtgggggcacaggccgccggatttccttgtcggatatgccgcgctcccccatgagcacaaactcttctgtgcacacgggctccgacgtggagcaggatgctgagaagaaggccacgtcgagccacttcagtgcgagcgaggagtccatggacttcctggataagagcacagcttcaccagcctccaccaagacgggacaagcagggagtttatccggcagcccaaagcccttctctcctcaactgtcagctcctatcacgacgaaaacggacaaaacctccaccaccggcagcatcctgaatcttaacctggatcgaagcaaagctgagatggatttgaaggagctgagcgagtcggtccagcaacagtccacccctgttcctctcatctctcccaagcgccagattcgtagcaggttccagctgaatcttgacaagaccatagagagttgcaaagcacaattaggcataaatgaaatctcggaagatgtctatacggccgtagagcacagcgattcggaggattctgagaagtcagatagtagcgatagtgagtatatcagtgatgatgagcagaagtctaagaacgagccagaagacacagaggacaaagaaggttgtcagatggacaaagagccatctgctgttaaaaaaaagcccaagcctacaaacccagtggagattaaagaggagctgaaaagcacgtcaccagccagcgagaaggcagaccctggagcagtcaaggacaaggccagccctgagcctgagaaggacttttccgaaaaggcaaaaccttcacctcaccccataaaggataaactgaagggaaaagatgagacggattccccaacagtccatttgggcctggactctgattcagagagcgaacttgtcatagatttaggagaagaccattctgggcgggagggtcgaaaaaataagaaggaacccaaagaaccatctcccaaacaggatgttgtaggtaaaactccaccatccacgacggtgggcagccattctcccccggaaacaccggtgctcacccgctcttccgcccaaacttccgcggctggcgccacagccaccaccagcacgtcctccacggtcaccgtcacggccccggcccccgccgccacaggaagcccagtgaaaaagcagaggccgcttttaccgaaggagactgccccggccgtgcagcgggtcgtgtggaactcatcaactgtccagcagaaggagatcacacagagcccatccacgtccaccatcaccctggtgaccagcacacagtcatcgcccctggtcaccagctcggggtccatgagcacccttgtgtcctcagtcaacgctgacctgcccatcgccactgcctcagctgatgtcgccgctgatattgccaagtacactagcaaaatgatggatgcaataaaaggaacaatgacagaaatatacaacgatctttctaaaaacactactggaagcacaatagctgagattcgcaggctgaggatcgagatagagaagctccagtggctgcaccagcaagagctctccgaaatgaaacacaacttagagctgaccatggcggagatgcggcagagcctggagcaggagcgggaccggctcatcgccgaggtgaagaagcagctggagttggagaagcagcaggcggtggatgagaccaagaagaagcagtggtgcgccaactgcaagaaggaggccatcttttactgctgttggaacactagctactgtgactacccctgccagcaagcccactggcctgagcacatgaagtcctgcacccagtcaggagaaggagcgctcctggcaccagcaggagctggcaaaggctctggagagcttagaaagggaaaaaatggagctggaaatgaggctaaaggagcagcagacagaaatggaggccatccaggcccagagggaagaagaacggacccaggcagagagtgccctatgccagatgcagctggaaacagagaaggagagagtatccctcctggagacactgctgcagacgcagaaggagctagcagatgccagccaacaactggaacgactgaggcaggacatgaaagtccagaaattaaaggagcaggagaccactgggatactacagacccagctccaggaggctcaacgggagctgaaggaggcagcccggcagcacagagatgaccttgctgccctccaagaagagagcagctccctgctgcaggataagatggacctgcagaagcaggtggaggacttgaagtctcagctggtggcccaggatgactcccagaggctggtggagcaggaggttcaggagaagctgagagagacccaggagtataaccgaattcagaaggagctggagagagagaaagccagcctgactctgtcactgatggaaaaggaacagagactccttgttttacaagaagctgactctattcgacaacaagagctgagtgccctgcgccaggacatgcaggaggcccagggagaacagaaagagctcagtgctcagatggaattactaaggcaagaggtgaaggaaaaggaggctgactttctggcccaggaagcacagctgctggaggagctggaggcgtctcatatcacggagcagcagctgcgagcctccttgtgggcccaggaagccaaggcagcccaactacagctgcgactgcgcagcacagagagccagctagaagcgctggccgcagagcagcagcccgggaaccaggcccaggcccaggcccagctggccagcctctactctgccctgcagcaggccctggggtctgtttgtgagagcaggcctgagctgagtggtgggggagactctgctccttccgtctggggccttgagccagaccagaatggagctaggagcctctttaagagagggcccctgctgactgctctctccgctgaggcagtagcatctgccctccacaagcttcatcaagacctgtggaagactcaacagacccgggatgttctgagggatcaggtccagaaactggaagagcgtctaactgatactgaggctgagaagagccaggtccacacagagttgcaggatctgcagagacagctctcccagaatcaggaagagaaatccaagtgggaaggaaagcagaactccctagaatctgagctgatggaactacatgaaactatggcatccttacagagtcgcctgcggagagcagagctacagcgaatggaagcccagggtgagcgagagttacttcaggcagccaaggagaacctgacagcccaggtggaacacctgcaagcagctgtcgtagaagccagggctcaggcaagtgctgctggcatcctggaagaagacctgagaacggctcgctcagcactgaagctgaaaaatgaggaagtagagagtgagcgtgagagagcccaggctctgcaagagcagggcgaactgaaggtggcccaagggaaggctctgcaagagaatttggccctcctgacccagaccctagctgaaagagaagaggaggtggagactctgcggggacaaatccaggaactggagaagcaacgggaaatgcagaaggctgctttggaattgctgtctctggacctgaagaagaggaaccaagaggtagatctgcagcaagaacagattcaggagctagagaagtgtaggtctgttttagagcatctgcccatggccgtccaggagcgagagcagaagctgactgtgcagagggagcagatcagagagctcgagaaggatcgggagactcagaggaacgtcttggagcatcagcttctagaacttgagaagaaagaccaaatgattgagtcccagagaggacaggttcaggacctgaaaaagcagttggttactctggaatgcctggccctggaactggaggaaaaccatcacaagatggagtgccagcaaaaactgatcaaggagctggagggccagagggaaacccagagagtggctttgacccaccttacgctggacctagaagaaaggagccaggagctgcaggcacaaagcagccagatccatgacctggagagccacagcaccgttctggcaagagagctgcaggagagggaccaggaggtgaagtctcagcgagaacagatcgaggagctgcagaggcagaaagagcatctgactcaggatctcgagaggagagaccaggagctgatgctgcagaaggagaggattcaggttctcgaggatcagaggacccggcagaccaagatcctggaggaggacctggaacagatcaagctgtccttgagagagcgaggccgggagctgaccactcagaggcagctgatgcaggaacgggcagaggaagggaagggcccaagtaaagcacagcgcgggagcctagagcacatgaagctgatcctgcgtgataaggagaaggaggtggaatgtcagcaggagcatatccatgaactccaggagctcaaagaccagctggagcagcagctccagggcctgcacaggaaggtaggtgagaccagcctcctcctgtcccagcgagagcaggaaatagtggtcctgcagcagcaactgcaggaagccagggaacaaggggagctgaaggagcagtcacttcagagtcaactggatgaggcccagagagccctagcccagagggaccaggaactggaggctctgcagcaagaacagcagcaggcccagggacaggaggagagggtgaaggaaaaggcagacgccctccagggagctctggagcaagcccatatgacactgaaggagcgtcatggagagcttcaggaccacaaggaacaggcacgaaggctggaggaagagctggcagtggagggacggcgggtccaggccctggaggaggtgctgggagacctaagggctgagtctcgggaacaggagaaagctctgttggccctccagcagcagtgtgctgagcaggcacaggagcatgaggtggagaccagggccctgcaggacagctggctgcaggcccaggcagtgctcaaggaacgggaccaggagctggaagctctgcgggcagaaagtcagtcctcccggcatcaggaggaggctgcccgggcccgggctgaggctctgcaggaggcccttggcaaggctcatgctgccctgcaggggaaagagcagcatctcctcgagcaggcagaattgagccgcagtctggaggccagcactgcaaccctgcaagcctccctggatgcctgccaggcacacagtcggcagctggaggaggctctgaggatacaagaaggtgagatccaggaccaggatctccgataccaggaggatgtgcagcagctgcagcaggcacttgcccagagggatgaagagctgagacatcagcaggaacgggagcagctgctggagaagtctctggcccagagggtccaagagaatatgatccaagagaagcagaatctggggcaagagagagaagaggaggagataaggggccttcatcagagtgtaagggagctacagctgactctagcccaaaaggaacaggagattctggagctgagggagacccagcaaaggaacaacctggaagccttaccccacagccacaaaacctccccaatggaggaacaatctctaaaacttgattctttagagcccaggctgcagcgggagctggagcggctacaggcagccctgagacagacagaagccagggagattgagtggagggagaaggcccaggacttggcactctccctagcgcagaccaaggccagtgtcagcagtctgcaggaggtagccatgttcctacaagcctctgtcctggagcgggactcagaacagcaaaggctgcaggatgaactggagctcaccagacgggctctggagaaggagcggctacacagcccaggtgcaaccagcacagcagaactggggtccagaggggagcagggtgtgcagctgggagaggtctcaggagtggaggctgagcctagtcctgatggaatggagaagcagtcatggagacaaaggcttgaacacctgcagcaagcagtggcccggctggagattgacaggagcaggctgcagcgccacaatgtccagctgcggagtaccttggagcaggtggagcgagaacggaggaagctgaagagggaggccatgcgtgcggcccaggcagggtccctagagatcagcaaggccacggcttcttcacccacacagcaggatgggagaggacagaagaactcagatgccaagtgtgtggctgaactgcagaaagaggtggtcctgctgcaagctcagctgactttggagcggaagcagaagcaggactacatcacccgctcagcacagaccagccgtgagctagcaggcctgcaccacagcctctcacactcacttcttgccgtggcccaggcccctgaggccactgtcctggaggcagagacccgcaggctggatgagtccctgactcaaagtctgacatccccagggccagtcctgctacaccccagccccagcactacccaagccgcctccaggtagcagccacagccaggagcacacagacagaagactgtgtcatgggtcatggcccctccgcacacctacaggtttgccaaaggaaaagcctggctctgttaggcacccaggagccccaggtcggcgggtgttcccaggaagaggaagtaaatctgcaaccctggggaggaccccaactcacctgggaatgaggcaaattgcatttgcttgctccctatggaatcacccagaggggtgccttgccctggctgagggacatgtactgcctctcatctagaatttattttcctagcacttcaccacctccttcatcttctccttcaacaataaaccctgagatctttgcattc

SEQ ID NO: 234 - DNA, 7965 bp, Homo sapiens
  misc_feature (44)..(44): second gene starts at position 44
atgcatccacagagcttggctgaagaggaaataaaaacagaacaggaggtggtagagggcatggatatctctactcgctccaaagatcctggctctgcagagagaacagcccagaaaagaaagttccccagccctccacattcttccaatggccactcgccgcaggacacatcaacaagccccattaaaaagaaaaagaaacctggcttactgaacagtaacaataaggagcaggatggacggaatgatttctactgctgggtttgtcaccgggaaggccaagtcctttgctgtgagctctgtccccgggtttatcacgctaagtgtctgagactgacatcggaaccagagggggactggttttgtcctgaatgtgagaaaattacagtagcagaatgcatcgagacccagagtaaagccatgacaatgctcaccattgaacagttatcctacctgctcaagtttgccattcagaaaatgaaacagccagggacagatgcattccagaagcccgttccattggaacagcaccctgactatgcggaatacatcttccatccaatggacctttgtacattggaaaagaatgcgaaaaagaaaatgtatggctgcacagaagccttcctggctgatgcaaagtggattttgcacaactgcatcatttataatgggggaaatcacaaattgacgcaaatagcgaaagtagtcatcaaaatctgtgaacatgagatgaatgaaatcgaagtatgtccagaatgttatctagctgcttgccaaaaacgagataactggttttgtgagccttgtagcaatccacatcctttggtctgggccaaactgaaggggtttccattctggcctgcaaaagctctaagggataaagacgggcaggtcgatgcccgattctttggacaacatgacagggcctgggttccaataaataattgctacctcatgtctaaagaaattcctttttctgtgaaaaagactaagagcatcttcaacagtgccatgcaagagatggaggtttacgtggagaacatccgcaggaagtttggggtttttaattactctccatttaggacaccctacacacccaacagccagtatcaaatgctgctcgatcccaccaaccccagcgccggcactgccaagatagacaagcaggagaaggtcaagctcaactttgacatgacggcatcccccaagatcctgatgagcaagcctgtgctgagtgggggcacaggccgccggatttccttgtcggatatgccgcgctcccccatgagcacaaactcttctgtgcacacgggctccgacgtggagcaggatgctgagaagaaggccacgtcgagccacttcagtgcgagcgaggagtccatggacttcctggataagagcacagcttcaccagcctccaccaagacgggacaagcagggagtttatccggcagcccaaagcccttctctcctcaactgtcagctcctatcacgacgaaaacggacaaaacctccaccaccggcagcatcctgaatcttaacctggatcgaagcaaagctgagatggatttgaaggagctgagcgagtcggtccagcaacagtccacccctgttcctctcatctctcccaagcgccagattcgtagcaggttccagctgaatcttgacaagaccatagagagttgcaaagcacaattaggcataaatgaaatctcggaagatgtctatacggccgtagagcacagcgattcggaggattctgagaagtcagatagtagcgatagtgagtatatcagtgatgatgagcagaagtctaagaacgagccagaagacacagaggacaaagaaggttgtcagatggacaaagagccatctgctgttaaaaaaaagcccaagcctacaaacccagtggagattaaagaggagctgaaaagcacgtcaccagccagcgagaaggcagaccctggagcagtcaaggacaaggccagccctgagcctgagaaggacttttccgaaaaggcaaaaccttcacctcaccccataaaggataaactgaagggaaaagatgagacggattccccaacagtccatttgggcctggactctgattcagagagcgaacttgtcatagatttaggagaagaccattctgggcgggagggtcgaaaaaataagaaggaacccaaagaaccatctcccaaacaggatgttgtaggtaaaactccaccatccacgacggtgggcagccattctcccccggaaacaccggtgctcacccgctcttccgcccaaacttccgcggctggcgccacagccaccaccagcacgtcctccacggtcaccgtcacggccccggcccccgccgccacaggaagcccagtgaaaaagcagaggccgcttttaccgaaggagactgccccggccgtgcagcgggtcgtgtggaactcatcaactgtccagcagaaggagatcacacagagcccatccacgtccaccatcaccctggtgaccagcacacagtcatcgcccctggtcaccagctcggggtccatgagcacccttgtgtcctcagtcaacgctgacctgcccatcgccactgcctcagctgatgtcgccgctgatattgccaagtacactagcaaaatgatggatgcaataaaaggaacaatgacagaaatatacaacgatctttctaaaaacactactggaagcacaatagctgagattcgcaggctgaggatcgagatagagaagctccagtggctgcaccagcaagagctctccgaaatgaaacacaacttagagctgaccatggcggagatgcggcagagcctggagcaggagcgggaccggctcatcgccgaggtgaagaagcagctggagttggagaagcagcaggcggtggatgagaccaagaagaagcagtggtgcgccaactgcaagaaggaggccatcttttactgctgttggaacactagctactgtgactacccctgccagcaagcccactggcctgagcacatgaagtcctgcacccagtcagatgcagctggaaacagagaaggagagagtatccctcctggagacactgctgcagacgcagaaggagctagcagatgccagccaacaactggaacgactgaggcaggacatgaaagtccagaaattaaaggagcaggagaccactgggatactacagacccagctccaggaggctcaacgggagctgaaggaggcagcccggcagcacagagatgaccttgctgccctccaagaagagagcagctccctgctgcaggataagatggacctgcagaagcaggtggaggacttgaagtctcagctggtggcccaggatgactcccagaggctggtggagcaggaggttcaggagaagctgagagagacccaggagtataaccgaattcagaaggagctggagagagagaaagccagcctgactctgtcactgatggaaaaggaacagagactccttgttttacaagaagctgactctattcgacaacaagagctgagtgccctgcgccaggacatgcaggaggcccagggagaacagaaagagctcagtgctcagatggaattactaaggcaagaggtgaaggaaaaggaggctgactttctggcccaggaagcacagctgctggaggagctggaggcgtctcatatcacggagcagcagctgcgagcctccttgtgggcccaggaagccaaggcagcccaactacagctgcgactgcgcagcacagagagccagctagaagcgctggccgcagagcagcagcccgggaaccaggcccaggcccaggcccagctggccagcctctactctgccctgcagcaggccctggggtctgtttgtgagagcaggcctgagctgagtggtgggggagactctgctccttccgtctggggccttgagccagaccagaatggagctaggagcctctttaagagagggcccctgctgactgctctctccgctgaggcagtagcatctgccctccacaagcttcatcaagacctgtggaagactcaacagacccgggatgttctgagggatcaggtccagaaactggaagagcgtctaactgatactgaggctgagaagagccaggtccacacagagttgcaggatctgcagagacagctctcccagaatcaggaagagaaatccaagtgggaaggaaagcagaactccctagaatctgagctgatggaactacatgaaactatggcatccttacagagtcgcctgcggagagcagagctacagcgaatggaagcccagggtgagcgagagttacttcaggcagccaaggagaacctgacagcccaggtggaacacctgcaagcagctgtcgtagaagccagggctcaggcaagtgctgctggcatcctggaagaagacctgagaacggctcgctcagcactgaagctgaaaaatgaggaagtagagagtgagcgtgagagagcccaggctctgcaagagcagggcgaactgaaggtggcccaagggaaggctctgcaagagaatttggccctcctgacccagaccctagctgaaagagaagaggaggtggagactctgcggggacaaatccaggaactggagaagcaacgggaaatgcagaaggctgctttggaattgctgtctctggacctgaagaagaggaaccaagaggtagatctgcagcaagaacagattcaggagctagagaagtgtaggtctgttttagagcatctgcccatggccgtccaggagcgagagcagaagctgactgtgcagagggagcagatcagagagctcgagaaggatcgggagactcagaggaacgtcttggagcatcagcttctagaacttgagaagaaagaccaaatgattgagtcccagagaggacaggttcaggacctgaaaaagcagttggttactctggaatgcctggccctggaactggaggaaaaccatcacaagatggagtgccagcaaaaactgatcaaggagctggagggccagagggaaacccagagagtggctttgacccaccttacgctggacctagaagaaaggagccaggagctgcaggcacaaagcagccagatccatgacctggagagccacagcaccgttctggcaagagagctgcaggagagggaccaggaggtgaagtctcagcgagaacagatcgaggagctgcagaggcagaaagagcatctgactcaggatctcgagaggagagaccaggagctgatgctgcagaaggagaggattcaggttctcgaggatcagaggacccggcagaccaagatcctggaggaggacctggaacagatcaagctgtccttgagagagcgaggccgggagctgaccactcagaggcagctgatgcaggaacgggcagaggaagggaagggcccaagtaaagcacagcgcgggagcctagagcacatgaagctgatcctgcgtgataaggagaaggaggtggaatgtcagcaggagcatatccatgaactccaggagctcaaagaccagctggagcagcagctccagggcctgcacaggaaggtaggtgagaccagcctcctcctgtcccagcgagagcaggaaatagtggtcctgcagcagcaactgcaggaagccagggaacaaggggagctgaaggagcagtcacttcagagtcaactggatgaggcccagagagccctagcccagagggaccaggaactggaggctctgcagcaagaacagcagcaggcccagggacaggaggagagggtgaaggaaaaggcagacgccctccagggagctctggagcaagcccatatgacactgaaggagcgtcatggagagcttcaggaccacaaggaacaggcacgaaggctggaggaagagctggcagtggagggacggcgggtccaggccctggaggaggtgctgggagacctaagggctgagtctcgggaacaggagaaagctctgttggccctccagcagcagtgtgctgagcaggcacaggagcatgaggtggagaccagggccctgcaggacagctggctgcaggcccaggcagtgctcaaggaacgggaccaggagctggaagctctgcgggcagaaagtcagtcctcccggcatcaggaggaggctgcccgggcccgggctgaggctctgcaggaggcccttggcaaggctcatgctgccctgcaggggaaagagcagcatctcctcgagcaggcagaattgagccgcagtctggaggccagcactgcaaccctgcaagcctccctggatgcctgccaggcacacagtcggcagctggaggaggctctgaggatacaagaaggtgagatccaggaccaggatctccgataccaggaggatgtgcagcagctgcagcaggcacttgcccagagggatgaagagctgagacatcagcaggaacgggagcagctgctggagaagtctctggcccagagggtccaagagaatatgatccaagagaagcagaatctggggcaagagagagaagaggaggagataaggggccttcatcagagtgtaagggagctacagctgactctagcccaaaaggaacaggagattctggagctgagggagacccagcaaaggaacaacctggaagccttaccccacagccacaaaacctccccaatggaggaacaatctctaaaacttgattctttagagcccaggctgcagcgggagctggagcggctacaggcagccctgagacagacagaagccagggagattgagtggagggagaaggcccaggacttggcactctccctagcgcagaccaaggccagtgtcagcagtctgcaggaggtagccatgttcctacaagcctctgtcctggagcgggactcagaacagcaaaggctgcaggatgaactggagctcaccagacgggctctggagaaggagcggctacacagcccaggtgcaaccagcacagcagaactggggtccagaggggagcagggtgtgcagctgggagaggtctcaggagtggaggctgagcctagtcctgatggaatggagaagcagtcatggagacaaaggcttgaacacctgcagcaagcagtggcccggctggagattgacaggagcaggctgcagcgccacaatgtccagctgcggagtaccttggagcaggtggagcgagaacggaggaagctgaagagggaggccatgcgtgcggcccaggcagggtccctagagatcagcaaggccacggcttcttcacccacacagcaggatgggagaggacagaagaactcagatgccaagtgtgtggctgaactgcagaaagaggtggtcctgctgcaagctcagctgactttggagcggaagcagaagcaggactacatcacccgctcagcacagaccagccgtgagctagcaggcctgcaccacagcctctcacactcacttcttgccgtggcccaggcccctgaggccactgtcctggaggcagagacccgcaggctggatgagtccctgactcaaagtctgacatccccagggccagtcctgctacaccccagccccagcactacccaagccgcctccaggtagcagccacagccaggagcacacagacagaagactgtgtcatgggtcatggcccctccgcacacctacaggtttgccaaaggaaaagcctggctctgttaggcacccaggagccccaggtcggcgggtgttcccaggaagaggaagtaaatctgcaaccctggggaggaccccaactcacctgggaatgaggcaaattgcatttgcttgctccctatggaatcacccagaggggtgccttgccctggctgagggacatgtactgcctctcatctagaatttattttcctagcacttcaccacctccttcatcttctccttcaacaataaaccctgagatctttgcattc

SEQ ID NO: 235 - protein, 2427 aa, Homo sapiens
MWWSTLMSILRARSFWKWISTQTVRIIRAVRAHFGGIMDEPSPLAQPLELNQHSRFIIGSVSEDNSEDEISNLVKLDLLEEKEGSLSPASVGSDTLSDLGISSLQDGLALHIRSSMSGLHLVKQGRDRKKIDSQRDFTVASPAEFVTRFGGNKVIEKVLIANNGIAAVKCMRSIRRWSYEMFRNERAIRFVVMVTPEDLKANAEYIKMADHYVPVPGGPNNNNYANVELILDIAKRIPVQAVWAGWGHASENPKLPELLLKNGIAFMGPPSQAMWALGDKIASSIVAQTAGIPTLPWSGSGLRVDWQENDFSKRILNVPQELYEKGYVKDVDDGLQAAEEVGYPVMIKASEGGGGKGIRKVNNADDFPNLFRQVQAEVPGSPIFVMRLAKQSRHLEVQILADQYGNAISLFGRDCSVQRRHQKIIEEAPATIATPAVFEHMEQCAVKLAKMVGYVSAGTVEYLYSQDGSFYFLELNPRLQVEHPCTEMVADVNLPAAQLQIAMGIPLYRIKDIRMMYGVSPWGDSPIDFEDSAHVPCPRGHVIAARITSENPDEGFKPSSGTVQELNFRSNKNVWGYFSVAAAGGLHEFADSQFGHCFSWGENREEAISNMVVALKELSIRGDFRTTVEYLIKLLETESFQMNRIDTGWLDRLIAEKVQAERPDTMLGVVCGALHVADVSLRNSVSNFLHSLERGQVLPAHTLLNTVDVELIYEGVKYVLKVTRQSPNSYVVIMNGSCVEVDVHRLSDGGLLLSYDGSSYTTYMKEEVDRYRITIGNKTCVFEKENDPSVMRSPSAGKLIQYIVEDGGHVFAGQCYAEIEVMKMVMTLTAVESGCIHYVKRPGAALDPGCVLAKMQLDNPSKVQQAELHTGSLPRIQSTALRGEKLHRVFHYVLDNLVNVMNGYCLPDPFFSSKVKDWVERLMKTLRDPSLPLLELQDIMTSVSGRIPPNVEKSIKKEMAQYASNITSVLCQFPSQQIANILDSHAATLNRKSEREVFFMNTQSIVQLVQRYRSGIRGHMKAVVMDLLRQYLRVETQFQNGHYDKCVFALREENKSDMNTVLNYIFSHAQVTKKNLLVTMLIDQLCGRDPTLTDELLNILTELTQLSKTTNAKVALRARQVLIASHLPSYELRHNQVESIFLSAIDMYGHQFCIENLQKLILSETSIFDVLPNFFYHSNQVVRMAALEVYVRRAYIAYELNSVQHRQLKDNTCVVEFQFMLPTSHPNRGNIPTLNRMSFSSNLNHYGMTHVASVSDVLLDNSFTPPCQRMGGMVSFRTFEDFVRIFDEVMGCFSDSPPQSPTFPEAGHTSLYDEDKVPRDEPIHILNVAIKTDCDIEDDRLAAMFREFTQQNKATLVDHGIRRLTFLVAQKDFRKQVNYEVDRRFHREFPKFFTFRARDKFEEDRIYRHLEPALAFQLELNRMRNFDLTAIPCANHKMHLYLGAAKVEVGTEVTDYRFFVRAIIRHSDLVTKEASFEYLQNEGERLLLEAMDELEVAFNNTNVRTDCNHIFLNFVPTVIMDPSKIEESVRSMVMRYGSRLWKLRVLQAELKINIRLTPTGKAIPIRLFLTNESGYYLDISLYKEVTDSRTAQIMFQAYGDKQGPLHGMLINTPYVTKDLLQSKRFQAQSLGTTYIYDIPEMFRQSLIKLWESMSTQAFLPSPPLPSDMLTYTELVLDDQGQLVHMNRLPGGNEIGMVAWKMTFKSPEYPEGRDIIVIGNDITYRIGSFGPQEDLLFLRASELARAEGIPRIYVSANSGARIGLAEEIRHMFHVAWVDPEDPYKGYRYLYLTPQDYKRVSALNSVHCEHVEDEGESRYKITDIIGKEEGIGPENLRGSGMIAGESSLAYNEIITISLVTCRAIGIGAYLVRLGQRTIQVENSHLILTGAGALNKVLGREVYTSNNQLGGIQIMHNNGVTHCTVCDDFEGVFTVLHWLSYMPKSVHSSVPLLNSKDPIDRIIEFVPTKTPYDPRWMLAGRPHPTQKGQWLSGFFDYGSFSEIMQPWAQTVVVGRARLGGIPVGVVAVETRTVELSIPADPANLDSEAKLQRFKRSLSLKTILRSKSLENFFLRSGSELKCPTEVLLTPPTPLPPPSPPPTASDRGLATPSPSPCPVPRPLAALKPVRLHSFQEHVFKRASPCELCHQLIVGNSKQGLRCKMCKVSVHLWCSEEISHQQCPGKTSTSFRRNFSSPLLVHEPPPVCATSKESPPTGDSGKVDPVYETLRYGTSLALMNRSSFSSTSESPTRSLSERDELTEDGEGSIRSSEEGPGDSASPVFTAPAESEGPGPEEKSPGQQLPKATLRKDVGPMYSYVALYKFLPQENNDLALQPGDRIMLVDDSNEDWWKGKIGDRVGFFPANFVQRVRPGENVWRCCQPFSGNKEQGYMSLKENQICVGVGRSKDADGFIRVSSGKKRGLVPVDALTEI

SEQ ID NO: 236 - protein, 2390 aa, Homo sapiens
MDEPSPLAQPLELNQHSRFIIGSVSEDNSEDEISNLVKLDLLEEKEGSLSPASVGSDTLSDLGISSLQDGLALHIRSSMSGLHLVKQGRDRKKIDSQRDFTVASPAEFVTRFGGNKVIEKVLIANNGIAAVKCMRSIRRWSYEMFRNERAIRFVVMVTPEDLKANAEYIKMADHYVPVPGGPNNNNYANVELILDIAKRIPVQAVWAGWGHASENPKLPELLLKNGIAFMGPPSQAMWALGDKIASSIVAQTAGIPTLPWSGSGLRVDWQENDFSKRILNVPQELYEKGYVKDVDDGLQAAEEVGYPVMIKASEGGGGKGIRKVNNADDFPNLFRQVQAEVPGSPIFVMRLAKQSRHLEVQILADQYGNAISLFGRDCSVQRRHQKIIEEAPATIATPAVFEHMEQCAVKLAKMVGYVSAGTVEYLYSQDGSFYFLELNPRLQVEHPCTEMVADVNLPAAQLQIAMGIPLYRIKDIRMMYGVSPWGDSPIDFEDSAHVPCPRGHVIAARITSENPDEGFKPSSGTVQELNFRSNKNVWGYFSVAAAGGLHEFADSQFGHCFSWGENREEAISNMVVALKELSIRGDFRTTVEYLIKLLETESFQMNRIDTGWLDRLIAEKVQAERPDTMLGVVCGALHVADVSLRNSVSNFLHSLERGQVLPAHTLLNTVDVELIYEGVKYVLKVTRQSPNSYVVIMNGSCVEVDVHRLSDGGLLLSYDGSSYTTYMKEEVDRYRITIGNKTCVFEKENDPSVMRSPSAGKLIQYIVEDGGHVFAGQCYAEIEVMKMVMTLTAVESGCIHYVKRPGAALDPGCVLAKMQLDNPSKVQQAELHTGSLPRIQSTALRGEKLHRVFHYVLDNLVNVMNGYCLPDPFFSSKVKDWVERLMKTLRDPSLPLLELQDIMTSVSGRIPPNVEKSIKKEMAQYASNITSVLCQFPSQQIANILDSHAATLNRKSEREVFFMNTQSIVQLVQRYRSGIRGHMKAVVMDLLRQYLRVETQFQNGHYDKCVFALREENKSDMNTVLNYIFSHAQVTKKNLLVTMLIDQLCGRDPTLTDELLNILTELTQLSKTTNAKVALRARQVLIASHLPSYELRHNQVESIFLSAIDMYGHQFCIENLQKLILSETSIFDVLPNFFYHSNQVVRMAALEVYVRRAYIAYELNSVQHRQLKDNTCVVEFQFMLPTSHPNRGNIPTLNRMSFSSNLNHYGMTHVASVSDVLLDNSFTPPCQRMGGMVSFRTFEDFVRIFDEVMGCFSDSPPQSPTFPEAGHTSLYDEDKVPRDEPIHILNVAIKTDCDIEDDRLAAMFREFTQQNKATLVDHGIRRLTFLVAQKDFRKQVNYEVDRRFHREFPKFFTFRARDKFEEDRIYRHLEPALAFQLELNRMRNFDLTAIPCANHKMHLYLGAAKVEVGTEVTDYRFFVRAIIRHSDLVTKEASFEYLQNEGERLLLEAMDELEVAFNNTNVRTDCNHIFLNFVPTVIMDPSKIEESVRSMVMRYGSRLWKLRVLQAELKINIRLTPTGKAIPIRLFLTNESGYYLDISLYKEVTDSRTAQIMFQAYGDKQGPLHGMLINTPYVTKDLLQSKRFQAQSLGTTYIYDIPEMFRQSLIKLWESMSTQAFLPSPPLPSDMLTYTELVLDDQGQLVHMNRLPGGNEIGMVAWKMTFKSPEYPEGRDIIVIGNDITYRIGSFGPQEDLLFLRASELARAEGIPRIYVSANSGARIGLAEEIRHMFHVAWVDPEDPYKGYRYLYLTPQDYKRVSALNSVHCEHVEDEGESRYKITDIIGKEEGIGPENLRGSGMIAGESSLAYNEIITISLVTCRAIGIGAYLVRLGQRTIQVENSHLILTGAGALNKVLGREVYTSNNQLGGIQIMHNNGVTHCTVCDDFEGVFTVLHWLSYMPKSVHSSVPLLNSKDPIDRIIEFVPTKTPYDPRWMLAGRPHPTQKGQWLSGFFDYGSFSEIMQPWAQTVVVGRARLGGIPVGVVAVETRTVELSIPADPANLDSEAKLQRFKRSLSLKTILRSKSLENFFLRSGSELKCPTEVLLTPPTPLPPPSPPPTASDRGLATPSPSPCPVPRPLAALKPVRLHSFQEHVFKRASPCELCHQLIVGNSKQGLRCKMCKVSVHLWCSEEISHQQCPGKTSTSFRRNFSSPLLVHEPPPVCATSKESPPTGDSGKVDPVYETLRYGTSLALMNRSSFSSTSESPTRSLSERDELTEDGEGSIRSSEEGPGDSASPVFTAPAESEGPGPEEKSPGQQLPKATLRKDVGPMYSYVALYKFLPQENNDLALQPGDRIMLVDDSNEDWWKGKIGDRVGFFPANFVQRVRPGENVWRCCQPFSGNKEQGYMSLKENQICVGVGRSKDADGFIRVSSGKKRGLVPVDALTEI

SEQ ID NO: 237 - protein, 2332 aa, Homo sapiens
MEGSPEENKEMRYYMLQRSSMSGLHLVKQGRDRKKIDSQRDFTVASPAEFVTRFGGNKVIEKVLIANNGIAAVKCMRSIRRWSYEMFRNERAIRFVVMVTPEDLKANAEYIKMADHYVPVPGGPNNNNYANVELILDIAKRIPVQAVWAGWGHASENPKLPELLLKNGIAFMGPPSQAMWALGDKIASSIVAQTAGIPTLPWSGSGLRVDWQENDFSKRILNVPQELYEKGYVKDVDDGLQAAEEVGYPVMIKASEGGGGKGIRKVNNADDFPNLFRQVQAEVPGSPIFVMRLAKQSRHLEVQILADQYGNAISLFGRDCSVQRRHQKIIEEAPATIATPAVFEHMEQCAVKLAKMVGYVSAGTVEYLYSQDGSFYFLELNPRLQVEHPCTEMVADVNLPAAQLQIAMGIPLYRIKDIRMMYGVSPWGDSPIDFEDSAHVPCPRGHVIAARITSENPDEGFKPSSGTVQELNFRSNKNVWGYFSVAAAGGLHEFADSQFGHCFSWGENREEAISNMVVALKELSIRGDFRTTVEYLIKLLETESFQMNRIDTGWLDRLIAEKVQAERPDTMLGVVCGALHVADVSLRNSVSNFLHSLERGQVLPAHTLLNTVDVELIYEGVKYVLKVTRQSPNSYVVIMNGSCVEVDVHRLSDGGLLLSYDGSSYTTYMKEEVDRYRITIGNKTCVFEKENDPSVMRSPSAGKLIQYIVEDGGHVFAGQCYAEIEVMKMVMTLTAVESGCIHYVKRPGAALDPGCVLAKMQLDNPSKVQQAELHTGSLPRIQSTALRGEKLHRVFHYVLDNLVNVMNGYCLPDPFFSSKVKDWVERLMKTLRDPSLPLLELQDIMTSVSGRIPPNVEKSIKKEMAQYASNITSVLCQFPSQQIANILDSHAATLNRKSEREVFFMNTQSIVQLVQRYRSGIRGHMKAVVMDLLRQYLRVETQFQNGHYDKCVFALREENKSDMNTVLNYIFSHAQVTKKNLLVTMLIDQLCGRDPTLTDELLNILTELTQLSKTTNAKVALRARQVLIASHLPSYELRHNQVESIFLSAIDMYGHQFCIENLQKLILSETSIFDVLPNFFYHSNQVVRMAALEVYVRRAYIAYELNSVQHRQLKDNTCVVEFQFMLPTSHPNRGNIPTLNRMSFSSNLNHYGMTHVASVSDVLLDNSFTPPCQRMGGMVSFRTFEDFVRIFDEVMGCFSDSPPQSPTFPEAGHTSLYDEDKVPRDEPIHILNVAIKTDCDIEDDRLAAMFREFTQQNKATLVDHGIRRLTFLVAQKDFRKQVNYEVDRRFHREFPKFFTFRARDKFEEDRIYRHLEPALAFQLELNRMRNFDLTAIPCANHKMHLYLGAAKVEVGTEVTDYRFFVRAIIRHSDLVTKEASFEYLQNEGERLLLEAMDELEVAFNNTNVRTDCNHIFLNFVPTVIMDPSKIEESVRSMVMRYGSRLWKLRVLQAELKINIRLTPTGKAIPIRLFLTNESGYYLDISLYKEVTDSRTAQIMFQAYGDKQGPLHGMLINTPYVTKDLLQSKRFQAQSLGTTYIYDIPEMFRQSLIKLWESMSTQAFLPSPPLPSDMLTYTELVLDDQGQLVHMNRLPGGNEIGMVAWKMTFKSPEYPEGRDIIVIGNDITYRIGSFGPQEDLLFLRASELARAEGIPRIYVSANSGARIGLAEEIRHMFHVAWVDPEDPYKGYRYLYLTPQDYKRVSALNSVHCEHVEDEGESRYKITDIIGKEEGIGPENLRGSGMIAGESSLAYNEIITISLVTCRAIGIGAYLVRLGQRTIQVENSHLILTGAGALNKVLGREVYTSNNQLGGIQIMHNNGVTHCTVCDDFEGVFTVLHWLSYMPKSVHSSVPLLNSKDPIDRIIEFVPTKTPYDPRWMLAGRPHPTQKGQWLSGFFDYGSFSEIMQPWAQTVVVGRARLGGIPVGVVAVETRTVELSIPADPANLDSEAKLQRFKRSLSLKTILRSKSLENFFLRSGSELKCPTEVLLTPPTPLPPPSPPPTASDRGLATPSPSPCPVPRPLAALKPVRLHSFQEHVFKRASPCELCHQLIVGNSKQGLRCKMCKVSVHLWCSEEISHQQCPGKTSTSFRRNFSSPLLVHEPPPVCATSKESPPTGDSGKVDPVYETLRYGTSLALMNRSSFSSTSESPTRSLSERDELTEDGEGSIRSSEEGPGDSASPVFTAPAESEGPGPEEKSPGQQLPKATLRKDVGPMYSYVALYKFLPQENNDLALQPGDRIMLVDDSNEDWWKGKIGDRVGFFPANFVQRVRPGENVWRCCQPFSGNKEQGYMSLKENQICVGVGRSKDADGFIRVSSGKKRGLVPVDALTEI

SEQ ID NO: 238 - protein, 2312 aa, Homo sapiens
MSGLHLVKQGRDRKKIDSQRDFTVASPAEFVTRFGGNKVIEKVLIANNGIAAVKCMRSIRRWSYEMFRNERAIRFVVMVTPEDLKANAEYIKMADHYVPVPGGPNNNNYANVELILDIAKRIPVQAVWAGWGHASENPKLPELLLKNGIAFMGPPSQAMWALGDKIASSIVAQTAGIPTLPWSGSGLRVDWQENDFSKRILNVPQELYEKGYVKDVDDGLQAAEEVGYPVMIKASEGGGGKGIRKVNNADDFPNLFRQVQAEVPGSPIFVMRLAKQSRHLEVQILADQYGNAISLFGRDCSVQRRHQKIIEEAPATIATPAVFEHMEQCAVKLAKMVGYVSAGTVEYLYSQDGSFYFLELNPRLQVEHPCTEMVADVNLPAAQLQIAMGIPLYRIKDIRMMYGVSPWGDSPIDFEDSAHVPCPRGHVIAARITSENPDEGFKPSSGTVQELNFRSNKNVWGYFSVAAAGGLHEFADSQFGHCFSWGENREEAISNMVVALKELSIRGDFRTTVEYLIKLLETESFQMNRIDTGWLDRLIAEKVQAERPDTMLGVVCGALHVADVSLRNSVSNFLHSLERGQVLPAHTLLNTVDVELIYEGVKYVLKVTRQSPNSYVVIMNGSCVEVDVHRLSDGGLLLSYDGSSYTTYMKEEVDRYRITIGNKTCVFEKENDPSVMRSPSAGKLIQYIVEDGGHVFAGQCYAEIEVMKMVMTLTAVESGCIHYVKRPGAALDPGCVLAKMQLDNPSKVQQAELHTGSLPRIQSTALRGEKLHRVFHYVLDNLVNVMNGYCLPDPFFSSKVKDWVERLMKTLRDPSLPLLELQDIMTSVSGRIPPNVEKSIKKEMAQYASNITSVLCQFPSQQIANILDSHAATLNRKSEREVFFMNTQSIVQLVQRYRSGIRGHMKAVVMDLLRQYLRVETQFQNGHYDKCVFALREENKSDMNTVLNYIFSHAQVTKKNLLVTMLIDQLCGRDPTLTDELLNILTELTQLSKTTNAKVALRARQVLIASHLPSYELRHNQVESIFLSAIDMYGHQFCIENLQKLILSETSIFDVLPNFFYHSNQVVRMAALEVYVRRAYIAYELNSVQHRQLKDNTCVVEFQFMLPTSHPNRGNIPTLNRMSFSSNLNHYGMTHVASVSDVLLDNSFTPPCQRMGGMVSFRTFEDFVRIFDEVMGCFSDSPPQSPTFPEAGHTSLYDEDKVPRDEPIHILNVAIKTDCDIEDDRLAAMFREFTQQNKATLVDHGIRRLTFLVAQKDFRKQVNYEVDRRFHREFPKFFTFRARDKFEEDRIYRHLEPALAFQLELNRMRNFDLTAIPCANHKMHLYLGAAKVEVGTEVTDYRFFVRAIIRHSDLVTKEASFEYLQNEGERLLLEAMDELEVAFNNTNVRTDCNHIFLNFVPTVIMDPSKIEESVRSMVMRYGSRLWKLRVLQAELKINIRLTPTGKAIPIRLFLTNESGYYLDISLYKEVTDSRTAQIMFQAYGDKQGPLHGMLINTPYVTKDLLQSKRFQAQSLGTTYIYDIPEMFRQSLIKLWESMSTQAFLPSPPLPSDMLTYTELVLDDQGQLVHMNRLPGGNEIGMVAWKMTFKSPEYPEGRDIIVIGNDITYRIGSFGPQEDLLFLRASELARAEGIPRIYVSANSGARIGLAEEIRHMFHVAWVDPEDPYKGYRYLYLTPQDYKRVSALNSVHCEHVEDEGESRYKITDIIGKEEGIGPENLRGSGMIAGESSLAYNEIITISLVTCRAIGIGAYLVRLGQRTIQVENSHLILTGAGALNKVLGREVYTSNNQLGGIQIMHNNGVTHCTVCDDFEGVFTVLHWLSYMPKSVHSSVPLLNSKDPIDRIIEFVPTKTPYDPRWMLAGRPHPTQKGQWLSGFFDYGSFSEIMQPWAQTVVVGRARLGGIPVGVVAVETRTVELSIPADPANLDSEAKLQRFKRSLSLKTILRSKSLENFFLRSGSELKCPTEVLLTPPTPLPPPSPPPTASDRGLATPSPSPCPVPRPLAALKPVRLHSFQEHVFKRASPCELCHQLIVGNSKQGLRCKMCKVSVHLWCSEEISHQQCPGKTSTSFRRNFSSPLLVHEPPPVCATSKESPPTGDSGKVDPVYETLRYGTSLALMNRSSFSSTSESPTRSLSERDELTEDGEGSIRSSEEGPGDSASPVFTAPAESEGPGPEEKSPGQQLPKATLRKDVGPMYSYVALYKFLPQENNDLALQPGDRIMLVDDSNEDWWKGKIGDRVGFFPANFVQRVRPGENVWRCCQPFSGNKEQGYMSLKENQICVGVGRSKDADGFIRVSSGKKRGLVPVDALTEI

SEQ ID NO: 239 - protein, 69 aa, Homo sapiens
MRLTHICCCCLLYQLGFLSNGIVSDGKEKMSQPLRLLMLLECWISYRKQTSMVWLYQVMKEEQEWLLLF

SEQ ID NO: 240 - protein, 852 aa, Homo sapiens
MQESQTKSMFVSRALEKILADKEVKRPQHSQLRRACQVALTSMQVMNKTRRIMEQGGAHFINAFVTTPMCCPSRSSILTGKYVHNHNTYTNNENCSSPSWQAQHESRTFAVYLNSTGYRTAFFGKYLNEYNGSYVPPGWKEWVGLLKNSRFYNYTLCRNGVKEKHGSDYSKDYLTDLITNDSVSFFRTSKKMYPHRPVLMVISHAAPHGPEDSAPQYSRLFPNASQHITPSYNYAPNPDKHWIMRYTGPMKPIHMEFTNMLQRKRLQTLMSVDDSMETIYNMLVETGELDNTYIVYTADHGYHIGQFGLVKGKSMPYEFDIRVPFYVRGPNVEAGCLNPHIVLNIDLAPTILDIAGLDIPADMDGKSILKLLDTERPVNRFHLKKKMRVWRDSFLVERGKLLHKRDNDKVDAQEENFLPKYQRVKDLCQRAEYQTACEQLGQKWQCVEDATGKLKLHKCKGPMRLGGSRALSNLVPKYYGQGSEACTCDSGDYKLSLAGRRKKLFKKKYKASYVRSRSIRSVAIEVDGRVYHVGLGDAAQPRNLTKRHWPGAPEDQDDKDGGDFSGTGGLPDYSAANPIKVTHRCYILENDTVQCDLDLYKSLQAWKDHKLHIDHEIETLQNKIKNLREVRGHLKKKRPEECDCHKISYHTQHKGRLKHRGSSLHPFRKGLQEKDKVWLLREQKRKKKLRKLLKRLQNNDTCSMPGLTCFTHDNQHWQTAPFWTLGPFCACTSANNNTYWCMRTINETHNFLFCEFATGFLEYFDLNTDPYQLMNAVNTLDRDVLNQLHVQLMELRSCKGYKQCNPRTRNMDLGLKDGGSYEQYRQFQRRKWPEMKRPSSKSLGQLWEGWEG

SEQ ID NO: 241 - protein, 849 aa, Homo sapiens
MQESQTKSMFVSRALEKILADKEVKRPQHSQLRRACQVALTSMQVMNKTRRIMEQGGAHFINAFVTTPMCCPSRSSILTGKYVHNHNTYTNNENCSSPSWQAQHESRTFAVYLNSTGYRTAFFGKYLNEYNGSYVPPGWKEWVGLLKNSRFYNYTLCRNGVKEKHGSDYSKDYLTDLITNDSVSFFRTSKKMYPHRPVLMVISHAAPHGPEDSAPQYSRLFPNASQHITPSYNYAPNPDKHWIMRYTGPMKPIHMEFTNMLQRKRLQTLMSVDDSMETIYNMLVETGELDNTYIVYTADHGYHIGQFGLVKGKSMPYEFDIRVPFYVRGPNVEAGCLNPHIVLNIDLAPTILDIAGLDIPADMDGKSILKLLDTERPVNRFHLKKKMRVWRDSFLVERGKLLHKRDNDKVDAQEENFLPKYQRVKDLCQRAEYQTACEQLGQKWQCVEDATGKLKLHKCKGPMRLGGSRALSNLVPKYYGQGSEACTCDSGDYKLSLAGRRKKLFKKKYKASYVRSRSIRSVAIEVDGRVYHVGLGDAAQPRNLTKRHWPGAPEDQDDKDGGDFSGTGGLPDYSAANPIKVTHRCYILENDTVQCDLDLYKSLQAWKDHKLHIDHEIETLQNKIKNLREVRGHLKKKRPEECDCHKISYHTQHKGRLKHRGSSLHPFRKGLQEKDKVWLLREQKRKKKLRKLLKRLQNNDTCSMPGLTCFTHDNQHWQTAPFWTLGPFCACTSANNNTYWCMRTINETHNFLFCEFATGFLEYFDLNTDPYQLMNAVNTLDRDVLNQLHVQLMELRSCKGYKQCNPRTRNMDLDGGSYEQYRQFQRRKWPEMKRPSSKSLGQLWEGWEG

SEQ ID NO: 242 - protein, 2118 aa, Homo sapiens
MAAQVAPAAASSLGNPPPPPPSELKKAEQQQREEAGGEAAAAAAAERGEMKAAAGQESEGPAVGPPQPLGKELQDGAESNGGGGGGGAGSGGGPGAEPDLKNSNGNAGPRPALNNNLTEPPGGGGGGSSDGVGAPPHSAAAALPPPAYGFGQPYGRSPSAVAAAAAAVFHQQHGGQQSPGLAALQSGGGGGLEPYAGPQQNSHDHGFPNHQYNSYYPNRSAYPPPAPAYALSSPRGGTPGSGAAAAAGSKPPPSSSASASSSSSSFAQQRFGAMGGGGPSAAGGGTPQPTATPTLNQLLTSPSSARGYQGYPGGDYSGGPQDGGAGKGPADMASQCWGAAAAAAAAAAASGGAQQRSHHAPMSPGSSGGGGQPLARTPQDVVTGVSPLLFRKLSNPDIFSSTGKVKLQRQLSQDDCKLWRGNLASSLSGKQLLPLSSSVHSSVGQVTWQSSGEASNLVRMRNQSLGQSAPSLTAGLKELSLPRRGSFCRTSNRKSLIVTSSTSPTLPRPHSPLHGHTGNSPLDSPRNFSPNAPAHFSFVPARRTDGRRWSLASLPSSGYGTNTPSSTVSSSCSSQEKLHQLPFQPTADELHFLTKHFSTESVPDEEGRQSPAMRPRSRSLSPGRSPVSFDSEIIMMNHVYKERFPKATAQMEERLAEFISSNTPDSVLPLADGALSFIHHQVIEMARDCLDKSRSGLITSQYFYELQDNLEKLLQDAHERSESSEVAFVMQLVKKLMIIIARPARLLECLEFDPEEFYHLLEAAEGHAKEGQGIKCDIPRYIVSQLGLTRDPLEEMAQLSSCDSPDTPETDDSIEGHGASLPSKKTPSEEDFETIKLISNGAYGAVFLVRHKSTRQRFAMKKINKQNLILRNQIQQAFVERDILTFAENPFVVSMFCSFDTKRHLCMVMEYVEGGDCATLLKNIGALPVDMVRLYFAETVLALEYLHNYGIVHRDLKPDNLLITSMGHIKLTDFGLSKIGLMSLTTNLYEGHIEKDAREFLDKQVCGTPEYIAPEVILRQGYGKPVDWWAMGIILYEFLVGCVPFFGDTPEELFGQVISDEIVWPEGDEALPPDAQDLTSKLLHQNPLERLGTGSAYEVKQHPFFTGLDWTGLLRQKAEFIPQLESEDDTSYFDTRSERYHHMDSEDEEEVSEDGCLEIRQFSSCSPRFNKVYSSMERLSLLEERRTPPPTKRSLSEEKEDHSDGLAGLKGRDRSWVIGSPEILRKRLSVSESSHTESDSSPPMTVRRRCSGLLDAPRFPEGPEEASSTLRRQPQEGIWVLTPPSGEGVSGPVTEHSGEQRPKLDEEAVGRSSGSSPAMETRGRGTSQLAEGATAKAISDLAVRRARHRLLSGDSTEKRTARPVNKVIKSASATALSLLIPSEHHTCSPLASPMSPHSQSSNPSSRDSSPSRDFLPALGSMRPPIIIHRAGKKYGFTLRAIRVYMGDSDVYTVHHMVWHVEDGGPASEAGLRQGDLITHVNGEPVHGLVHTEVVELILKSGNKVAISTTPLENTSIKVGPARKGSYKAKMARRSKRSRGKDGQESRKRSSLFRKITKQASLLHTSRSLSSLNRSLSSGESGPGSPTHSHSLSPRSPTQGYRVTPDAVHSVGGNSSQSSSPSSSVPSSPAGSGHTRPSSLHGLAPKLQRQYRSPRRKSAGSIPLSPLAHTPSPPPPTASPQRSPSPLSGHVAQAFPTKLHLSPPLGRQLSRPKSAEPPRSPLLKRVQSAEKLAAALAASEKKLATSRKHSLDLPHSELKKELPPREVSPLEVVGARSVLSGKGALPGKGVLQPAPSRALGTLRQDRAERRESLQKQEAIREVDSSEDDTEEGPENSQGAQELSLAPHPEVSQSVAPKGAGESGEEDPFPSRDPRSLGPMVPSLLTGITLGPPRMESPSGPHRRLGSPQAIEEAASSSSAGPNLGQSGATDPIPPEGCWKAQHLHTQALTALSPSTSGLTPTSSCSPPSSTSGKLSMWSWKSLIEGPDRASPSRKATMAGGLANLQDLENTTPAQPKNLSPREQGKTQPPSAPRLAHPSYEDPSQGWLWESECAQAVKEDPALSITQVPDASGDRRQDVPCRGCPLTQKSEPSLRRGQEPGGHQKHRDLALVPDELLKQT

SEQ ID NO: 243 - protein, 1011 aa, Homo sapiens
MAAQVAPAAASSLGNPPPPPPSELKKAEQQQREEAGGEAAAAAAAERGEMKAAAGQESEGPAVGPPQPLGKELQDGAESNGGGGGGGAGSGGGPGAEPDLKNSNGNAGPRPALNNNLTEPPGGGGGGSSDGVGAPPHSAAAALPPPAYGFGQPYGRSPSAVAAAAAAVFHQQHGGQQSPGLAALQSGGGGGLEPYAGPQQNSHDHGFPNHQYNSYYPNRSAYPPPAPAYALSSPRGGTPGSGAAAAAGSKPPPSSSASASSSSSSFAQQRFGAMGGGGPSAAGGGTPQPTATPTLNQLLTSPSSARGYQGYPGGDYSGGPQDGGAGKGPADMASQCWGAAAAAAAAAAASGGAQQRSHHAPMSPGSSGGGGQPLARTPQGHSGCVNCLEWNEKGDLLASGSDDQHTIVWDPLHHKKLLSMHTGHTANIFSVKFLPHAGDRILITGAADSKVHVHDLTVKETIHMFGDHTNRVKRIATAPMWPNTFWSAAEDGLIRQYDLRENSKHSEVLIDLTEYCGQLVEAKCLTVNPQDNNCLAVGASGPFVRLYDIRMIHNHRKSMKQSPSAGVHTFCDRQKPLPDGAAQYYVAGHLPVKLPDYNNRLRVLVATYVTFSPNGTELLVNMGGEQVYLFDLTYKQRPYTFLLPRKCHSSGVQNGKMSTNGVSNGVSNGLHLHSNGFRLPESRGHVSPQVELPPYLERVKQQANEAFACQQWTQAIQLYSKAVQRAPHNAMLYGNRAAAYMKRKWDGDHYDALRDCLKAISLNPCHLKAHFRLARCLFELKYVAEALECLDDFKGKFPEQAHSSACDALGRDITAALFSKNDGEEKKGPGGGAPVRLRSTSRKDSISEDEMVLRERSYDYQFRYCGHCNTTTDIKEANFFGSNAQYIVSGSDDGSFFIWEKETTNLVRVLQGDESIVNCLQPHPSYCFLATSGIDPVVRLWNPRPESEDLTGRVVEDMEGASQANQRRMNADPLEVMLLNMGYRITGLSSGGAGASDDEDSSEGQVQCRPS

SEQ ID NO: 244 - protein, 77 aa, Homo sapiens
MKMEEMSLSGLDNSKLEVPAPSPWCSSSAGLPACLSAPPTASSGRHLRLPAPSRKCGLSLPSWALRPPAQAMAPGWS

SEQ ID NO: 245 - protein, 66 aa, Homo sapiens
MQRTGGGAPRPGRNHGLPGSLRQPDPVALLMLLVDADQPEPMRSGARELALFLTPEPGAEVPLTGA

SEQ ID NO: 246 - protein, 792 aa, Homo sapiens
MSPEVALNRISPMLSPFISSVVRNGKVGLDATNCLRITDLKSGCTSLTPGPNCDRFKLHIPYAGETLKWDIIFNAQYPELPPDFIFGEDAEFLPDPSALQNLASWNPSNPECLLLVVKELVQQYHQFQCSRLRESSRLMFEYQTLLEEPQYGENMEIYAGKKNNWTGEFSARFLLKLPVDFSNIPTYLLKDVNEDPGEDVALLSVSFEDTEATQVYPKLYLSPRIEQNMLANSASVRILIKGGKVVNDDCTHEADVYIENGIIQQVGRELMIPGGAKVIDATGKLVIPGGIDTSTHFHQTFMNATCVDDFYHGTKAALVGGTTMIIGHVLPDKETSLVDAYEKCRGLADPKVCCDYALHVGITWWAPKVKAEMETLVREKGVNSFQMFMTYKDLYMLRDSELYQVLHACKDIGAIARVHAENGELVAEGAKEALDLGITGPEGIEISRPEELEAEATHRVITIANRTHCPIYLVNVSSISAGDVIAAAKMQGKVVLAETTTAHATLTGLHYYHQDWSHAAAYVTVPPLRLDTNTSTYLMSLLANDTLNIVASDHRPFTTKQKAMGKEDFTKIPHGVSGVQDRMSVIWERGVVGGKMDENRFVAVTSSNAAKLLNLYPRKGRIIPGADADVVVWDPEATKTISASTQVQGGDFNLYENMRCHGVPLVTISRGRVVYENGVFMCAEGTGKFCPLRSFPDTVYKKLVQREKTLKVRGVDRTPYLGDVAVVVHPGKKEMGTPLADTPTRPVTRHGGMRDLHESSFSLSGSQIDDHVPKRASARILAPPGGRSSGIW

SEQ ID NO: 247 - protein, 132 aa, Homo sapiens
MSSMWSEYTIGGVKIYFPYKAYPSQLAMMNSILRGLNSKQHCLLESPTGSGKSLALLCSALAWQQSLSENFCYNNIQQAHSGANGGFHWCCPRHRSISAEAISGVPGGSTAEASPQKRNGHTTGRKLVVLDV

SEQ ID NO: 248 - protein, 194 aa, Homo sapiens
MGEFNEKKTTCGTVCLKYLLFTYNCCFWLAGLAVMAVGIWTLALKSDYISLLASGTYLATAYILVVAGTVVMVTGVLGCCATFKERRNLLRLYFILLLIIFLLEIIAGILAYAYYQQGPSCCAGRPSSWCTSRRRCVLPAPCPRGWSAPSPGWATSTAPSTPSSTLSSTPSSATSSARPCVPAAEPGTPGRPPA

SEQ ID NO: 249 - protein, 617 aa, Homo sapiens
MEEPGVTPQPYLGLLLEELRRVVAALPEGMRPDSNLYGFPWELVICAAVVGFFAVLFFLWRSFRSVRSRLYVGREKKLALMLSGLIEEKSKLLEKFSLVQKEYEGYEVESSLKDASFEKEATEAQSLEATCEKLNRSNSELEDEILCLEKELKEEKSKHSEQDELMADISKRIQSLEDESKSLKSQVAEAKMTFKIFQMNEERLKIAIKDALNENSQLQESQKQLLQEAEVWKEQVSELNKQKVTFEDSKVHAEQVLNDKESHIKTLTERLLKMKDWAAMLGEDITDDDNLELEMNSESENGAYLDNPPKGALKKLIHAAKLNASLKTLEGERNQIYIQLSEVDKTKEELTEHIKNLQTEQASLQSENTHFENENQKLQQKLKVMTELYQENEMKLHRKLTVEENYRLEKEEKLSKVDEKISHATEELETYRKRAKDLEEELERTIHSYQGQIISHEKKAHDNWLAARNAERNLNDLRKENAHNRQKLTETELKFELLEKDPYALDVPNTAFGREHSPYGPSPLGWPSSETRAFLSPPTLLEGPLRLSPLLPGGGGRGSRGPGNPLDHQITNERGESSCDRLTDPHRAPSDTGSLSPPWDQDRRMMFPPPGILTNVI

SEQ ID NO: 250 - protein, 605 aa, Homo sapiens
MELKSPEEEVVAALPEGMRPDSNLYGFPWELVICAAVVGFFAVLFFLWRSFRSVRSRLYVGREKKLALMLSGLIEEKSKLLEKFSLVQKEYEGYEVESSLKDASFEKEATEAQSLEATCEKLNRSNSELEDEILCLEKELKEEKSKHSEQDELMADISKRIQSLEDESKSLKSQVAEAKMTFKIFQMNEERLKIAIKDALNENSQLQESQKQLLQEAEVWKEQVSELNKQKVTFEDSKVHAEQVLNDKESHIKTLTERLLKMKDWAAMLGEDITDDDNLELEMNSESENGAYLDNPPKGALKKLIHAAKLNASLKTLEGERNQIYIQLSEVDKTKEELTEHIKNLQTEQASLQSENTHFENENQKLQQKLKVMTELYQENEMKLHRKLTVEENYRLEKEEKLSKVDEKISHATEELETYRKRAKDLEEELERTIHSYQGQIISHEKKAHDNWLAARNAERNLNDLRKENAHNRQKLTETELKFELLEKDPYALDVPNTAFGREHSPYGPSPLGWPSSETRAFLSPPTLLEGPLRLSPLLPGGGGRGSRGPGNPLDHQITNERGESSCDRLTDPHRAPSDTGSLSPPWDQDRRMMFPPPGILTNVI

SEQ ID NO: 251 - protein, 574 aa, Homo sapiens
MEEPGVTPQPYLGLLLEELRRVVAALPEGMRPDSNLYGFPWELVICAAVVGFFAVLFFLWRSFRSVRSRLYVGREKKLALMLSGLIEEKSKLLEKFSLVQKEYEGYEVESSLKDASFEKEATEAQSLEATCEKLNRSNSELEDEILCLEKELKEEKSKHSEQDELMADISKRIQSLEDESKSLKSQVAEAKMTFKIFQMNEERLKIAIKDALNENSQLQESQKQLLQEAEVWKEQVSELNKQKVTFEDSKVHAEQVLNDKESHIKTLTERLLKMKDWAAMLGEDITDDDNLELEMNSESENGAYLDNPPKGALKKLIHAAKLNASLKTLEGERNQIYIQLSEVDKTKEELTEHIKNLQTEQASLQSENTHFENENQKLQQKLKVMTELYQENEMKLHRKLTVEENYRLEKEEKLSKVDEKISHATEELETYRKRAKDLEEELERTIHSYQGQIISHEKKAHDNWLAARNAERNLNDLRKENAHNRQKLTETELKFELLEKDPYALDVPNTAFGRGSRGPGNPLDHQITNERGESSCDRLTDPHRAPSDTGSLSPPWDQDRRMMFPPPGILTNVI

SEQ ID NO: 252 - protein, 588 aa, Homo sapiens
MRPDSNLYGFPWELVICAAVVGFFAVLFFLWRSFRSVRSRLYVGREKKLALMLSGLIEEKSKLLEKFSLVQKEYEGYEVESSLKDASFEKEATEAQSLEATCEKLNRSNSELEDEILCLEKELKEEKSKHSEQDELMADISKRIQSLEDESKSLKSQVAEAKMTFKIFQMNEERLKIAIKDALNENSQLQESQKQLLQEAEVWKEQVSELNKQKVTFEDSKVHAEQVLNDKESHIKTLTERLLKMKDWAAMLGEDITDDDNLELEMNSESENGAYLDNPPKGALKKLIHAAKLNASLKTLEGERNQIYIQLSEVDKTKEELTEHIKNLQTEQASLQSENTHFENENQKLQQKLKVMTELYQENEMKLHRKLTVEENYRLEKEEKLSKVDEKISHATEELETYRKRAKDLEEELERTIHSYQGQIISHEKKAHDNWLAARNAERNLNDLRKENAHNRQKLTETELKFELLEKDPYALDVPNTAFGREHSPYGPSPLGWPSSETRAFLSPPTLLEGPLRLSPLLPGGGGRGSRGPGNPLDHQITNERGESSCDRLTDPHRAPSDTGSLSPPWDQDRRMMFPPPGILTNVI

SEQ ID NO: 253 - protein, 318 aa, Homo sapiens
MEEDDSYFTRVEIKESVRGQDIFIIQTIPRDVNTAVMELLIMAYALKTACARNIIGVIPYFPYSKQSKMRKRGSIVCKLLASMLAKAGLTHIITMDLHQKEIQGFFSFPVDNLRASPFLLQYIQEEIPNYRNAVIVAKSPDAAKRAQSYAERLRLGLAVIHGEAQCTELDMDDGRHSPPMVKNATVHPGLELPLMMAKEKPPITVVGDVGGRIAIIVDDIIDDVESFVAAAEILKERGAYKIYVMATHGILSAEAPRLIEESSVDEVVVTNTVPHEVQKLQCPKIKTVDISLILSEAIRRIHNGESMAYLFRNITVDD

SEQ ID NO: 254 - protein, 531 aa, Homo sapiens
MAMFEQMRANVGKLLKGIDRYNPENLATLERYVETQAKENAYDLEANLAVLKLYQFNPAFFQTTVTAQILLKALTNLPHTDFTLCKCMIDQAHQEERPIRQILYLGDLLETCHFQAFWQALDENMDLLEGITGFEDSVRKFICHVVGITYQHIDRWLLAEMLGDLSCSIPKNVFLALHEKLYIMLKGKMGTVNLHQFTGQLTEELHEQLENLGTHGTMDLNNLVRHLLYPVTVNMLFNKSLFSTNKKKIKEFHQYFQVYDEDFEYGSQLPECLLRNWSKSKKWFLELFEKNIPDIKACKSAKDNSMTLLQATLDIVETETSKENSPNYGLLLLWASLSNAVPVAFWTLAYVLSHPDIHKAIMEGISSVFGKAGKDKIKVSEDDLENLLLIKWCVLETIRLKAPGVITRKVVKPVEILNYIIPSGDLLMLSPFWLHRNPKYFPEPELFKPERWKKANLEKHSFLDCFMAFGSGKFQCPARWFALLEVQMCIILILYKYDCSLLDPLPKQSYLHLVGVPQPEGQCRIEYKQRI

SEQ ID NO: 255 - protein, 604 aa, Homo sapiens
MIPPQEASARRREIEDKLKQEEETLSFIRDSLEKSDQLTKNMVSILSSFESRLMKLENSIIPVHKQTENLQRLQENVEKTLSCLDHVISYYHVASDTEKIIREGPTGRLEEYLGSMAKIQKAVEYFQDNSPDSPELNKVKLLFERGKEALESEFRSLMTRHSKVVSPVLILDLISGDDDLEAQEDVTLEHLPESVLQDVIRISRWLVEYGRNQNPSDLTAEERQELENIRRRKQELLADIQRLKDEIAEVANEIENLGSTEERKNMQRNKQVAMGRKKFNMDPKKGIQFLIENDLLKNTCEDIAQFLYKGEGLNKTAIGDYLGERDEFNIQVLHAFVELHEFTDLNLVQALRQFLWSFRLPGEAQKIDRMMEAFAQRYCQCNNGVFQSTDTCYVLSFAIIMLNTSLHNPNVKDKPTVERFIAMNRGINDGGDLPEELLRNLYESIKNEPFKIPEDDGNDLTHTFFNPDREGWLLKLGGGRVKTWKRRWFILTDNCLYYFEYTTDKEPRGIIPLENLSIREVEDSKKPNCFELYIPDNKDQVIKACKTEADGRVVEGNHTVYRISAPTPEEKEEWIKCIKAAISRDPFYEMLAARKKKVSSTKRH

SEQ ID NO: 256 - protein, 603 aa, Homo sapiens
MIPPQEASARRREIEDKLKQEEETLSFIRDSLEKSDQLTKNMVSILSSFESRLMKLENSIIPVHKQTENLQRLQENVEKTLSCLDHVISYYHVASDTEKIIREGPTGRLEEYLGSMAKIQKAVEYFQDNSPDSPELNKVKLLFERGKEALESEFRSLMTRHSKVVSPVLILDLISGDDDLEAQEDVTLEHLPESVLQDVIRISRWLVEYGRNQNPSDLTAEERQELENIRRRKQELLADIQRLKDEIAEVANEIENLGSTEERKNMQRNKQVAMGRKKFNMDPKKGIQFLIENDLLKNTCEDIAQFLYKGEGLNKTAIGDYLGERDEFNIQVLHAFVELHEFTDLNLVQALRQFLWSFRLPGEAQKIDRMMEAFAQRYCQCNNGVFQSTDTCYVLSFAIIMLNTSLHNPNVKDKPTVERFIAMNRGINDGGDLPEELLRNLYESIKNEPFKIPEDDGNDLTHTFFNPDREGWLLKLGGRVKTWKRRWFILTDNCLYYFEYTTDKEPRGIIPLENLSIREVEDSKKPNCFELYIPDNKDQVIKACKTEADGRVVEGNHTVYRISAPTPEEKEEWIKCIKAAISRDPFYEMLAARKKKVSSTKRH

SEQ ID NO: 257 - protein, 60 aa, Homo sapiens
MAFLMKKKKFKFQTTFTLEELTAVPFVNGVLFCKVRLLDGGDFVSLSSRTGPVCNATSHV

SEQ ID NO: 258 - protein, 49 aa, Homo sapiens
MAFLMKKKKFKFQTTFTLEELTAVPFVNGVLFCKVRLLDGGDFVSLSSR

SEQ ID NO: 259 - protein, 60 aa, Homo sapiens; identical to SEQ ID NO: 257

SEQ ID NO: 260 - protein, 49 aa, Homo sapiens; identical to SEQ ID NO: 258

SEQ ID NO: 261 - protein, 60 aa, Homo sapiens; identical to SEQ ID NO: 257

SEQ ID NO: 262 - protein, 49 aa, Homo sapiens; identical to SEQ ID NO: 258

SEQ ID NO: 263 - protein, 63 aa, Homo sapiens
MAFLMKKKKFKFQTTFTLEELTAVPFVNGVLFCKVRLLDGGDFVSLSSRNTRRPRTPAPPPDL

SEQ ID NO: 264 - protein, 139 aa, Homo sapiens
MAADTQVSETLKRFAGKVTTASVKERREILSELGKCVAGKGIPLTAYGPMAAAAAAAAVVRGTGSHPWTMAPPPGSTPSRTGGFLGTTSPGPMAELYGAANQDSGVSSYISAASPAPSTGFGHSLGGPLIATAFTNGYH

SEQ ID NO: 265 - protein, 700 aa, Homo sapiens
MPGFLVRILPLLLVLLLLGPTRGLRNATQRMFEIDYSRDSFLKDGQPFRYISGSIHYSRVPRFYWKDRLLKMKMAGLNAIQTYVPWNFHEPWPGQYQFSEDHDVEYFLRLAHELGLLVILRPGPYICAEWEMGGLPAWLLEKESILLRSSDPDYLAAVDKWLGVLLPKMKPLLYQNGGPVITVQVENEYGSYFACDFDYLRFLQKRFRHHLGDDVVLFTTDGAHKTFLKCGALQGLYTTVDFGTGSNITDAFLSQRKCEPKGPLINSEFYTGWLDHWGQPHSTIKTEAVASSLYDILARGASVNLYMFIGGTNFAYWNGANSPYAAQPTSYDYDAPLSEAGDLTEKYFALRNIIQKFEKVPEGPIPPSTPKFAYGKVTLEKLKTVGAALDILCPSGPIKSLYPLTFIQVKQHYGFVLYRTTLPQDCSNPAPLSSPLNGVHDRAYVAVDGIPQGVLERNNVITLNITGKAGATLDLLVENMGRVNYGAYINDFKGLVSNLTLSSNILTDWTIFPLDTEDAVCSHLGGWGHRDSGHHDEAWAHNSSNYTLPAFYMGNFSIPSGIPDLPQDTFIQFPGWTKVTLLIAFICVRSSLWTNYSAYSYFEVVTICDLIMILAFYLVHLFRFYRVLTCISWPLSELLHYLIGTLLLLIASIVAASKSYNQSGLVAGAIFGFMATFLCMASIWLSYKISCVTQSTDAAV

SEQ ID NO: 266 - protein, 667 aa, Homo sapiens
MPGFLVRILPLLLVLLLLGPTRGLRNATQRMFEIDYSRDSFLKDGQPFRYISGSIHYSRVPRFYWKDRLLKMKMAGLNAIQTYVPWNFHEPWPGQYQFSEDHDVEYFLRLAHELGLLVILRPGPYICAEWEMGGLPAWLLEKESILLRSSDPDYLAAVDKWLGVLLPKMKPLLYQNGGPVITVQVENEYGSYFACDFDYLRFLQKRFRHHLGDDVVLFTTDGAHKTFLKCGALQGLYTTVDFGTGSNITDAFLSQRKCEPKGPLINSEFYTGWLDHWGQPHSTIKTEAVASSLYDILARGASVNLYMFIGGTNFAYWNGANSPYAAQPTSYDYDAPLSEAGDLTEKYFALRNIIQKFEKVPEGPIPPSTPKFAYGKVTLEKLKTVGAALDILCPSGPIKSLYPLTFIQVKQHYGFVLYRTTLPQDCSNPAPLSSPLNGVHDRAYVAVDGIPQGVLERNNVITLNITGKAGATLDLLVENMGRVNYGAYINDFKGLVSNLTLSSNILTDWTIFPLDTEDAVCSHLGGWGHRDSGHHDEAWAHNSSNYTLPAFYMGNFSIPSGIPDLPQDTFIQFPGWTKVTLLIAFICVRSSLWTNYSAYSYFEVVTICDLIMILAFYLVHLFRFYRVLTCISWPLSIFGFMATFLCMASIWLSYKISCVTQSTDAAV

SEQ ID NO: 267 - protein, 670 aa, Homo sapiens
MFEIDYSRDSFLKDGQPFRYISGSIHYSRVPRFYWKDRLLKMKMAGLNAIQTYVPWNFHEPWPGQYQFSEDHDVEYFLRLAHELGLLVILRPGPYICAEWEMGGLPAWLLEKESILLRSSDPDYLAAVDKWLGVLLPKMKPLLYQNGGPVITVQVENEYGSYFACDFDYLRFLQKRFRHHLGDDVVLFTTDGAHKTFLKCGALQGLYTTVDFGTGSNITDAFLSQRKCEPKGPLINSEFYTGWLDHWGQPHSTIKTEAVASSLYDILARGASVNLYMFIGGTNFAYWNGANSPYAAQPTSYDYDAPLSEAGDLTEKYFALRNIIQKFEKVPEGPIPPSTPKFAYGKVTLEKLKTVGAALDILCPSGPIKSLYPLTFIQVKQHYGFVLYRTTLPQDCSNPAPLSSPLNGVHDRAYVAVDGIPQGVLERNNVITLNITGKAGATLDLLVENMGRVNYGAYINDFKGLVSNLTLSSNILTDWTIFPLDTEDAVCSHLGGWGHRDSGHHDEAWAHNSSNYTLPAFYMGNFSIPSGIPDLPQDTFIQFPGWTKVTLLIAFICVRSSLWTNYSAYSYFEVVTICDLIMILAFYLVHLFRFYRVLTCISWPLSELLHYLIGTLLLLIASIVAASKSYNQSGLVAGAIFGFMATFLCMASIWLSYKISCVTQSTDAAV

SEQ ID NO: 268 - protein, 637 aa, Homo sapiens
MFEIDYSRDSFLKDGQPFRYISGSIHYSRVPRFYWKDRLLKMKMAGLNAIQTYVPWNFHEPWPGQYQFSEDHDVEYFLRLAHELGLLVILRPGPYICAEWEMGGLPAWLLEKESILLRSSDPDYLAAVDKWLGVLLPKMKPLLYQNGGPVITVQVENEYGSYFACDFDYLRFLQKRFRHHLGDDVVLFTTDGAHKTFLKCGALQGLYTTVDFGTGSNITDAFLSQRKCEPKGPLINSEFYTGWLDHWGQPHSTIKTEAVASSLYDILARGASVNLYMFIGGTNFAYWNGANSPYAAQPTSYDYDAPLSEAGDLTEKYFALRNIIQKFEKVPEGPIPPSTPKFAYGKVTLEKLKTVGAALDILCPSGPIKSLYPLTFIQVKQHYGFVLYRTTLPQDCSNPAPLSSPLNGVHDRAYVAVDGIPQGVLERNNVITLNITGKAGATLDLLVENMGRVNYGAYINDFKGLVSNLTLSSNILTDWTIFPLDTEDAVCSHLGGWGHRDSGHHDEAWAHNSSNYTLPAFYMGNFSIPSGIPDLPQDTFIQFPGWTKVTLLIAFICVRSSLWTNYSAYSYFEVVTICDLIMILAFYLVHLFRFYRVLTCISWPLSIFGFMATFLCMASIWLSYKISCVTQSTDAAV

SEQ ID NO: 269 - protein, 569 aa, Homo sapiens
MPGFLVRILPLLLVLLLLGPTRGLRNATQRMFEIDYSRDSFLKDGQPFRYISGSIHYSRVPRFYWKDRLLKMKMAGLNAIQTLPGSCGQVVGSPSAQDEASPLSEWRASYNSAGSNITDAFLSQRKCEPKGPLINSEFYTGWLDHWGQPHSTIKTEAVASSLYDILARGASVNLYMFIGGTNFAYWNGANSPYAAQPTSYDYDAPLSEAGDLTEKYFALRNIIQKFEKVPEGPIPPSTPKFAYGKVTLEKLKTVGAALDILCPSGPIKSLYPLTFIQVKQHYGFVLYRTTLPQDCSNPAPLSSPLNGVHDRAYVAVDGIPQGVLERNNVITLNITGKAGATLDLLVENMGRVNYGAYINDFKGLVSNLTLSSNILTDWTIFPLDTEDAVCSHLGGWGHRDSGHHDEAWAHNSSNYTLPAFYMGNFSIPSGIPDLPQDTFIQFPGWTKVTLLIAFICVRSSLWTNYSAYSYFEVVTICDLIMILAFYLVHLFRFYRVLTCISWPLSELLHYLIGTLLLLIASIVAASKSYNQSGLVAGAIFGFMATFLCMASIWLSYKISCVTQSTDAAV

SEQ ID NO: 270 - protein, 536 aa, Homo sapiens
MPGFLVRILPLLLVLLLLGPTRGLRNATQRMFEIDYSRDSFLKDGQPFRYISGSIHYSRVPRFYWKDRLLKMKMAGLNAIQTLPGSCGQVVGSPSAQDEASPLSEWRASYNSAGSNITDAFLSQRKCEPKGPLINSEFYTGWLDHWGQPHSTIKTEAVASSLYDILARGASVNLYMFIGGTNFAYWNGANSPYAAQPTSYDYDAPLSEAGDLTEKYFALRNIIQKFEKVPEGPIPPSTPKFAYGKVTLEKLKTVGAALDILCPSGPIKSLYPLTFIQVKQHYGFVLYRTTLPQDCSNPAPLSSPLNGVHDRAYVAVDGIPQGVLERNNVITLNITGKAGATLDLLVENMGRVNYGAYINDFKGLVSNLTLSSNILTDWTIFPLDTEDAVCSHLGGWGHRDSGHHDEAWAHNSSNYTLPAFYMGNFSIPSGIPDLPQDTFIQFPGWTKVTLLIAFICVRSSLWTNYSAYSYFEVVTICDLIMILAFYLVHLFRFYRVLTCISWPLSIFGFMATFLCMASIWLSYKISCVTQSTDAAV

SEQ ID NO: 271 - protein, 230 aa, Homo sapiens
MPSMLERISKNLVKEIGSKDLTPVKYLLSATKLRQFVILRKKKDSRSSFWEQSDYVPVEFSLNDILEPSSSVLETVVTGPFHFSDIMIQKHKADMGVNVGIEVSVSGEASVDHGCSLEFQIVTIPSPNLEDFQKRKLLDPEPSFLKECRRRGDNLYVVTEAVELINNTVLYDSSSVNILGKIALWITYGKGQGQGESLRVKKKALTLQKGMVMAYKRKQLVIKEKGFLHV

SEQ ID NO: 272 - protein, 133 aa, Homo sapiens
MSRSNRQKEYKCGDLVFAKMKGYPHWPARASTDHTKMPSQMEHAMETMMFTFHKFAGDKGYLTKEDLRVLMEKEFPGFLENQKDPLAVDKIMKDLDQCRDGKVGFQSFFSLIAGLTIACNDYFVVHMKQKGKK

SEQ ID NO: 273 - protein, 1025 aa, Homo sapiens
MNRAKPTTVRRPSAAAKPSGHPPPGDFIALGSKGQANESKTASTLLKPAPSGLPSERKRDAAAALSSASALTGLTKRPKLSSTPPLSALGRLAEAAVAEKRAISPSIKEPSVVPIEVLPTVLLDEIEAAELEGNDDRIEGVLCGAVKQLKVTRAKPDSTLYLSLMYLAKIKPNIFATEGVIEALCSLLRRDASINFKAKGNSLVSVLACNLLMAAYEEDENWPEIFVKVYIEDSLGERIWVDSPHCKTFVDNIQTAFNTRMPPRSVLLQGEAGRVAGDLGAGSSPHPSLTEEEDSQTELLIAEEKLSPEQEGQLMPRYEELAESVEEYVLDMLRDQLNRRQPIDNVSRNLLRLLTSTCGYKEVRLLAVQKLEMWLQNPKLTRPAQDLLMSVCMNCNTHGSEDMDVISHLIKIRLKPKVLLNHFMLCIRELLSAHKDNLGTTIKLVIFNELSSARNPNNMQVLYTALQHSSELAPKFLAMVFQDLLTNKDDYLRASRALLREIIKQTKHEINFQAFCLGLMQERKEPQYLEMEFKERFVVHITDVLAVSMMLGITAQVKEAGIAWDKGEKRNLEVLRSFQNQIAAIQRDAVWWLHTVVPSISKLAPKDYVHCLHKVLFTEQPETYYKWDNWPPESDRKKEAATLAMASPPACPSEEDESLKGCELYVQLHGIQQVLKDCIVHLCISKPERPMKFLREHFEKLEKEENRQILARQKSNSQSDSHDEEVSPTPPNPVVKARRRRGGVSAEVYTEEDAVSYVRKVIPKDYKTMTALAKAISKNVLFAHLDDNERSDIFDAMFPVTHIAGETVIQQGNEGDNFYVVDQGEVDVYVNGEWVTNISEGGSFGELALIYGTPRAATVKAKTDLKLWGIDRDSYRRILMGSTLRKRKMYEEFLSKVSILESLEKWERLTVADALEPVQFEDGEKIVVQGEPGDDFYIITEGTASVLQRRSPNEEYVEVGRLGPSDYFGEIALLLNRPRAATVVARGPLKCVKLDRPRFERVLGPCSEILKRNIQRYNSFISLTV

SEQ ID NO: 274 - protein, 525 aa, Homo sapiens
MADGNEDLRADDLPGPAFESYESMELACPAERSGHVAVSDGRHMFVWGGYKSNQVRGLYDFYLPREELWIYNMETGRWKKINTEGDVPPSMSGSCAVCVDRVLYLFGGHHSRGNTNKFYMLDSRSTDRVLQWERIDCQGIPPSSKDKLGVWVYKNKLIFFGGYGYLPEDKVLGTFEFDETSFWNSSHPRGWNDHVHILDTETFTWSQPITTGKAPSPRAAHACATVGNRGFVFGGRYRDARMNDLHYLNLDTWEWNELIPQGICPVGRSWHSLTPVSSDHLFLFGGFTTDKQPLSDAWTYCISKNEWIQFNHPYTEKPRLWHTACASDEGEVIVFGGCANNLLVHHRAAHSNEILIFSVQPKSLVPLVHSGPGKGSPQAGVDLSFATRTGTRQGIETHLFRAETSRDLSHWTRSIVQGCHNSAELIAEISTACTYKNQECRLTIHYENGFSITTEPQEGAFPKTIIQSPYEKLKMSSDDGIRMLYLDFGGKDGEIQLDLHSCPKPIVFIIHSFLSAKITRLGLVA

SEQ ID NO: 275 - protein, 65 aa, Homo sapiens
MWLLGPLCLLLSSAAESQLLPGNNFTNECNIPGNFMCSNGRCIPGAWQCDGLPDCFDKSDEKECP

SEQ ID NO: 276 - protein, 678 aa, Homo sapiens
MESSPFNRRQWTSLSLRVTAKELSLVNKNKSSAIVEIFSKYQKAAEETNMEKKRSNTENLSQHFRKGTLTVLKKKWENPGLGAESHTDSLRNSSTEIRHRADHPPAEVTSHAASGAKADQEEQIHPRSRLRSPPEALVQGRYPHIKDGEDLKDHSTESKKMENCLGESRHEVEKSEISENTDASGKIEKYNVPLNRLKMMFEKGEPTQTKAKSCICHVCGVHLNRLHSCLYCVFFGCFTKKHIHEHAKAKRHNLAIDLMYGGIYCFLCQDYIYDKDMEIIAKEEQRKAWKMQGVGEKFSTWEPTKRELELLKHNPKRRKITSNCTIGLRGLINLGNTCFMNCIVQALTHTPLLRDFFLSDRHRCEMQSPSSCLVCEMSSLFQEFYSGHRSPHIPYKLLHLVWTHARHLAGYEQQDAHEFLIAALDVLHRHCKGDDNGKKANNPNHCNCIIDQIFTGGLQSDVTCQVCHGVSTTIDPFWDISLDLPGSSTPFWPLSPGSEGNVVNGESHVSGTTTLTDCLRRFTRPEHLGSSAKIKCSGCHSYQESTKQLTMKKLPIVACFHLKRFEHSAKLRRKITTYVSFPLELDMTPFMASSKESRMNGQYQQPTDSLNNDNKYSLFAVVNHQGTLESGHYTSFIRQHKDQWFKCDDAIITKASIKDVLDSEGYLLFYHKQFLEYE

SEQ ID NO: 277 - protein, 13 aa, Homo sapiens
MVAGMLGLRAEIC

SEQ ID NO: 278 - protein, 13 aa, Homo sapiens
MVAGMLGLRAEIC

SEQ ID NO: 279 - protein, 65 aa, Homo sapiens
MKAQGETEGLPYGWEEAYTADGIKYFINHVTQTTSWIHPVMSVLNLSRSEENEEDCSRELPNQKS

SEQ ID NO: 280 - protein, 468 aa, Homo sapiens
MSIVIPLGVDTAETSYLEMAAGSEPESVEASPVVVEKSNSYPHQLYTSSSHHSHSYIGLPYADHNYGARPPPTPPASPPPSVLISKNEVGIFTTPNFDETSSATTISTSEDGSYGTDVTRCICGFTHDDGYMICCDKCSVWQHIDCMGIDRQHIPDTYLCERCQPRNLDKERAVLLQRRKRENMSDGDTSATESGDEVPVELYTAFQHTPTSITLTASRVSKVNDKRRKKSGEKEQHISKCKKAFREGSRKSSRVKGSAPEIDPSSDGSNFGWETKIKAWMDRYEEANNNQYSEGVQREAQRIALRLGNGNDKKEMNKSDLNTNNLLFKPPVESHIQKNKKILKSAKDLPPDALIIEYRGKFMLREQFEANGYFFKRPYPFVLFYSKFHGLEMCVDARTFGNEARFIRRSCTPNAEVRHEIQDGTIHLYIYSIHSIPKGTEITIAFDFDYGNCSAKPIFSRMSTKQIE

SEQ ID NO: 281 - protein, 548 aa, Homo sapiens
MAKFMTPVIQDNPSGWGPCAVPEQFRDMPYQPFSKGDRLGKVADWTGATYQDKRYTNKYSSQFGGGSQYAYFHEEDESSFQLVDTARTQKTAYQRNRMRFAQRNLRRDKDRRNMLQFNLQILPKSAKQKERERIRLQKKFQKQFGVRQKWDQKSQKPRDSSVEVRSDWEVKEEMDFPQLMKMRYLEVSEPQDIECCGALEYYDKAFDRITTRSEKPLRSIKRIFHTVTTTDDPVIRKLAKTQGNVFATDAILATLMSCTRSVYSWDIVVQRVGSKLFFDKRDNSDFDLLTVSETANEPPQDEGNSFNSPRNLAMEATYINHNFSQQCLRMGKERYNFPNPNPFVEDDMDKNEIASVAYRYRRWKLGDDIDLIVRCEHDGVMTGANGEVSFINIKTLNEWDSRHCNGVDWRQKLDSQRGAVIATELKNNSYKLARWTCCALLAGSEYLKLGYVSRYHVKDSSRHVILGTQQFKPNEFASQINLSVENAWGILRCVIDICMKLEEGKYLILKDPNKQVIRVYSLPDGTFSSDEDEEEEEEEEEEEEEEET

SEQ ID NO: 282 - protein, 350 aa, Homo sapiens
MYSPLCLTQDEFHPFIEALLPHVRAFAYTWFNLQARKRKYFKKHEKRMSKEEERAVKDELLSEKPEVKQKWASRLLAKLRKDIRPEYREDFVLTVTGKKPPCCVLSNPDQKGKMRRIDCLRQADKVWRLDLVMVILFKGIPLESTDGERLVKSPQCSNPGLCVQPHHIGVSVKELDLYLAYFVHAAPSIMNTWKDENYLYDTNYGSTVDLLDSKTFCRAQISMTTTSHLPVAESPDMKKEQDPPAKCHTKKHNPRGTHLWEFIRDILLNPDKNPGLIKWEDRSEGVFRFLKSEAVAQLWGKKKNNSSMTYEKLSRAMRYYYKREILERVDGRRLVYKFGKNARGWRENEN

SEQ ID NO: 283 - protein, 342 aa, Homo sapiens
MDEFHPFIEALLPHVRAFAYTWFNLQARKRKYFKKHEKRMSKEEERAVKDELLSEKPEVKQKWASRLLAKLRKDIRPEYREDFVLTVTGKKPPCCVLSNPDQKGKMRRIDCLRQADKVWRLDLVMVILFKGIPLESTDGERLVKSPQCSNPGLCVQPHHIGVSVKELDLYLAYFVHAAPSIMNTWKDENYLYDTNYGSTVDLLDSKTFCRAQISMTTTSHLPVAESPDMKKEQDPPAKCHTKKHNPRGTHLWEFIRDILLNPDKNPGLIKWEDRSEGVFRFLKSEAVAQLWGKKKNNSSMTYEKLSRAMRYYYKREILERVDGRRLVYKFGKNARGWRENEN

SEQ ID NO: 284 - protein, 395 aa, Homo sapiens
MQMCRPASSSVLYVPTRWPGGCGATWQSCPSPPPRRTRIPQRPAVMYSPLCLTQDEFHPFIEALLPHVRAFAYTWFNLQARKRKYFKKHEKRMSKEEERAVKDELLSEKPEVKQKWASRLLAKLRKDIRPEYREDFVLTVTGKKPPCCVLSNPDQKGKMRRIDCLRQADKVWRLDLVMVILFKGIPLESTDGERLVKSPQCSNPGLCVQPHHIGVSVKELDLYLAYFVHAAPSIMNTWKDENYLYDTNYGSTVDLLDSKTFCRAQISMTTTSHLPVAESPDMKKEQDPPAKCHTKKHNPRGTHLWEFIRDILLNPDKNPGLIKWEDRSEGVFRFLKSEAVAQLWGKKKNNSSMTYEKLSRAMRYYYKREILERVDGRRLVYKFGKNARGWRENEN

SEQ ID NO: 285 - protein, 720 aa, Homo sapiens
MDVKERKPYRSLTRRRDAERRYTSSSADSEEGKAPQKSYSSSETLKAYDQDARLAYGSRVKDIVPQEAEEFCRTGANFTLRELGLEEVTPPHGTLYRTDIGLPHCGYSMGAGSDADMEADTVLSPEHPVRLWGRSTRSGRSSCLSSRANSNLTLTDTEHENTETDHPGGLQNHARLRTPPPPLSHAHTPNQHHAASINSLNRGNFTPRSNPSPAPTDHSLSGEPPAGGAQEPAHAQENWLLNSNIPLETRNLGKQPFLGTLQDNLIEMDILGASRHDGAYSDGHFLFKPGGTSPLFCTTSPGYPLTSSTVYSPPPRPLPRSTFARPAFNLKKPSKYCNWKCAALSAIVISATLVILLAYFVAMHLFGLNWHLQPMEGQMYEITEDTASSWPVPTDVSLYPSGGTGLETPDRKGKGTTEGKPSSFFPEDSFIDSGEIDVGRRASQKIPPGTFWRSQVFIDHPVHLKFNVSLGKAALVGIYGRKGLPPSHTQFDFVELLDGRRLLTQEARSLEGTPRQSRGTVPPSSHETGFIQYLDSGIWHLAFYNDGKESEVVSFLTTAILPPRLKEMKSQESAAGSKLVLRCETSSEYSSLRFKWFKNGNELNRKNKPQNIKIQKKPGKSELRINKASLADSGEYMCKVISKLGNDSASANITIVESNEIITGMPASTEGAYVSSATSTSTTGTSHLVKCAEKEKTFCVNGGECFMVKDLSNPSRYLCK

SEQ ID NO: 286 - protein, 985 aa, Homo sapiens
MDVKERKPYRSLTRRRDAERRYTSSSADSEEGKAPQKSYSSSETLKAYDQDARLAYGSRVKDIVPQEAEEFCRTGANFTLRELGLEEVTPPHGTLYRTDIGLPHCGYSMGAGSDADMEADTVLSPEHPVRLWGRSTRSGRSSCLSSRANSNLTLTDTEHENTETDHPGGLQNHARLRTPPPPLSHAHTPNQHHAASINSLNRGNFTPRSNPSPAPTDHSLSGEPPAGGAQEPAHAQENWLLNSNIPLETRNLGKQPFLGTLQDNLIEMDILGASRHDGAYSDGHFLFKPGGTSPLFCTTSPGYPLTSSTVYSPPPRPLPRSTFARPAFNLKKPSKYCNWKCAALSAIVISATLVILLAYFVAMHLFGLNWHLQPMEGQMYEITEDTASSWPVPTDVSLYPSGGTGLETPDRKGKGTTEGKPSSFFPEDSFIDSGEIDVGRRASQKIPPGTFWRSQVFIDHPVHLKFNVSLGKAALVGIYGRKGLPPSHTQFDFVELLDGRRLLTQEARSLEGTPRQSRGTVPPSSHETGFIQYLDSGIWHLAFYNDGKESEVVSFLTTAILPPRLKEMKSQESAAGSKLVLRCETSSEYSSLRFKWFKNGNELNRKNKPQNIKIQKKPGKSELRINKASLADSGEYMCKVISKLGNDSASANITIVESNEIITGMPASTEGAYVSSESPIRISVSTEGANTSSSTSTSTTGTSHLVKCAEKEKTFCVNGGECFMVKDLSNPSRYLCKCPNEFTGDRCQNYVMASFYKAEELYQKRVLTITGICIALLVVGIMCVVAYCKTKKQRKKLHDRLRQSLRSERNNMMNIANGPHHPNPPPENVQLVNQYVSKNVISSEHIVEREAETSFSTSHYTSTAHHSTTVTQTPSHSWSNGHTESILSESHSVIVMSSVENSRHSSPTGGPRGRLNGTGGPRECNSFLRHARETPDSYRDSPHSERHNLIAELRRNKAHRSKCMQIQLSATHLRSSSIPHLGFIL

SEQ ID NO: 287 - protein, 733 aa, Homo sapiens
MDVKERKPYRSLTRRRDAERRYTSSSADSEEGKAPQKSYSSSETLKAYDQDARLAYGSRVKDIVPQEAEEFCRTGANFTLRELGLEEVTPPHGTLYRTDIGLPHCGYSMGAGSDADMEADTVLSPEHPVRLWGRSTRSGRSSCLSSRANSNLTLTDTEHENTETDHPGGLQNHARLRTPPPPLSHAHTPNQHHAASINSLNRGNFTPRSNPSPAPTDHSLSGEPPAGGAQEPAHAQENWLLNSNIPLETRNLGKQPFLGTLQDNLIEMDILGASRHDGAYSDGHFLFKPGGTSPLFCTTSPGYPLTSSTVYSPPPRPLPRSTFARPAFNLKKPSKYCNWKCAALSAIVISATLVILLAYFVAMHLFGLNWHLQPMEGQMYEITEDTASSWPVPTDVSLYPSGGTGLETPDRKGKGTTEGKPSSFFPEDSFIDSGEIDVGRRASQKIPPGTFWRSQVFIDHPVHLKFNVSLGKAALVGIYGRKGLPPSHTQFDFVELLDGRRLLTQEARSLEGTPRQSRGTVPPSSHETGFIQYLDSGIWHLAFYNDGKESEVVSFLTTAILPPRLKEMKSQESAAGSKLVLRCETSSEYSSLRFKWFKNGNELNRKNKPQNIKIQKKPGKSELRINKASLADSGEYMCKVISKLGNDSASANITIVESNATSTSTTGTSHLVKCAEKEKTFCVNGGECFMVKDLSNPSRYLCKCPNEFTGDRCQNYVMASFYSTSTPFLSLPE

SEQ ID NO: 288 - protein, 703 aa, Homo sapiens
MDVKERKPYRSLTRRRDAERRYTSSSADSEEGKAPQKSYSSSETLKAYDQDARLAYGSRVKDIVPQEAEEFCRTGANFTLRELGLEEVTPPHGTLYRTDIGLPHCGYSMGAGSDADMEADTVLSPEHPVRLWGRSTRSGRSSCLSSRANSNLTLTDTEHENTETDHPGGLQNHARLRTPPPPLSHAHTPNQHHAASINSLNRGNFTPRSNPSPAPTDHSLSGEPPAGGAQEPAHAQENWLLNSNIPLETRNLGKQPFLGTLQDNLIEMDILGASRHDGAYSDGHFLFKPGGTSPLFCTTSPGYPLTSSTVYSPPPRPLPRSTFARPAFNLKKPSKYCNWKCAALSAIVISATLVILLAYFVAMHLFGLNWHLQPMEGQMYEITEDTASSWPVPTDVSLYPSGGTGLETPDRKGKGTTEGKPSSFFPEDSFIDSGEIDVGRRASQKIPPGTFWRSQVFIDHPVHLKFNVSLGKAALVGIYGRKGLPPSHTQFDFVELLDGRRLLTQEARSLEGTPRQSRGTVPPSSHETGFIQYLDSGIWHLAFYNDGKESEVVSFLTTAILPPRLKEMKSQESAAGSKLVLRCETSSEYSSLRFKWFKNGNELNRKNKPQNIKIQKKPGKSELRINKASLADSGEYMCKVISKLGNDSASANITIVESNATSTSTTGTSHLVKCAEKEKTFCVNGGECFMVKDLSNPSRYLCK

SEQ ID NO: 289 - protein, 946 aa, Homo sapiens
MDVKERKPYRSLTRRRDAERRYTSSSADSEEGKAPQKSYSSSETLKAYDQDARLAYGSRVKDIVPQEAEEFCRTGANFTLRELGLEEVTPPHGTLYRTDIGLPHCGYSMGAGSDADMEADTVLSPEHPVRLWGRSTRSGRSSCLSSRANSNLTLTDTEHENTETDHPGGLQNHARLRTPPPPLSHAHTPNQHHAASINSLNRGNFTPRSNPSPAPTDHSLSGEPPAGGAQEPAHAQENWLLNSNIPLETRNLGKQPFLGTLQDNLIEMDILGASRHDGAYSDGHFLFKPGGTSPLFCTTSPGYPLTSSTVYSPPPRPLPRSTFARPAFNLKKPSKYCNWKCAALSAIVISATLVILLAYFVAMHLFGLNWHLQPMEGQMYEITEDTASSWPVPTDVSLYPSGGTGLETPDRKGKGTTEGKPSSFFPEDSFIDSGEIDVGRRASQKIPPGTFWRSQVFIDHPVHLKFNVSLGKAALVGIYGRKGLPPSHTQFDFVELLDGRRLLTQEARSLEGTPRQSRGTVPPSSHETGFIQYLDSGIWHLAFYNDGKESEVVSFLTTAILPPRLKEMKSQESAAGSKLVLRCETSSEYSSLRFKWFKNGNELNRKNKPQNIKIQKKPGKSELRINKASLADSGEYMCKVISKLGNDSASANITIVESNEIITGMPASTEGAYVSSESPIRISVSTEGANTSSSTSTSTTGTSHLVKCAEKEKTFCVNGGECFMVKDLSNPSRYLCKCPNEFTGDRCQNYVMASFYKAEELYQKRVLTITGICIALLVVGIMCVVAYCKTKKQRKKLHDRLRQSLRSERNNMMNIANGPHHPNPPPENVQLVNQYVSKNVISSEHIVEREAETSFSTSHYTSTAHHSTTVTQTPSHSWSNGHTESILSESHSVIVMSSVENSRHSSPTGGPRGRLNGTGGPRECNSFLRHARETPDSYRDSPHSER

SEQ ID NO: 290 - protein, 737 aa, Homo sapiens
MDVKERKPYRSLTRRRDAERRYTSSSADSEEGKAPQKSYSSSETLKAYDQDARLAYGSRVKDIVPQEAEEFCRTGANFTLRELGLEEVTPPHGTLYRTDIGLPHCGYSMGAGSDADMEADTVLSPEHPVRLWGRSTRSGRSSCLSSRANSNLTLTDTEHENTETDHPGGLQNHARLRTPPPPLSHAHTPNQHHAASINSLNRGNFTPRSNPSPAPTDHSLSGEPPAGGAQEPAHAQENWLLNSNIPLETRNLGKQPFLGTLQDNLIEMDILGASRHDGAYSDGHFLFKPGGTSPLFCTTSPGYPLTSSTVYSPPPRPLPRSTFARPAFNLKKPSKYCNWKCAALSAIVISATLVILLAYFVAMHLFGLNWHLQPMEGQMYEITEDTASSWPVPTDVSLYPSGGTGLETPDRKGKGTTEGKPSSFFPEDSFIDSGEIDVGRRASQKIPPGTFWRSQVFIDHPVHLKFNVSLGKAALVGIYGRKGLPPSHTQFDFVELLDGRRLLTQEARSLEGTPRQSRGTVPPSSHETGFIQYLDSGIWHLAFYNDGKESEVVSFLTTAILPPRLKEMKSQESAAGSKLVLRCETSSEYSSLRFKWFKNGNELNRKNKPQNIKIQKKPGKSELRINKASLADSGEYMCKVISKLGNDSASANITIVESNEIITGMPASTEGAYVSSESPIRISVSTEGANTSSSTSTSTTGTSHLVKCAEKEKTFCVNGGECFMVKDLSNPSRYLCK

SEQ ID NO: 291 - protein, 1171 aa, Homo sapiens
MDVKERKPYRSLTRRRDAERRYTSSSADSEEGKAPQKSYSSSETLKAYDQDARLAYGSRVKDIVPQEAEEFCRTGANFTLRELGLEEVTPPHGTLYRTDIGLPHCGYSMGAGSDADMEADTVLSPEHPVRLWGRSTRSGRSSCLSSRANSNLTLTDTEHENTETDHPGGLQNHARLRTPPPPLSHAHTPNQHHAASINSLNRGNFTPRSNPSPAPTDHSLSGEPPAGGAQEPAHAQENWLLNSNIPLETRNLGKQPFLGTLQDNLIEMDILGASRHDGAYSDGHFLFKPGGTSPLFCTTSPGYPLTSSTVYSPPPRPLPRSTFARPAFNLKKPSKYCNWKCAALSAIVISATLVILLAYFVAMHLFGLNWHLQPMEGQMYEITEDTASSWPVPTDVSLYPSGGTGLETPDRKGKGTTEGKPSSFFPEDSFIDSGEIDVGRRASQKIPPGTFWRSQVFIDHPVHLKFNVSLGKAALVGIYGRKGLPPSHTQFDFVELLDGRRLLTQEARSLEGTPRQSRGTVPPSSHETGFIQYLDSGIWHLAFYNDGKESEVVSFLTTAILPPRLKEMKSQESAAGSKLVLRCETSSEYSSLRFKWFKNGNELNRKNKPQNIKIQKKPGKSELRINKASLADSGEYMCKVISKLGNDSASANITIVESNEIITGMPASTEGAYVSSESPIRISVSTEGANTSSSTSTSTTGTSHLVKCAEKEKTFCVNGGECFMVKDLSNPSRYLCKCPNEFTGDRCQNYVMASFYKHLGIEFMEAEELYQKRVLTITGICIALLVVGIMCVVAYCKTKKQRKKLHDRLRQSLRSERNNMMNIANGPHHPNPPPENVQLVNQYVSKNVISSEHIVEREAETSFSTSHYTSTAHHSTTVTQTPSHSWSNGHTESILSESHSVIVMSSVENSRHSSPTGGPRGRLNGTGGPRECNSFLRHARETPDSYRDSPHSERYVSAMTTPARMSPVDFHTPSSPKSPPSEMSPPVSSMTVSMPSMAVSPFMEEERPLLLVTPPRLREKKFDHHPQQFSSFHHNPAHDSNSLPASPLRIVEDEEYETTQEYEPAQEPVKKLANSRRAKRTKPNGHIANRLEVDSNTSSQSSNSESETEDERVGEDTPFLGIQNPLAASLEATPAFRLADSRTNPAGRFSTQEEIQARLSSVIANQDPIAV

SEQ ID NO: 292 - protein, 1163 aa, Homo sapiens
MDVKERKPYRSLTRRRDAERRYTSSSADSEEGKAPQKSYSSSETLKAYDQDARLAYGSRVKDIVPQEAEEFCRTGANFTLRELGLEEVTPPHGTLYRTDIGLPHCGYSMGAGSDADMEADTVLSPEHPVRLWGRSTRSGRSSCLSSRANSNLTLTDTEHENTETDHPGGLQNHARLRTPPPPLSHAHTPNQHHAASINSLNRGNFTPRSNPSPAPTDHSLSGEPPAGGAQEPAHAQENWLLNSNIPLETRNLGKQPFLGTLQDNLIEMDILGASRHDGAYSDGHFLFKPGGTSPLFCTTSPGYPLTSSTVYSPPPRPLPRSTFARPAFNLKKPSKYCNWKCAALSAIVISATLVILLAYFVAMHLFGLNWHLQPMEGQMYEITEDTASSWPVPTDVSLYPSGGTGLETPDRKGKGTTEGKPSSFFPEDSFIDSGEIDVGRRASQKIPPGTFWRSQVFIDHPVHLKFNVSLGKAALVGIYGRKGLPPSHTQFDFVELLDGRRLLTQEARSLEGTPRQSRGTVPPSSHETGFIQYLDSGIWHLAFYNDGKESEVVSFLTTAILPPRLKEMKSQESAAGSKLVLRCETSSEYSSLRFKWFKNGNELNRKNKPQNIKIQKKPGKSELRINKASLADSGEYMCKVISKLGNDSASANITIVESNEIITGMPASTEGAYVSSESPIRISVSTEGANTSSSTSTSTTGTSHLVKCAEKEKTFCVNGGECFMVKDLSNPSRYLCKCPNEFTGDRCQNYVMASFYKAEELYQKRVLTITGICIALLVVGIMCVVAYCKTKKQRKKLHDRLRQSLRSERNNMMNIANGPHHPNPPPENVQLVNQYVSKNVISSEHIVEREAETSFSTSHYTSTAHHSTTVTQTPSHSWSNGHTESILSESHSVIVMSSVENSRHSSPTGGPRGRLNGTGGPRECNSFLRHARETPDSYRDSPHSERYVSAMTTPARMSPVDFHTPSSPKSPPSEMSPPVSSMTVSMPSMAVSPFMEEERPLLLVTPPRLREKKFDHHPQQFSSFHHNPAHDSNSLPASPLRIVEDEEYETTQEYEPAQEPVKKLANSRRAKRTKPNGHIANRLEVDSNTSSQSSNSESETEDERVGEDTPFLGIQNPLAASLEATPAFRLADSRTNPAGRFSTQEEIQARLSSVIANQDPIAV

SEQ ID NO: 293 - protein, 767 aa, Homo sapiens
MDVKERKPYRSLTRRRDAERRYTSSSADSEEGKAPQKSYSSSETLKAYDQDARLAYGSRVKDIVPQEAEEFCRTGANFTLRELGLEEVTPPHGTLYRTDIGLPHCGYSMGAGSDADMEADTVLSPEHPVRLWGRSTRSGRSSCLSSRANSNLTLTDTEHENTETDHPGGLQNHARLRTPPPPLSHAHTPNQHHAASINSLNRGNFTPRSNPSPAPTDHSLSGEPPAGGAQEPAHAQENWLLNSNIPLETRNLGKQPFLGTLQDNLIEMDILGASRHDGAYSDGHFLFKPGGTSPLFCTTSPGYPLTSSTVYSPPPRPLPRSTFARPAFNLKKPSKYCNWKCAALSAIVISATLVILLAYFVAMHLFGLNWHLQPMEGQMYEITEDTASSWPVPTDVSLYPSGGTGLETPDRKGKGTTEGKPSSFFPEDSFIDSGEIDVGRRASQKIPPGTFWRSQVFIDHPVHLKFNVSLGKAALVGIYGRKGLPPSHTQFDFVELLDGRRLLTQEARSLEGTPRQSRGTVPPSSHETGFIQYLDSGIWHLAFYNDGKESEVVSFLTTAILPPRLKEMKSQESAAGSKLVLRCETSSEYSSLRFKWFKNGNELNRKNKPQNIKIQKKPGKSELRINKASLADSGEYMCKVISKLGNDSASANITIVESNEIITGMPASTEGAYVSSESPIRISVSTEGANTSSSTSTSTTGTSHLVKCAEKEKTFCVNGGECFMVKDLSNPSRYLCKCPNEFTGDRCQNYVMASFYSTSTPFLSLPE

SEQ ID NO: 294 - protein, 988 aa, Homo sapiens
MDVKERKPYRSLTRRRDAERRYTSSSADSEEGKAPQKSYSSSETLKAYDQDARLAYGSRVKDIVPQEAEEFCRTGANFTLRELGLEEVTPPHGTLYRTDIGLPHCGYSMGAGSDADMEADTVLSPEHPVRLWGRSTRSGRSSCLSSRANSNLTLTDTEHENTETDHPGGLQNHARLRTPPPPLSHAHTPNQHHAASINSLNRGNFTPRSNPSPAPTDHSLSGEPPAGGAQEPAHAQENWLLNSNIPLETRNLGKQPFLGTLQDNLIEMDILGASRHDGAYSDGHFLFKPGGTSPLFCTTSPGYPLTSSTVYSPPPRPLPRSTFARPAFNLKKPSKYCNWKCAALSAIVISATLVILLAYFVAMHLFGLNWHLQPMEGQMYEITEDTASSWPVPTDVSLYPSGGTGLETPDRKGKGTTEGKPSSFFPEDSFIDSGEIDVGRRASQKIPPGTFWRSQVFIDHPVHLKFNVSLGKAALVGIYGRKGLPPSHTQFDFVELLDGRRLLTQEARSLEGTPRQSRGTVPPSSHETGFIQYLDSGIWHLAFYNDGKESEVVSFLTTAILPPRLKEMKSQESAAGSKLVLRCETSSEYSSLRFKWFKNGNELNRKNKPQNIKIQKKPGKSELRINKASLADSGEYMCKVISKLGNDSASANITIVESNEIITGMPASTEGAYVSSESPIRISVSTEGANTSSSTSTSTTGTSHLVKCAEKEKTFCVNGGECFMVKDLSNPSRYLCKCQPGFTGARCTENVPMKVQNQEKAEELYQKRVLTITGICIALLVVGIMCVVAYCKTKKQRKKLHDRLRQSLRSERNNMMNIANGPHHPNPPPENVQLVNQYVSKNVISSEHIVEREAETSFSTSHYTSTAHHSTTVTQTPSHSWSNGHTESILSESHSVIVMSSVENSRHSSPTGGPRGRLNGTGGPRECNSFLRHARETPDSYRDSPHSERHNLIAELRRNKAHRSKCMQIQLSATHLRSSSIPHLGFIL

SEQ ID NO: 295 - protein, 733 aa, Homo sapiens; identical to SEQ ID NO: 287

SEQ ID NO: 296 - protein, 1166 aa, Homo sapiens
MDVKERKPYRSLTRRRDAERRYTSSSADSEEGKAPQKSYSSSETLKAYDQDARLAYGSRVKDIVPQEAEEFCRTGANFTLRELGLEEVTPPHGTLYRTDIGLPHCGYSMGAGSDADMEADTVLSPEHPVRLWGRSTRSGRSSCLSSRANSNLTLTDTEHENTETDHPGGLQNHARLRTPPPPLSHAHTPNQHHAASINSLNRGNFTPRSNPSPAPTDHSLSGEPPAGGAQEPAHAQENWLLNSNIPLETRNLGKQPFLGTLQDNLIEMDILGASRHDGAYSDGHFLFKPGGTSPLFCTTSPGYPLTSSTVYSPPPRPLPRSTFARPAFNLKKPSKYCNWKCAALSAIVISATLVILLAYFVAMHLFGLNWHLQPMEGQMYEITEDTASSWPVPTDVSLYPSGGTGLETPDRKGKGTTEGKPSSFFPEDSFIDSGEIDVGRRASQKIPPGTFWRSQVFIDHPVHLKFNVSLGKAALVGIYGRKGLPPSHTQFDFVELLDGRRLLTQEARSLEGTPRQSRGTVPPSSHETGFIQYLDSGIWHLAFYNDGKESEVVSFLTTAILPPRLKEMKSQESAAGSKLVLRCETSSEYSSLRFKWFKNGNELNRKNKPQNIKIQKKPGKSELRINKASLADSGEYMCKVISKLGNDSASANITIVESNEIITGMPASTEGAYVSSESPIRISVSTEGANTSSSTSTSTTGTSHLVKCAEKEKTFCVNGGECFMVKDLSNPSRYLCKCQPGFTGARCTENVPMKVQNQEKAEELYQKRVLTITGICIALLVVGIMCVVAYCKTKKQRKKLHDRLRQSLRSERNNMMNIANGPHHPNPPPENVQLVNQYVSKNVISSEHIVEREAETSFSTSHYTSTAHHSTTVTQTPSHSWSNGHTESILSESHSVIVMSSVENSRHSSPTGGPRGRLNGTGGPRECNSFLRHARETPDSYRDSPHSERYVSAMTTPARMSPVDFHTPSSPKSPPSEMSPPVSSMTVSMPSMAVSPFMEEERPLLLVTPPRLREKKFDHHPQQFSSFHHNPAHDSNSLPASPLRIVEDEEYETTQEYEPAQEPVKKLANSRRAKRTKPNGHIANRLEVDSNTSSQSSNSESETEDERVGEDTPFLGIQNPLAASLEATPAFRLADSRTNPAGRFSTQEEIQARLSSVIANQDPIAV

SEQ ID NO: 297 - protein, 289 aa, Homo sapiens
MSKKPPNRPGITFEIGARLEALDYLQKWYPSRIEKIDYEEGKMLVHFERWSHRYDEWIYWDSNRLRPLERPALRKEGLKDEEDFFDFKAGEEVLARWTDCRYYPAKIEAINKEGTFTVQFYDGVIRCLKRMHIKAMPEDAKGQVKSQHPLSWCCPIDPAGSCNQSMGSEDWIALVKAAAAAAAKNKTGSKPRTSANSNKDKDKDERKWFKVPSKKEETSTCIATPDVEKKEDLPTSSETFGLHVENVPKMVFPQPESTLSNKRKNNQGNSFQAKRARLNKITCSSEGSP

SEQ ID NO: 298 - protein, 263 aa, Homo sapiens
MSKKPPNRPGITFEIGARLEALDYLQKWYPSRIEKIDYEEGKMLVHFERWSHRYDEWIYWDSNRLRPLERPALRKEGLKDEEDFFDFKAGEEVLARWTDCRYYPAKIEAINKEGTFTVQFYDGVIRCLKRMHIKAMPEDAKGQDWIALVKAAAAAAAKNKTGSKPRTSANSNKDKDKDERKWFKVPSKKEETSTCIATPDVEKKEDLPTSSETFGLHVENVPKMVFPQPESTLSNKRKNNQGNSFQAKRARLNKITCSSEGSP

SEQ ID NO: 299 - protein, 280 aa, Homo sapiens
MSSNCTSTTAVAVAPLSASKTKTKKKHFVCQKVKLFRASEPILSVLMWGVNHTINELSNVPVPVMLMPDDFKAYSKIKVDNHLFNKENLPSRFKFKEYCPMVFRNLRERFGIDDQDYQNSVTRSAPINSDSQGRCGTRFLTTYDRRFVIKTVSSEDVAEMHNILKKYHQFIVECHGNTLLPQFLGMYRLTVDGVETYMVVTRNVFSHRLTVHRKYDLKGSTVAREASDKEKAKDLPTFKDNDFLNEGQKLHVGEESKKNFLEKLKRDVEGKVGDMLLQYG

SEQ ID NO: 300 - protein, 83 aa, Homo sapiens
MAACTARRPLAVGSRWWSRSLTGARWQSRSVRRPELEPSRQRRPRRRGGTSRPETDQRAKCWRQLVCLRCQNRMENMRPGRLN

SEQ ID NO: 301 - protein, 242 aa, Homo sapiens
MAELEHLGGKRAESARMRRAEQLRRWRGSLTEQEPAERRGAGRQPLTRRGSPRVRFEDGAVFLAACSSGDTDEVRKLLARGADINTVNVDGLTALHQAVDDVKKGYIKAEEKSYQLQKLYEQRKMVMYLNMLRTCEGYNEIIFPHCACDSRRKGHVITAISITHFKLHACTEEGQLENQVIAFEWDEMQRWDTDEEGMAFCFEYARGEKKPRWVKIFTPYFNYMHECFERVFCELKWRKEEY

SEQ ID NO: 302 - protein, 401 aa, Homo sapiens
MALSKRELDELKPWIEKTVKRVLGFSEPTVVTAALNCVGKGMDKKKAADHLKPFLDDSTLRFVDKLFEAVEEGRSSRHSKSSSDRSRKRELKEVFGDDSEISKESSGVKKRRIPRFEEVEEEPEVIPGPPSESPGMLTKLQIKQMMEAATRQIEERKKQLSFISPPTPQPKTPSSSQPERLPIGNTIQPSQAATFMNDAIEKARKAAELQARIQAQLALKPGLIGNANMVGLANLHAMGIAPPKVELKDQTKPTPLILDEQGRTVDATGKEIELTHRMPTLKANIRAVKREQFKQQLKEKPSEDMESNTFFDPRVSIAPSQRQRRTFKFHDKGKFEKIAQRLRTKAQLEKLQAEISQAARKTGIHTSTRLALIAPKKELKEGDIPEIEWWDSYIIPNGFDL

SEQ ID NO: 303 - protein, 1130 aa, Homo sapiens
MSVACVLKRKAVLWQDSFSPHLKHHPQEPANPNMPVVLTSGTGSQAQPQPAANQALAAGTHSSPVPGSIGVAGRSQDDAMVDYFFQRQHGEQLGGGGSGGGGYNNSKHRWPTGDNIHAEHQVRSMDELNHDFQALALEGRAMGEQLLPGKKFWETDESSKDGPKGIFLGDQWRDSAWGTSDHSVSQPIMVQRRPGQSFHVNSEVNSVLSPRSESGGLGVSMVEYVLSSSPGDSCLRKGGFGPRDADSDENDKGEKKNKGTFDGDKLGDLKEEGDVMDKTNGLPVQNGIDADVKDFSRTPGNCQNSANEVDLLGPNQNGSEGLAQLTSTNGAKPVEDFSNMESQSVPLDPMEHVGMEPLQFDYSGTQVPVDSAAATVGLFDYNSQQQLFQRPNALAVQQLTAAQQQQYALAAAHQPHIGLAPAAFVPNPYIISAAPPGTDPYTAGLAAAATLGPAVVPHQYYGVTPWGVYPASLFQQQAAAAAAATNSANQQTTPQAQQGQQQVLRGGASQRPLTPNQNQQGQQTDPLVAAAAVNSALAFGQGLAAGMPGYPVLAPAAYYDQTGALVVNAGARNGLGAPVRLVAPAPVIISSSAAQAAVAAAAASANGAAGGLAGTTNGPFRPLGTQQPQPQPQQQPNNNLASSSFYGNNSLNSNSQSSSLFSQGSAQPANTSLGFGSSSSLGATLGSALGGFGTAVANSNTGSGSRRDSLTGSSDLYKRTSSSLTPIGHSFYNGLSFSSSPGPVGMPLPSQGPGHSQTPPPSLSSHGSSSSLNLGGLTNGSGRYISAAPGAEAKYRSASSASSLFSPSSTLFSSSRLRYGMSDVMPSGRSRLLEDFRNNRYPNLQLREIAGHIMEFSQDQHGSRFIQLKLERATPAERQLVFNEILQAAYQLMVDVFGNYVIQKFFEFGSLEQKLALAERIRGHVLSLALQMYGCRVIQKALEFIPSDQQVINEMVRELDGHVLKCVKDQNGNHVVQKCIECVQPQSLQFIIDAFKGQVFALSTHPYGCRVIQRILEHCLPDQTLPILEELHQHTEQLVQDQYGNYVIQHVLEHGRPEDKSKIVAEIRGNVLVLSQHKFARCERRLLTTVLCGLYLSQGEDVKPPALHMSGTGQQEHLAPATFTDMSAVE

SEQ ID NO: 304 - protein, 63 aa, Homo sapiens
MALRELKVCLLGDTGVGKSSIVWRFVEDSFDPNINPTIGLLEMPRQPTTTTPAGLGNSSKSAT

SEQ ID NO: 305 - protein, 83 aa, Homo sapiens
TSARGGGGGGSGSGPGVLAIKPEAAAAAELAAWRARESSLEPELGPSRFCPPFSLLLGGSPRDAPGPEPPAQRPRVMTDLMLY

SEQ ID NO: 306 - protein, 596 aa, Homo sapiens
MGSQEVLGHAARLASSGLLLQVLFRLITFVLNAFILRFLSKEIVGVVNVRLTLLYSTTLFLAREAFRRACLSGGTQRDWSQTLNLLWLTVPLGVFWSLFLGWIWLQLLEVPDPNVVPHYATGVVLFGLSAVVELLGEPFWVLAQAHMFVKLKVIAESLSVILKSVLTAFLVLWLPHWGLYIFSLAQLFYTTVLVLCYVIYFTKLLGSPESTKLQTLPVSRITDLLPNITRNGAFINWKEAKLTWSFFKQSFLKQILTEGERYVMTFLNVLNFGDQGVYDIVNNLGSLVARLIFQPIEESFYIFFAKVLERGKDATLQKQEDVAVAAAVLESLLKLALLAGLTITVFGFAYSQLALDIYGGTMLSSGSVSHPVLKQVAEQFLNMRGGLGLSGAKANYRGGEIREQNGDSLVHAAFVAESAVAGSAEANAFSVLQHVLGAGPHVKRGSNTTSHLHQAVAKATQQPFDVSAFNASYSDSGLFGIYTISQATAAGDVIKAAYNQVKTIAQGNLSNTDVQAAKNKLKAGYLMSVESSECFLEEVGSQALVAGSYMPPSTVLQQIDSVANADIINAAKKFVSGQKSMAASGNLGHTPFVDEL

SEQ ID NO: 307 - protein, 226 aa, Homo sapiens
MSAPVGPRGRLAPIPAASQPPLQPEMPDLSHLTEEERKIILAVMDRQKKEEEKEQSVLVLSEDQDSYLCNVTLFRKAVDDFRHKARENKFIVRDFQYNEEEMKADKEEMNRLSTDKKKQFGPLVRWLKVNFSEAFIAWIHVKALRVFVESVLRYGLPVNFQAMLLQPNKKTLKKLREVLHELYKHLDSSAAAIIDAPMDIPGLNLSQQEYYPYVYYKIDCNLLEFK

SEQ ID NO: 308 - protein, 166 aa, Homo sapiens
LALPAGPAEAACALCQRAPREPVRADCGHRFCRACVVRFWAEEDGPFPCPECADDCWQRAVEPGRPPLSRRLLALEEAAAAPARDGPASEAALQLLCRADAGPLCAACRMAAGPEPPEWEPRWRKALRGKENKGSVEIMRKDLNDARDLHGQAESAAAVWKSHHGS

SEQ ID NO: 309 - protein, 195 aa, Homo sapiens
MRRRRRRDGFYPAPDFRDREAEDMAGVFDIDLDQPEDAGSEDELEEGGQLNESMDHGGVGPYELGMEHCEKFEISETSVNRGPEKIRPECFELLRVLGKGGYGKVFQVRKVTGANTGKIFAMKVLKKAMIVRNAKDTAHTKAERNILEEVKHPFIVDLIYAFQTGGKLYLILEYLSGGELFMQLEREGIFMEDTA

SEQ ID NO: 310 - protein, 287 aa, Homo sapiens
MRRRRRRDGFYPAPDFRDREAEDMAGVFDIDLDQPEDAGSEDELEEGAKYKERGTVLAEDQLAQMSKQLDMFKTNLEEFASKHKQEIRKNPEFRVQFQDMCATIGVDPLASGKGFWSEMLGVGDFYYELGVQIIEVCLALKHRNGGLITLEELHQQVLKGRGKFAQDVSQDDLIRAIKKLKALGTGFGIIPVGGTYLIQSVPAELNMDHTVVLQLAEKNGYVTVSEIKASLKWETERARQVLEHLLKEGLAWLDLQAPGEAHYWLPALFTDLYSQEITAEEAREALP

SEQ ID NO: 311 - protein, 26 aa, Homo sapiens
MVLLTMIARVADGLPLAASMQEDEQL

SEQ ID NO: 312 - protein, 826 aa, Homo sapiens
MARLPAGIRFIISFSRDQWYRAFIFILTFLLYASFHLSRKPISIVKGELHKYCTAWDEADVRFSSQNRKSGSAAPHQLPDNETDCGWAPFDKNNYQQLLGALDYSFLCAYAVGMYLSGIIGERLPIRYYLTFGMLASGAFTALFGLGYFYNIHSFGFYVVTQVINGLVQTTGWPSVVTCLGNWFGKGRRGLIMGVWNSHTSVGNILGSLIAGYWVSTCWGLSFVVPGAIVAAMGIVCFLFLIEHPNDVRCSSTLVTHSKGYENGTNRLRLQKQILKSEKNKPLDPEMQCLLLSDGKGSIHPNHVVILPGDGGSGTAAISFTGALKIPVSAHLKLQEKDEGRREMVKEILTALGLLSCANTRTGSLSGGQRKRLAIALELVNNPPVMFFDEPTSGLDSASCFQVVSLMKGLAQGGRSIICTIHQPSAKLFELFDQLYVLSQGQCVYRGKVCNLVPYLRDLGLNCPTYHNPADFVMEVASGEYGDQNSRLVRAVREGMCDSDHKRDLGGDAEVNPFLWHRPSEEVKQTKRLKGLRKDSSSMEGCHSFSASCLTQFCILFKRTFLSIMRDSVLTHLRITSHIGIGLLIGLLYLGIGNEAKKVLSNSGFLFFSMLFLMFAALMPTVLTFPLEMGVFLREHLNYWYSLKAYYLAKTMADVPFQIMFPVAYCSIVYWMTSQPSDAVRFVLFAALGTMTSLVAQSLGLLIGAASTSLQVATFVGPVTAIPVLLFSGFFVSFDTIPTYLQWMSYISYVRYGFEGVILSIYGLDREDLHCDIDETCHFQKSEAILRELDVENAKLYLDFIVLGIFFISLRLIAYFVLRYKIRAER

SEQ ID NO: 313 - protein, 814 aa, Homo sapiens
MARLPAGIRFIISFSRDQWYRAFIFILTFLLYASFHLSRKPISIVKGELHKYCTAWDEADVRFSSQNRKSGSAAPHQLPDNETDCGWAPFDKNNYQQLLGALDYSFLCAYAVGMYLSGIIGERLPIRYYLTFGMLASGAFTALFGLGYFYNIHSFGFYVVTQVINGLVQTTGWPSVVTCLGNWFGKGRRGLIMGVWNSHTSVGNILGSLIAGYWVSTCWGLSFVVPGAIVAAMGIVCFLFLIEHPNDVRCSSTLVTHSKGYENGTNRLRLQKQILKSEKNKPLDPEMQCLLLSDGKGSIHPNHVVILPGDGGSGTAAISFTGALKIPVSAHLKLQEKDEGRREMVKEILTALGLLSCANTRTGSLSGGQRKRLAIALELVNNPPVMFFDEPTSGLDSASCFQVVSLMKGLAQGGRSIICTIHQPSAKLFELFDQLYVLSQGQCVYRGKVCNLVPYLRDLGLNCPTYHNPADFVMEVASGEYGDQNSRLVRAVREGMCDSDHKRDLGGDAEVNPFLWHRPSEEDSSSMEGCHSFSASCLTQFCILFKRTFLSIMRDSVLTHLRITSHIGIGLLIGLLYLGIGNEAKKVLSNSGFLFFSMLFLMFAALMPTVLTFPLEMGVFLREHLNYWYSLKAYYLAKTMADVPFQIMFPVAYCSIVYWMTSQPSDAVRFVLFAALGTMTSLVAQSLGLLIGAASTSLQVATFVGPVTAIPVLLFSGFFVSFDTIPTYLQWMSYISYVRYGFEGVILSIYGLDREDLHCDIDETCHFQKSEAILRELDVENAKLYLDFIVLGIFFISLRLIAYFVLRYKIRAER

SEQ ID NO: 314 - protein, 30 aa, Homo sapiens
EGSECSLSSQLLESPLKPGEAGKQGPYHPE

SEQ ID NO: 315 - protein, 29 aa, Homo sapiens
ERKSRFALGGGLSGGSGAAGRSSSALRRY

SEQ ID NO: 316 - protein, 277 aa, Homo sapiens
MSLLDCFCTSRTQVESLRPEKQSETSIHQYLVDEPTLSWSRPSTRASEVLCSTNVSHYELQVEIGRGFDNLTSVHLARHTPTGTLVTIKITNLENCNEERLKALQISRMLAAKTVLAIRYDAFGEDSSSAMGVENRAKLEARLRTLEDRGIRKISGTGKALAKTEKYEHKSEVKTYDPSGDSTLPTCSKKRKIEQVDKEDEITEKKAKKAKIKVKVEEEEEEKVAEEEETSVKKKKKRGKKKHIKEEPLSEEEPCTSTAIASPEKKKKKKKKRENED

SEQ ID NO: 317 - protein, 15 aa, Homo sapiens
GPFLDNSCYFHLSRS

SEQ ID NO: 318 - protein, 870 aa, Homo sapiens
MGPPSLVLCLLSATVFSLLGGSSAFLSHHRLKGRFQRDRRNIRPNIILVLTDDQDVELGSMQVMNKTRRIMEQGGAHFINAFVTTPMCCPSRSSILTGKYVHNHNTYTNNENCSSPSWQAQHESRTFAVYLNSTGYRTAFFGKYLNEYNGSYVPPGWKEWVGLLKNSRFYNYTLCRNGVKEKHGSDYSKDYLTDLITNDSVSFFRTSKKMYPHRPVLMVISHAAPHGPEDSAPQYSRLFPNASQHITPSYNYAPNPDKHWIMRYTGPMKPIHMEFTNMLQRKRLQTLMSVDDSMETIYNMLVETGELDNTYIVYTADHGYHIGQFGLVKGKSMPYEFDIRVPFYVRGPNVEAGCLNPHIVLNIDLAPTILDIAGLDIPADMDGKSILKLLDTERPVNRFHLKKKMRVWRDSFLVERGKLLHKRDNDKVDAQEENFLPKYQRVKDLCQRAEYQTACEQLGQKWQCVEDATGKLKLHKCKGPMRLGGSRALSNLVPKYYGQGSEACTCDSGDYKLSLAGRRKKLFKKKYKASYVRSRSIRSVAIEVDGRVYHVGLGDAAQPRNLTKRHWPGAPEDQDDKDGGDFSGTGGLPDYSAANPIKVTHRCYILENDTVQCDLDLYKSLQAWKDHKLHIDHEIETLQNKIKNLREVRGHLKKKRPEECDCHKISYHTQHKGRLKHRGSSLHPFRKGLQEKDKVWLLREQKRKKKLRKLLKRLQNNDTCSMPGLTCFTHDNQHWQTAPFWTLGPFCACTSANNNTYWCMRTINETHNFLFCEFATGFLEYFDLNTDPYQLMNAVNTLDRDVLNQLHVQLMELRSCKGYKQCNPRTRNMDLGLKDGGSYEQYRQFQRRKWPEMKRPSSKSLGQLWEGWEG

SEQ ID NO: 319 - protein, 99 aa, Homo sapiens
MALETVPKDLRHLRACLLCSLVKTIDQFEYDGCDNCDAYLQMKGNREMVYDCTSSSFDGIIAMMSPEDSWVSKWQRVSNFKPGVYAVSVTGRLPQGFTR

SEQ ID NO: 320 - protein, 473 aa, Homo sapiens
SDARPTVGWEGRCSRSLGVGGSGGRGSAADGGSGSEACVTFSLDPGVFPLADIGLAAWGRKALDIAENEMPGLMRMRERYSASKPLKGARIAGCLHMTVETAVLIETLVTLGAEVQWSSCNIFSTQDHAAAAIAKAGIPVYAWKGETDEEYLWCIEQTLYFKDGPLNMILDDGGDLTNLIHTKYPQLLPGIRGISEETTTGVHNLYKMMANGILKVPAINVNDSVTKSKFDNLYGCRESLIDGIKRATDVMIAGKVAVVAGYGDVGKGCAQALRGFGARVIITEIDPINALQAAMEGYEVTTMDEACQEGNIFVTTTGCIDIILGRHFEQMKDDAIVCNIGHFDVEIDVKWLNENAVEKVNIKPQVDRYRLKNGRRIILLAEGRLVNLGCAMGHPSFVMSNSFTNQVMAQIELWTHPDKYPVGVHFLPKKLDEAVAEAHLGKLNVKLTKLTEKQAQYLGMSCDGPFKPDHYRY

SEQ ID NO: 321 - protein, 404 aa, Homo sapiens
MPGLMRMRERYSASKPLKGARIAGCLHMTVETAVLIETLVTLGAEVQWSSCNIFSTQDHAAAAIAKAGIPVYAWKGETDEEYLWCIEQTLYFKDGPLNMILDDGGDLTNLIHTKYPQLLPGIRGISEETTTGVHNLYKMMANGILKVPAINVNDSVTKSKFDNLYGCRESLIDGIKRATDVMIAGKVAVVAGYGDVGKGCAQALRGFGARVIITEIDPINALQAAMEGYEVTTMDEACQEGNIFVTTTGCIDIILGRHFEQMKDDAIVCNIGHFDVEIDVKWLNENAVEKVNIKPQVDRYRLKNGRRIILLAEGRLVNLGCAMGHPSFVMSNSFTNQVMAQIELWTHPDKYPVGVHFLPKKLDEAVAEAHLGKLNVKLTKLTEKQAQYLGMSCDGPFKPDHYRY

SEQ ID NO: 322 - protein, 55 aa, Homo sapiens
MMEDDGQPRTLYVGNLSRDVTEVLILQLFSQIGPCKSCKMITEPKMELILTGRRK

SEQ ID NO: 323 - protein, 139 aa, Homo sapiens
MAGEITETGELYSSYVGLVYMFNLIVGTGALTMPKAFATAGWLVSLVLLVFLGFMSFVTTTFVIEAMAAANAQLHWKRMENLKEEEDDDSSTASDSDVLIRDNYERAEKRPILSVQVPFRFNLVCDWVCVRERVCVVWR

SEQ ID NO: 324 - protein, 343 aa, Homo sapiens
MAGEITETGELYSSYVGLVYMFNLIVGTGALTMPKAFATAGWLVSLVLLVFLGFMSFVTTTFVIEAMAAANAQLHWKRMENLKEEEDDDSSTASDSDVLIRDNYERAEKRPILSVQKRPPEPPGPPPPPPPPPLVEGDLSSAPQELNPAVTAALLQLLSQPEAEPPGHLPHEHQALRPMEYSTRPRPNRTYGNTDGPETGFSAIDTDERNSGPALTESLVQTLVKNRTFSGSLSHLGESSSYQGTGSVQFPGDQDLRFARVPLALHPVVGQPFLKAEGSSNSVVHAETKLQNYGELGPGTTGASSSGAGLHWGGPTQSSAYGKLYRGPTRVPPRGGRGRGVPY

SEQ ID NO: 325 - protein, 352 aa, Homo sapiens
MAGEITETGELYSSYVGLVYMFNLIVGTGALTMPKAFATAGWLVSLVLLVFLGFMSFVTTTFVIEAMAAANAQLHWKRMENLKEEEDDDSSTASDSDVLIRDNYERAEKRPILSVPCPPHILPPEKRPPEPPGPPPPPPPPPLVEGDLSSAPQELNPAVTAALLQLLSQPEAEPPGHLPHEHQALRPMEYSTRPRPNRTYGNTDGPETGFSAIDTDERNSGPALTESLVQTLVKNRTFSGSLSHLGESSSYQGTGSVQFPGDQDLRFARVPLALHPVVGQPFLKAEGSSNSVVHAETKLQNYGELGPGTTGASSSGAGLHWGGPTQSSAYGKLYRGPTRVPPRGGRGRGVPY

SEQ ID NO: 326 - protein, 185 aa, Homo sapiens
MAAAPVAAGSGAGRGRRSAATVAAWGGWGGRPRPGNILLQLRQGQLTGRGLVRAVQFTETFLTERDKQSKWSGIPQLLLKLHTTSHLHSDFVECQNILKTLAIYDRFGRLMYGQEDVPKDVLEYVVFEKQLTNPYGSWRMHTKIVPPWAPPKQPILKTVMIPGPQLKPEEEYEEAQGEAQKPQLA

SEQ ID NO: 327 - protein, 22 aa, Homo sapiens
MTSIHFVVHPLPGTEDQLNDSE

SEQ ID NO: 328 - protein, 1225 aa, Homo sapiens
MKLRLPASPETHLDMLRHLYQGCQVVQGNLELTYLPTNASLSFLQDIQEVQGYVLIAHNQVRQVPLQRLRIVRGTQLFEDNYALAVLDNGDPLNNTTPVTGASPGGLRELQLRSLTEILKGGVLIQRNPQLCYQDTILWKDIFHKNNQLALTLIDTNRSRACHPCSPMCKGSRCWGESSEDCQSLTRTVCAGGCARCKGPLPTDCCHEQCAAGCTGPKHSDCLACLHFNHSGICELHCPALVTYNTDTFESMPNPEGRYTFGASCVTACPYNYLSTDVGSCTLVCPLHNQEVTAEDGTQRCEKCSKPCARVCYGLGMEHLREVRAVTSANIQEFAGCKKIFGSLAFLPESFDGDPASNTAPLQPEQLQVFETLEEITGYLYISAWPDSLPDLSVFQNLQVIRGRILHNGAYSLTLQGLGISWLGLRSLRELGSGLALIHHNTHLCFVHTVPWDQLFRNPHQALLHTANRPEDECVGEGLACHQLCARGHCWGPGPTQCVNCSQFLRGQECVEECRVLQGLPREYVNARHCLPCHPECQPQNGSVTCFGPEADQCVACAHYKDPPFCVARCPSGVKPDLSYMPIWKFPDEEGACQPCPINCTHSCVDLDDKGCPAEQRASPLTSIISAVVGILLVVVLGVVFGILIKRRQQKIRKYTMRRLLQETELVEPLTPSGAMPNQAQMRILKETELRKVKVLGSGAFGTVYKGIWIPDGENVKIPVAIKVLRENTSPKANKEILDEAYVMAGVGSPYVSRLLGICLTSTVQLVTQLMPYGCLLDHVRENRGRLGSQDLLNWCMQIAKGMSYLEDVRLVHRDLAARNVLVKSPNHVKITDFGLARLLDIDETEYHADGGKVPIKWMALESILRRRFTHQSDVWSYGVTVWELMTFGAKPYDGIPAREIPDLLEKGERLPQPPICTIDVYMIMVKCWMIDSECRPRFRELVSEFSRMARDPQRFVVIQNEDLGPASPLDSTFYRSLLEDDDMGDLVDAEEYLVPQQGFFCPDPAPGAGGMVHHRHRSSSTRSGGGDLTLGLEPSEEEAPRSPLAPSEGAGSDVFDGDLGMGAAKGLQSLPTHDPSPLQRYSEDPTVPLPSETDGYVAPLTCSPQPEYVNQPDVRPQPPSPREGPLPAARPAGATLERPKTLSPGKNGVVKDVFAFGGAVENPEYLTPQGGAAPQPHPPPAFSPAFDNLYYWDQDPPERGAPPSTFKGTPTAENPEYLGLDVPV

SEQ ID NO: 329 - protein, 63 aa, Homo sapiens
GDGGSRSISGLAKGAVAAAAAAAAAATARKSLPGGEQDRTKPECRRQRIRSQSSCGQCAPAQT

SEQ ID NO: 330 - protein, 1166 aa, Homo sapiens
MHPQSLAEEEIKTEQEVVEGMDISTRSKDPGSAERTAQKRKFPSPPHSSNGHSPQDTSTSPIKKKKKPGLLNSNNKEQSELRHGPFYYMKQPLTTDPVDVVPQDGRNDFYCWVCHREGQVLCCELCPRVYHAKCLRLTSEPEGDWFCPECEKITVAECIETQSKAMTMLTIEQLSYLLKFAIQKMKQPGTDAFQKPVPLEQHPDYAEYIFHPMDLCTLEKNAKKKMYGCTEAFLADAKWILHNCIIYNGGNHKLTQIAKVVIKICEHEMNEIEVCPECYLAACQKRDNWFCEPCSNPHPLVWAKLKGFPFWPAKALRDKDGQVDARFFGQHDRAWVPINNCYLMSKEIPFSVKKTKSIFNSAMQEMEVYVENIRRKFGVFNYSPFRTPYTPNSQYQMLLDPTNPSAGTAKIDKQEKVKLNFDMTASPKILMSKPVLSGGTGRRISLSDMPRSPMSTNSSVHTGSDVEQDAEKKATSSHFSASEESMDFLDKSTASPASTKTGQAGSLSGSPKPFSPQLSAPITTKTDKTSTTGSILNLNLDRSKAEMDLKELSESVQQQSTPVPLISPKRQIRSRFQLNLDKTIESCKAQLGINEISEDVYTAVEHSDSEDSEKSDSSDSEYISDDEQKSKNEPEDTEDKEGCQMDKEPSAVKKKPKPTNPVEIKEELKSTSPASEKADPGAVKDKASPEPEKDFSEKAKPSPHPIKDKLKGKDETDSPTVHLGLDSDSESELVIDLGEDHSGREGRKNKKEPKEPSPKQDVVGKTPPSTTVGSHSPPETPVLTRSSAQTSAAGATATTSTSSTVTVTAPAPAATGSPVKKQRPLLPKETAPAVQRVVWNSSTVQQKEITQSPSTSTITLVTSTQSSPLVTSSGSMSTLVSSVNADLPIATASADVAADIAKYTSKMMDAIKGTMTEIYNDLSKNTTGSTIAEIRRLRIEIEKLQWLHQQELSEMKHNLELTMAEMRQSLEQERDRLIAEVKKQLELEKQQAVDETKKKQWCANCKKEAIFYCCWNTSYCDYPCQQAHWPEHMKSCTQSGEGALLAPAGAGKGSGELRKGKNGAGNEAKGAADRNGGHPGPEGRRTDPGRECPMPDAAGNREGESIPPGDTAADAEGASRCQPTTGTTEAGHESPEIKGAGDHWDTTDPAPGGSTGAEGGSPAAQR

SEQ ID NO: 331 - protein, 1141 aa, Homo sapiens
MHPQSLAEEEIKTEQEVVEGMDISTRSKDPGSAERTAQKRKFPSPPHSSNGHSPQDTSTSPIKKKKKPGLLNSNNKEQDGRNDFYCWVCHREGQVLCCELCPRVYHAKCLRLTSEPEGDWFCPECEKITVAECIETQSKAMTMLTIEQLSYLLKFAIQKMKQPGTDAFQKPVPLEQHPDYAEYIFHPMDLCTLEKNAKKKMYGCTEAFLADAKWILHNCIIYNGGNHKLTQIAKVVIKICEHEMNEIEVCPECYLAACQKRDNWFCEPCSNPHPLVWAKLKGFPFWPAKALRDKDGQVDARFFGQHDRAWVPINNCYLMSKEIPFSVKKTKSIFNSAMQEMEVYVENIRRKFGVFNYSPFRTPYTPNSQYQMLLDPTNPSAGTAKIDKQEKVKLNFDMTASPKILMSKPVLSGGTGRRISLSDMPRSPMSTNSSVHTGSDVEQDAEKKATSSHFSASEESMDFLDKSTASPASTKTGQAGSLSGSPKPFSPQLSAPITTKTDKTSTTGSILNLNLDRSKAEMDLKELSESVQQQSTPVPLISPKRQIRSRFQLNLDKTIESCKAQLGINEISEDVYTAVEHSDSEDSEKSDSSDSEYISDDEQKSKNEPEDTEDKEGCQMDKEPSAVKKKPKPTNPVEIKEELKSTSPASEKADPGAVKDKASPEPEKDFSEKAKPSPHPIKDKLKGKDETDSPTVHLGLDSDSESELVIDLGEDHSGREGRKNKKEPKEPSPKQDVVGKTPPSTTVGSHSPPETPVLTRSSAQTSAAGATATTSTSSTVTVTAPAPAATGSPVKKQRPLLPKETAPAVQRVVWNSSTVQQKEITQSPSTSTITLVTSTQSSPLVTSSGSMSTLVSSVNADLPIATASADVAADIAKYTSKMMDAIKGTMTEIYNDLSKNTTGSTIAEIRRLRIEIEKLQWLHQQELSEMKHNLELTMAEMRQSLEQERDRLIAEVKKQLELEKQQAVDETKKKQWCANCKKEAIFYCCWNTSYCDYPCQQAHWPEHMKSCTQSGEGALLAPAGAGKGSGELRKGKNGAGNEAKGAADRNGGHPGPEGRRTDPGRECPMPDAAGNREGESIPPGDTAADAEGASRCQPTTGTTEAGHESPEIKGAGDHWDTTDPAPGGSTGAEGGSPAAQR

SEQ ID NO: 332 - protein, 1085 aa, Homo sapiens
MHPQSLAEEEIKTEQEVVEGMDISTRSKDPGSAERTAQKRKFPSPPHSSNGHSPQDTSTSPIKKKKKPGLLNSNNKEQDGRNDFYCWVCHREGQVLCCELCPRVYHAKCLRLTSEPEGDWFCPECEKITVAECIETQSKAMTMLTIEQLSYLLKFAIQKMKQPGTDAFQKPVPLEQHPDYAEYIFHPMDLCTLEKNAKKKMYGCTEAFLADAKWILHNCIIYNGGNHKLTQIAKVVIKICEHEMNEIEVCPECYLAACQKRDNWFCEPCSNPHPLVWAKLKGFPFWPAKALRDKDGQVDARFFGQHDRAWVPINNCYLMSKEIPFSVKKTKSIFNSAMQEMEVYVENIRRKFGVFNYSPFRTPYTPNSQYQMLLDPTNPSAGTAKIDKQEKVKLNFDMTASPKILMSKPVLSGGTGRRISLSDMPRSPMSTNSSVHTGSDVEQDAEKKATSSHFSASEESMDFLDKSTASPASTKTGQAGSLSGSPKPFSPQLSAPITTKTDKTSTTGSILNLNLDRSKAEMDLKELSESVQQQSTPVPLISPKRQIRSRFQLNLDKTIESCKAQLGINEISEDVYTAVEHSDSEDSEKSDSSDSEYISDDEQKSKNEPEDTEDKEGCQMDKEPSAVKKKPKPTNPVEIKEELKSTSPASEKADPGAVKDKASPEPEKDFSEKAKPSPHPIKDKLKGKDETDSPTVHLGLDSDSESELVIDLGEDHSGREGRKNKKEPKEPSPKQDVVGKTPPSTTVGSHSPPETPVLTRSSAQTSAAGATATTSTSSTVTVTAPAPAATGSPVKKQRPLLPKETAPAVQRVVWNSSTVQQKEITQSPSTSTITLVTSTQSSPLVTSSGSMSTLVSSVNADLPIATASADVAADIAKYTSKMMDAIKGTMTEIYNDLSKNTTGSTIAEIRRLRIEIEKLQWLHQQELSEMKHNLELTMAEMRQSLEQERDRLIAEVKKQLELEKQQAVDETKKKQWCANCKKEAIFYCCWNTSYCDYPCQQAHWPEHMKSCTQSDAAGNREGESIPPGDTAADAEGASRCQPTTGTTEAGHESPEIKGAGDHWDTTDPAPGGSTGAEGGSPAAQR

SEQ ID NO: 333 - DNA, 22 bp, Homo sapiens
cgccacagacatggcagataca

SEQ ID NO: 334 - DNA, 22 bp, Homo sapiens
cggaggatggtcttgagggaga

SEQ ID NO: 335 - DNA, 22 bp, Homo sapiens
ctggcctgagcacatgaagtcc

SEQ ID NO: 336 - DNA, 22 bp, Homo sapiens
ctggcctgagcacatgaagtcc

SEQ ID NO: 337 - DNA, 23 bp, Homo sapiens
cggcagtgtcatacgtggctggt

SEQ ID NO: 338 - DNA, 21 bp, Homo sapiens
gccagttgtgggggtgtgagg

SEQ ID NO: 339 - DNA, 22 bp, Homo sapiens
tgaaggcaatcagcagggtgac

SEQ ID NO: 340 - DNA, 21 bp, Homo sapiens
cttccgctctgaggcgctact

SEQ ID NO: 341 - DNA, 22 bp, Homo sapiens
agcttcctcccacccataaggt

SEQ ID NO: 342 - DNA, 22 bp, Homo sapiens
ccagccacctccacagtgactt

SEQ ID NO: 343 - DNA, 22 bp, Homo sapiens
gtggcggtttgtggaagacagt

SEQ ID NO: 344 - DNA, 22 bp, Homo sapiens
gagaaactgaagcgggacgttg

SEQ ID NO: 345 - DNA, 22 bp, Homo sapiens
aagaccgtccctcgctccttat

SEQ ID NO: 346 - DNA, 23 bp, Homo sapiens
acctccatgggaccaggaccgta

SEQ ID NO: 347 - DNA, 26 bp, Homo sapiens
gggaactgaaattactattgcctttg

SEQ ID NO: 348 - DNA, 21 bp, Homo sapiens
tcgatgcaggaggacgaacag

SEQ ID NO: 349 - DNA, 22 bp, Homo sapiens
ccacacagcactgtggtgagga

SEQ ID NO: 350 - DNA, 20 bp, Homo sapiens
agatgctcggggatctgtcg

SEQ ID NO: 351 - DNA, 21 bp, Homo sapiens
cctccgtttagtctcctcctc

SEQ ID NO: 352 - DNA, 20 bp, Homo sapiens
ggccgccatcagcttcacag

SEQ ID NO: 353 - DNA, 22 bp, Homo sapiens
gtcagcagctgcagtgtggaag

SEQ ID NO: 354 - DNA, 22 bp, Homo sapiens
gacgctcctctgctgtcaggtc

SEQ ID NO: 355 - DNA, 26 bp, Homo sapiens
ttgtctgtataatgaaaatatcttgg

SEQ ID NO: 356 - DNA, 21 bp, Homo sapiens
cggcatctcgttctcagcaat

SEQ ID NO: 357 - DNA, 22 bp, Homo sapiens
cccaggtgtaccccaagctgta

SEQ ID NO: 358 - DNA, 22 bp, Homo sapiens
catcgctggtatcctcgcctac

SEQ ID NO: 359 - DNA, 22 bp, Homo sapiens
ctgcctgactgcttcgacaaga

SEQ ID NO: 360 - DNA, 22 bp, Homo sapiens
acggagggaccatgcttagctc

SEQ ID NO: 361 - DNA, 22 bp, Homo sapiens
ccccatcacataggggtttctg

SEQ ID NO: 362 - DNA, 22 bp, Homo sapiens
ccaggtggagtcatgggtgtca

SEQ ID NO: 363 - DNA, 22 bp, Homo sapiens
ccttcaggctctcgtcctcctc

SEQ ID NO: 364 - DNA, 22 bp, Homo sapiens
ctgcaatgaagaacgcctgaaa

SEQ ID NO: 365 - DNA, 22 bp, Homo sapiens
aggcaactcgtttcaggcaaag

SEQ ID NO: 366 - DNA, 22 bp, Homo sapiens
cggccaggtagaagacctctca

SEQ ID NO: 367 - DNA, 22 bp, Homo sapiens
ctgctgctgctgcctcctttac

SEQ ID NO: 368 - DNA, 22 bp, Homo sapiens
ctagccgacaaggaggtgaagc

SEQ ID NO: 369 - DNA, 22 bp, Homo sapiens
gctggctgtaggtggagctgac

SEQ ID NO: 370 - DNA, 20 bp, Homo sapiens
gagctcgcgctcttcctgac

SEQ ID NO: 371 - DNA, 22 bp, Homo sapiens
tgcagttagaaagagagggaat

SEQ ID NO: 372 - DNA, 22 bp, Homo sapiens
tgtcctggatcacgggtgtcat

SEQ ID NO: 373 - DNA, 22 bp, Homo sapiens
ccgtaggcagtgagaggaatgg

SEQ ID NO: 374 - DNA, 22 bp, Homo sapiens
gcatggaaaatcgggataggtg

SEQ ID NO: 375 - DNA, 22 bp, Homo sapiens
ctctttcaatcggggaggcaag

SEQ ID NO: 376 - DNA, 23 bp, Homo sapiens
tgttctgctttagcatggcaaca

SEQ ID NO: 377 - DNA, 22 bp, Homo sapiens
tctctgcacatcgcacctgatt

SEQ ID NO: 378 - DNA, 23 bp, Homo sapiens
gggacaactacgagcgggcagag

SEQ ID NO: 379 - DNA, 23 bp, Homo sapiens
gagaagcggcccatcctgtctgt

SEQ ID NO: 380 - DNA, 22 bp, Homo sapiens
agaaggagcagtccgtgctcaa

SEQ ID NO: 381 - DNA, 22 bp, Homo sapiens
ctttcttctcccagtcaggatt

SEQ ID NO: 382 - DNA, 22 bp, Homo sapiens
gacgtaatcaaagcgcatcacg

SEQ ID NO: 383 - DNA, 20 bp, Homo sapiens
cccaacaaaggagccaccac

SEQ ID NO: 384 - DNA, 23 bp, Homo sapiens
tcggtctcagttccaatccatca

SEQ ID NO: 385 - DNA, 22 bp, Homo sapiens
tgcaaaggacagatccacacca

SEQ ID NO: 386 - DNA, 20 bp, Homo sapiens
cccaacaaaggagccaccac

SEQ ID NO: 387 - DNA, 23 bp, Homo sapiens
cggagtgtaggcggcagaggatt

SEQ ID NO: 388 - DNA, 23 bp, Homo sapiens
caggacgaagccggagtgtaggc

SEQ ID NO: 389 - DNA, 22 bp, Homo sapiens
gtttccatggcgtgttccattt

SEQ ID NO: 390 - DNA, 22 bp, Homo sapiens
aagcttctggcaagaggtgctg

SEQ ID NO: 391 - DNA, 22 bp, Homo sapiens
acataatccccaatggctttga

SEQ ID NO: 392 - DNA, 22 bp, Homo sapiens
gccagcagctccaagatgattt

SEQ ID NO: 393 - DNA, 23 bp, Homo sapiens
tccgctgaacaggcttaagatga

SEQ ID NO: 394 - DNA, 21 bp, Homo sapiens
ccagctgatccagcaaacctg

SEQ ID NO: 395 - DNA, 21 bp, Homo sapiens
ctccagagcctttgccagctc

SEQ ID NO: 396 - DNA, 22 bp, Homo sapiens
tctgcgtctgcagcagtgtctc

SEQ ID NO: 397 - DNA, 23 bp, Homo sapiens
gctgctggatggaggggattttg

SEQ ID NO: 398 - DNA, 24 bp, Homo sapiens
ggaggggattttgtcagcttgtcg

SEQ ID NO: 399 - DNA, 22 bp, Homo sapiens
ggggaacttctccattcccagt

SEQ ID NO: 400 - DNA, 22 bp, Homo sapiens
gcccgctcactcatcttcatct

SEQ ID NO: 401 - DNA, 23 bp, Homo sapiens
gcttatccttttgtggcggatct

SEQ ID NO: 402 - DNA, 22 bp, Homo sapiens
tccatacatcaaccggccaaac

SEQ ID NO: 403 - DNA, 22 bp, Homo sapiens
aaccggctggagttgttgttgt

SEQ ID NO: 404 - DNA, 22 bp, Homo sapiens
gctttcggtcccaatgaaagat

SEQ ID NO: 405 - DNA, 22 bp, Homo sapiens
tagacctggaccagccagagga

SEQ ID NO: 406 - DNA, 27 bp, Homo sapiens
gatggctcatcagctaaatcacgttgg

SEQ ID NO: 407 - DNA, 23 bp, Homo sapiens
ttcgatttgttttgtgctcattc

SEQ ID NO: 408 - DNA, 22 bp, Homo sapiens
tgcatccgtgttcttgaagcag

SEQ ID NO: 409 - DNA, 23 bp, Homo sapiens
tgtagcagaaatccgaggcaatg

SEQ ID NO: 410 - DNA, 22 bp, Homo sapiens
cagtccccattttccctttcaa

SEQ ID NO: 411 - DNA, 24 bp, Homo sapiens
aatagagcattaggtctgtcatca

SEQ ID NO: 412 - DNA, 22 bp, Homo sapiens
catttcccttctgccttcatcc

SEQ ID NO: 413 - DNA, 21 bp, Homo sapiens
caggtgaactgggcgtcctct

SEQ ID NO: 414 - DNA, 22 bp, Homo sapiens
ccaggatgtcattcgcatctcc

SEQ ID NO: 415 - DNA, 22 bp, Homo sapiens
ccatggaggaggacgacagcta

SEQ ID NO: 416 - DNA, 22 bp, Homo sapiens
ctcccttgatccgggagtcttt

SEQ ID NO: 417 - DNA, 21 bp, Homo sapiens
accttgcctcccttgatgagg

SEQ ID NO: 418 - DNA, 22 bp, Homo sapiens
cgtgatgtgcaccacgaagaag

SEQ ID NO: 419 - DNA, 22 bp, Homo sapiens
tgcacactcaagcaatcccaaa

SEQ ID NO: 420 - DNA, 22 bp, Homo sapiens
ataaaccaagcccacccctcat

SEQ ID NO: 421 - DNA, 23 bp, Homo sapiens
ttccaggtgttcatgatggaagg

SEQ ID NO: 422 - DNA, 23 bp, Homo sapiens
tcttcagaaaggcatggtgatgg

SEQ ID NO: 423 - DNA, 21 bp, Homo sapiens
gacaactggccacccgagagt

SEQ ID NO: 424 - DNA, 21 bp, Homo sapiens
gacaactggccacccgagagt

SEQ ID NO: 425 - DNA, 22 bp, Homo sapiens
cagcttggaaggctaaccgtgt

SEQ ID NO: 426 - DNA, 22 bp, Homo sapiens
ggtgccaaaacagaatggaaaa

SEQ ID NO: 427 - DNA, 23 bp, Homo sapiens
ggttgcgacattttctcctttcc

SEQ ID NO: 428 - DNA, 20 bp, Homo sapiens
cgccgggtcttgttcatcac

SEQ ID NO: 429 - DNA, 22 bp, Homo sapiens
tggcctggataacagcaaacta

SEQ ID NO: 430 - DNA, 20 bp, Homo sapiens
ctcccgcacacctccagcag

SEQ ID NO: 431 - DNA, 22 bp, Homo sapiens
tgtgaacgtgacccttctgtca

SEQ ID NO: 432 - DNA, 23 bp, Homo sapiens
gaaagtcctctcgggagaagcag

SEQ ID NO: 433 - DNA, 23 bp, Homo sapiens
gggaaggtgacaacagccagtgt

SEQ ID NO: 434 - DNA, 22 bp, Homo sapiens
cgagcaggagcgagagtgtgtc

SEQ ID NO: 435 - DNA, 22 bp, Homo sapiens
caggaatctggcacttggcttt

SEQ ID NO: 436 - DNA, 22 bp, Homo sapiens
gaaagccaccatttgctccact

SEQ ID NO: 437 - DNA, 23 bp, Homo sapiens
gccaggtgtatatgcggtgtcag

SEQ ID NO: 438 - DNA, 23 bp, Homo sapiens
gctcagggggcctcttctctggt

SEQ ID NO: 439 - DNA, 23 bp, Homo sapiens
ttcaaccagagggggtggaggtg

SEQ ID NO: 440 - DNA, 22 bp, Homo sapiens
tgccttcctaaacaaggtgaca

SEQ ID NO: 441 - DNA, 26 bp, Homo sapiens
tcagtcagattggaccctgtaaaagc

SEQ ID NO: 442 - DNA, 22 bp, Homo sapiens
gaccagctccaacaggattcca

SEQ ID NO: 443 - DNA, 22 bp, Homo sapiens
gtttcctgaagagcaggggact

SEQ ID NO: 444 - DNA, 22 bp, Homo sapiens
agcaccatgacgtccatccatt

SEQ ID NO: 445 - DNA, 26 bp, Homo sapiens
ttttcagttcaaccaaaatctcttgt

SEQ ID NO: 446 - DNA, 25 bp, Homo sapiens
tccactccagacagttgacacatcc

SEQ ID NO: 447 - DNA, 25 bp, Homo sapiens
gctcagggagtagctttgcatgtgg

SEQ ID NO: 448 - DNA, 23 bp, Homo sapiens
ggagccgcagcttcatgtctgtg

SEQ ID NO: 449 - DNA, 22 bp, Homo sapiens
ccaagatgaagggctacccaca

SEQ ID NO: 450 - DNA, 27 bp, Homo sapiens
ttgatgtaacctttcttcacatcatcg

SEQ ID NO: 451 - DNA, 22 bp, Homo sapiens
ccgcctcctttagtttgctctg

SEQ ID NO: 452 - DNA, 24 bp, Homo sapiens
ttggttttcttcacagcttcctca

SEQ ID NO: 453 - DNA, 263 bp, Homo sapiens
  misc_feature (129)..(129): second gene starts at position 129
ctcagcaacctttggaggcactccatccccaagcacttcccggatgaagcagtgctggcccatgtaatatgagagtccacaggtcctcttgaaagcatccttcagtcgttttagctctacatctgtaacggggtcgaagtgcgagctgaaggcgaagctggggttgaagaaggacgacgacatggccgggccagcggccggcgggcatcccgggagggcgctgcgctcaggacgcccgcggccccggcccgagccgccgcatc

SEQ ID NO: 454 - DNA, 263 bp, Homo sapiens; identical to SEQ ID NO: 453
  misc_feature (129)..(129): second gene starts at position 129

SEQ ID NO: 455 - DNA, 664 bp, Homo sapiens
  misc_feature (557)..(557): second gene starts at position 557
gccctggctctggcctttgctctgcggagctggcggccccctggcacagaggtgacatctcaagggcccaggcagccctcttctagtggtgccaagaggcggaggctgcgggctgcccttggtccccagcccactcgctcagccctgaggtttccctctgcttccccagggagcttgaaggccaagcagtccatggcgggaatccctggtagggagagtaatgccccatctgtgcccactgtctccctgctgccgggggcgcctggaggcaatgccagctccaggacagaggctcaggtgcccaacgggcaaggcagcccagggggctgtgtctgttcaagtcaggcttccccggcccctcgcgcagcagcgcctccacgggcagcccggggccccaccccacgcactgaagaggccgcctgggctgccatggccctgaccttcctgctggtgctgctcaccctggccacgctctgcacacggctgcacagaaacttccgacgcggggagagcatctactgggggcccacagcggacagccaggacacagtggctggatgacatagtgctggatcttggttttatagatgggtccatatttttgttgttgatcacaaactgcgtttctccttttatcggcatgagcagcatcagcgattataaa

SEQ ID NO: 456 - DNA, 675 bp, Homo sapiens
  misc_feature (80)..(80): second gene starts at position 80
ctgtgactttggccttgaaggggctgcccccaatgtggtaggggccgccgtacttgatggagatgaggtagctgccagggcctggagtggaggttcaggaccaaggggcttctggtcctccagcccctgtactcggccatgccctgtggtcactgcggttgccgcccctaattgtgccaaaggctgacccggcccgggctgcgtacacccttgccctgctttgccttaaagcctcggggtctgcccggcccctcgcccctgcctggcactgctcaccgcccaaggcgacgccggctggaccaggcactgctggcctttctcctgcccggcctcggaaccagcttttctctcttacgatgaaggctgatgccgagagcgggctgtgggcggagctgggtcagtcccgtatttattttgctttgagaagaggctcctctggccctgctctcctgcagggaggtggctgtcctgcgggaagccatcagcttgggccagctggcaggtggcaggaatggagaagctgaccctgctggccaggcaaggggccagaccccccccaacccccagctgccatcgctctcccacccagcttggccccctgcccgcccacctccctgggagccgggcctgtacatagcgcacagatgtttgttttaaataaataaacaaaatgtc

SEQ ID NO: 457 - DNA, 1603 bp, Homo sapiens
  misc_feature (174)..(174): second gene starts at position 174
gaggcagtccagtgcgtgcaggagctggcctcaccctccttgctcttcatctttgtacggcatggtgtcgagtctacgctggagcgcagtgccattgctcgtgagcatatggggcagctgctgcaccagctgctctgtgctgggcatctgtctactgctcagtactaccaaggatttttgcttccacaaggtgttcagcaaacatgctaaggcgacagaatgtctagttggtcacgacatgcaacgctgaccattcaattgatgacagcagtgaccacgcccacctgagctaccagccccacagcacaaagggggtttgcgggaacacaccaaaccacacagcaaccagcaacctgaggtaggtctctttacagtacaaaaacttctacgccagtgtgagacactgattagcaagagctgcttaaagttgcagactttgaggggagagagagagagagactgtgcgacgactgcggtgagaaaggaaaacagacccacgaaatcctgagccctgccactgaactgtggaggtgtgggaataggcaaatgaaaaagtgccacctcaaaaagcagcagttggctccagggcttggaaccaacaggtcttggagctggagagctctgtgcagtggccagccataggaacctgaggcagtgggactctctgtggatagactgattcttgtttagaaacaacagcaaaaagaagaaggcaggaaagaaactccccggctcggaggaatgtctctgtgatccccattcttgatggagggagtgaaaaggggcctgggcttcgccccgctgctctcctgacagaaacagtaagtgacaccaggacagaaggcaggagccctgagaactcacggcgctctgcatggtctccagccgcccacccgtctccagccacccctggagcggccgtggggaggcggcagagggggctgtcggagggcccactattgccacacgtcttcctttggacacccagaaaacctggcaccgtgaaaccaccagctagagaagaatgaaatgctactcttcctacagtctaatagcaaaaccagatctctagtacagcaaactgtacaaaaatgatagaaaggaatatgcactgttattagcacagtgcttattttaatataaaataaacagcttacattttcactgtaaatataggctatgtacagaattatatatagatatagctacacgtataaagcttcattataggcctctgatacaattataataacggttccctgaaccttttagagtgcaattaagaacaaaaactaaattttgtttacatgaatatggaataaatacaataatcaaaatatgactctccctaaaagtgaaacacacaagccaatccggaactgctgtgcgaaagataaaatcgagaaaggcaaggtttcggtaggaggacgcgatgaggggcccgccccaggcagggaatggcaatgctctaaagaaaagagacttcgtcaacagggaggagtcagcccttgacagcgaccttgttctctgcagcagcaaacatggcatagaatcgggaactgtcgttggacagaaggaccgatggggtgtcaaactccaccac

SEQ ID NO: 458 - DNA, 2139 bp, Homo sapiens
  misc_feature (1392)..(1392): second gene starts at position 1392
tcttctacaaatgtagaggtttatttcaacaaaatgtgtaaagagtgcatctgaagctcctgctcatcacagtatgtgtccatcaaattctgagacaagtgaaggctgttttgtgaacgaagagaacagataatatggcggtctccgtccaagcaggtcttggtcaatatccatcatttatactcctcctgccttagtagccttgcatgtttgaggggctgtgggaatgtcagattgctcatgttctgtgcctccaacttgaaaaaatccttgtccagggtaagacctacagtaaggagctctggggatgggggaggaggcattacagggttctagagaggaaacatactcgtttgtgtcataatttggtggggagaggggaggtaaatgagtgtaacccaccctgcctctgaagacatgcctggacaggcctcctggggggtgcaggacttcataccacttgtagatatgtgggatttgatttattgcaaaaaagcatagaagaataatctggtcaaaaatgaatccaattcttactaggtaagcaaatagccagcaatggtcaatgcattttcctggactgagaattgtcccccaccactttatgcccttttctgaaggtgctgaacacctgtaccttccaccagggcagccgggctgaggctctgactcctgggggctgtccgctccatacccagccatacagtgcccacctgcaacccagaaccattgaaaagtccagccaatctatccgcacagattcctcctgaagaaggggaggtggagctcgttcttgtgtgcaaactacagggttaaggctcagaactgtggcttgtccaagaacgttcataccactgcttctcaaatgtcttagtgatttcctccttggtcatcagtgacaaatgcagttagctgcactaaaggaaccggatgctacaccagccctgatcacctgccactcttgctttaggaacagaggaatcagtaagttcttttcttgaataaactagttgttgaaagtaaactctctccaccacctgaggaagcccctgatgccagtcaggaggggccagtaagcctggaggacagcagcaccatgactgagttgtaaataatcttaaggtcatgtggattctgtgtttcctggaagcctccctcatcaggaaggccagctcctggtgctgagggtgtagctgtcaccagggtcctttcagagctgtggggagacctgctgcctgtctacactctggggaagagagtagaaccgttagctgctaggacagtaatcctggaactagggaagagtgagtgtggaggcaccattaacctctcaaaaccatccaagctccaggcttcataggaacaactttccaagtcctcaaaacaaacaggacgaggagcagaggcttaaggaggaggaagaagacaagaaacgcaaagaggaggaggaggcagaggacaaggaggatgatgaggacaaagatgaggatgaggaggatgaggaggacaaggaggaagatgaggaggaagatgtccccggccaggccaaggacgagctgtagagaggcctgcctccagggctggactgaggcctgagcgctcctgccgcagagctggccgcgccaaataatgtctctgtgagactcgagaactttcatttttttccaggctggttcggatttggggtggattttggttttgttcccctcctccactctcccccaccccctccccgcccttttttttttttttttttaaactggtattttatctttgattctccttcagccctcacccctggttctcatctttcttgatcaacatcttttcttgcctctgtccccttctctcatctcttagctcccctccaacctggggggcagtggtgtggagaagccacaggcctgagatttcatctgctctccttcctggagcccagaggagggcagcagaagggggtggtgtctccaaccccccagcactgaggaagaacggggctcttctcatttcacccctccctttctcccctgcccccaggactgggccacttctgggtggggcagtgggtcccagattggctcacactgagaatgtaagaactacaaacaaaatttctattaaattaaattttgtgtctcc

SEQ ID NO: 459 - DNA, 2023 bp, Homo sapiens
  misc_feature (1772)..(1772): second gene starts at position 1772
gaatgaggcagatgagctccgtaaagctctggacaaccttgcaagacaaatgatcatgaaagacaaaaactggcacgataaaggccagcagtacagaaactggtttctgaaagagtttcctcggttgaaaagtgagcttgaggataacataagaaggctccgtgcccttgcagatggggttcagaaggtccacaaaggcaccaccatcgccaatgtggtgtctggctctctcagcatttcctctggcatcctgaccctcgtcggcatgggtctggcacccttcacagagggaggcagccttgtactcttggaacctgggatggagttgggaatcacagccgctttgaccgggattaccagcagtaccatggactacggaaagaagtggtggacacaagcccaagcccacgacctggtcatcaaaagccttgacaaattgaaggaggtgagggagtttttgggtgagaacatatccaactttctttccttagctggcaatacttaccaactcacacgaggcattgggaaggacatccgtgccctcagacgagccagagccaatcttcagtcagtaccgcatgcctcagcctcacgcccccgggtcactgagccaatctcagctgaaagcggtgaacaggtggagagggttaatgaacccagcatcctggaaatgagcagaggagtcaagctcacggatgtggcccctgtaagcttctttcttgtgctggatgtagtctacctcgtgtacgaatcaaagcacttacatgagggggcaaagtcagagacagctgaggagctgaagaaggtggctcaggagctggaggagaagctaaacattctcaacaataattataagattctgcaggcggaccaagaactgtgaccacagggcagggcagccaccaggagagatatgcctggcaggggccaggacaaaatgcaaacttttttttttttctgagacagagtcttgctctgtcgccaagttggagtgcaatggtgcgatctcagctcactgcaagctctgcctcccgtgttcaagcgattctcctgccttggcctcccaagtagctgggactacaggcgcctaccaccatgcccagctaatttttgtatttttaatagagatggggtttcaccatgttggccaggatggtctcgatctcctgacctcttgatctgcccaccttggcctcccaaagtgctgggattacaggcgtgagccatcgcttttgacccaaatgcaaacattttattagggggataaagagggtgaggtaaagtttatggaactgagtgttagggactttggcatttccatagctgagcacagcaggggaggggttaatgcagatggcagtgcagcaaggagaaggcaggaacattggagcctgcaataagggaaaaatgggaactggagagtgtggggaatgggaagaagcagtttactttagactaaagaatatattggggggccgggtgtagtggctcatgcctgtaatccgagcactttgggaggccaaggcgggcggatcacgaggtcaggagatcgagaccatcctggctaacacagtgaaaccccgtctctactaaaaatacaaaaaattagccgggcatggtggcgggcgcctgtagttccagctaactgggcggctgaggcaggagaatggcgtgaacctgggaggtggagcttgcagtgagccgagatatcgccactgcactccagcctgggtgacagagcgagactccatctcaaaaaaaaaaaaaaaaaccaaaacaaaacaaaaaaaacaaataaagccatgccaatctcatcttgttttctgcgcaagttaggttttgtcaagaaagggtgtaacgcaactaagtcatagtccgcctagaagcatttgcggtggacgatggaggggccggactcgtcatactcctgcttgctgatccacatctgctggaaggtggacagcgaggccaggatggagccgccgatccacacggagtacttgcgctcaggaggagcaatgat

SEQ ID NO: 460 - DNA, 4611 bp, Homo sapiens
  misc_feature (4360)..(4360): second gene starts at position 4360
ttcggtttgttgttcagtgtttattaagtagattcagtcttatatatgatatacagattcaaaaggaaaaggattccacatacttatgaaatcagtgcatttagcaagtaataccatggagataacagctcgattaacagctcattggtcttttgttaagtgagggagagagggagtcggcctgtgctagtcattccacaaacaaaacagaatttagtcacatcacgtagagaagacacattctaagaattaaaatattaagccacatttactggtaaaactcactatatagaacacaaataatttttatagagagcattgaggaggaagtcctcacctgcttagaagagccacgttaagttgcataggtgcatatctgtaaaaatataatttagaggtgaagccattaatagagtcacctttaaaagttggtgccatccactgtttgccttaagtgcttactatctggagccctgtgcccctccccggaggtgggacctcatgaaggagctgcccccagaggaaccctgaagaaatggcttgtactatctgcactgaaagtcttaaatctcatctcagatatggaactcatgctcttccaaaacatgtctaaattatgccagaggactaaagacctcttgggttgtccctaaatcctggatggcttgatcctgaaggcaacatgagtcattctgaccttcccactcccaggctgcccagggaagaactacattcatcccacagctctgcagcaaagtcctgccttcccttttcctctgtccatgcagttacccaccagcagccaataagaggtctctcttctgactcctgctcctaaatggaccacataattgaggcatatgggccatctaccaggtggaaagtgtttttcagccaatctgagttctacgtggtataggttttttgttgtatttttaggtggaaacgtaggtaaaaagtgagaggtttttgtttgtggctttgctaagcagatgagcttagtgaggtgcatcttcctcctcaagagcaagtcttgcagaacacacagggactgggggcatctgtacatgtaaacagtacactttcactgagtccaaaattaggagcaaaaatacaaaggttcacattggtcttaggtagatacaggcgaaaaaggattgagctgtttagctcagaaacaacaaaaacaaagtttctaaagcaccactaaattatataaaaatcagaccatggacggattgaaactggtattctggtgaaatactttactattttgtaaaaagttttacaaaaaattacaaattaaaagtatcaaccctctgagttcaaagcagcattttgaaaatgaactggtagttaatcctgtaaccacccttagagttgtaagtggcccttgggaatagggatggatgggttccacctgtttgaaatcctcgaaaaccctcctaactccctgcctgtccccctccccgtcagcactgtccttgggaataaactgtcctttgtaagagtggtgacggtaaaatgaatttcagatgggttacacacactatcacttgtctacctgatgatccaccactaagaccaatgcccacttctctgatgctacccttcttgtgggattagcctcctgcaaagactctggaattggagtatcctactcttgcatttcctttttaacttaggatcccaaatgatcactttgtgccctgaggcccttcagaagatttttaaatggctgtgggacaagggctttgggagctccttttgggagaaggcagtccctctggtgagggtgagacagcagtgagcttagttcatcagaaccagctctttggtgccctccaagtcgggagtagggggaaggggttgaagctgcatcttttaaaacaaaagcaaaacaagttccctgactgagccagctaaatggaatcctgtttccatgcagaaacttgctcctgattctgccatctctagggcttcaggtgtagtttcactggaaaggaggagcccacccaagaggtggggtcgacatgatgaaatccattgtcctggaggggcctgggaggcccaatggactttaacaacatattctttcctttctcttgaaaacacattgaacctacgctcttgccgcagtactaaggcaggctggagggtggtcagttccaacagcttgaactcagaaaaacatgacttcaaactgtagcttatgctgatctttagatctaatccttgtgtgggtagggggagggagccccttccccagtctttctcactcctgtctgccaagaaatgcaaacggttcatgtctagcttgggtactgcctctgggaggagaagtgacacgttaagtaactgataccaggaattctagggtggcgattgtctctgccaggttttaacattaagattttcacaaataattgcctggggtaacatttttgcaaaagatcttactgattactttgtagtattgttcacacacaaaaataaatatttacacgaattcaaatgttgagtagtactgagcaggtggggccagatgtgtggatggctggggtgtgggagaggccttgggcactggaggttgtgctgtgctaagggtgagtctcaggtgtcctggccctgaccagaggcctggggattggtcagatggaaggcagaggtggtgtggctggatggggtattggaggccacttgagagataacgaccacccccaacctctaggggccggaagtaagcacggggtgggcaccctacctttcagagttctggacctgaggcaggatggggcatcctcactggtgccccccccatccctccttggggggagtctgccacagtgccgggaggcagtggccacagctgcaacaggcaattggctgcagaaaagctggtttgggaaggggtgcctgttctgggagcgagtggctctccgtggccatcctaggatccactcggccctggctcccctggggcctctctgctctgagggaggaaaggcaacagagggcttctgccagctctgggcaggggcgggcagcagagagctgctgtcatggctacggagtgttgcacggagaggccctgggggcctgctgaggtctgggcgagtccctggtttagcagcactggtaggtattgcactgagcaagaggaagtgcctatcaatcaatcaatcagggaggaaggaaaccaggccagctttttctttttgccctttttcacactccagggattatgggtttcttccaggaccggcccctccggaagggctggtcttaggagaacccaagtggctcctccacttccactgatccctttactccaaacatggcgcaaggggatgggagctgcagcccgccctggagctcacggctgcctgatagccggggctcaccctgaagaagtggcccctcttggcaggagtgagtctgaggggccaggcctgtgcacagaagttcagacctggctcctgggcagcggggtgtgagggcaagggccctgccaaccggctgccatctcccagcagtccgtcctgtcaagcagctgagggccagagctggagggctgcagtggctggttagggacaggacgctctctgggttccagctcctggacacccagtctggacttacttacctcccaggcagacacattgtgtgggggagttggggttacagctgttcagaacaggctcagggcacatcctggaaaaagcccacgctggagtgtgaggtagaatacaggtgaccatggactggggcttctgtagaatggggtcggggtgcctcttttgttttgctttgccatgggtgtgggtgaggtcctcctgcttggcgttgcctagggaggtgcctggtggtgtccctgtggcagcactgggatctgcaacaggatggcctggccaagggctagcggccacagggtgcaccaggcatgcagaggaacagccagcctggcacctgtcctgcccctactggccccagcccacatcagtgtagtgatatggaatgttaggtatggggatacatccttctgatcagacagacacagactagcaatctgtacaaacacaaaagaatccattttcagaaaaataaattactaaggggagaggaagaaagggtccactttgcttttctcaataaatatgcaattctgctcacctaagacttgaaaggtaattatctgggggtgggattctaacatcagggtccacgaaggtgattctaaacagagctgcagccccagcgccttgtcaggggagcccccaacccttccagagctgccccgttggcctcttccaagcaggtcagagcacccgtgtggtgagattccaaaaaaaaaaaaaaccaaaacaaaacaaaaaaaacaaataaagccatgccaatctcatcttgttttctgcgcaagttaggttttgtcaagaaagggtgtaacgcaactaagtcatagtccgcctagaagcatttgcggtggacgatggaggggccggactcgtcatactcctgcttgctgatccacatctgctggaaggtggacagcgaggccaggatggagccgccgatccacacggagtacttgcgctcaggaggagcaatgat

SEQ ID NO: 461 - DNA, 4612 bp, Homo sapiens
  misc_feature (4361)..(4361): second gene starts at position 4361
ttcggtttgttgttcagtgtttattaagtagattcagtcttatatatgatatacagattcaaaaggaaaaggattccacatacttatgaaatcagtgcatttagcaagtaataccatggagataacagctcgattaacagctcattggtcttttgttaagtgagggagagagggagtcggcctgtgctagtcattccacaaacaaaacagaatttagtcacatcacgtagagaagacacattctaagaattaaaatattaagccacatttactggtaaaactcactatatagaacacaaataatttttatagagagcattgaggaggaagtcctcacctgcttagaagagccacgttaagttgcataggtgcatatctgtaaaaatataatttagaggtgaagccattaatagagtcacctttaaaagttggtgccatccactgtttgccttaagtgcttactatctggagccctgtgcccctccccggaggtgggacctcatgaaggagctgcccccagaggaaccctgaagaaatggcttgtactatctgcactgaaagtcttaaatctcatctcagatatggaactcatgctcttccaaaacatgtctaaattatgccagaggactaaagacctcttgggttgtccctaaatcctggatggcttgatcctgaaggcaacatgagtcattctgaccttcccactcccaggctgcccagggaagaactacattcatcccacagctctgcagcaaagtcctgccttcccttttcctctgtccatgcagttacccaccagcagccaataagaggtctctcttctgactcctgctcctaaatggaccacataattgaggcatatgggccatctaccaggtggaaagtgtttttcagccaatctgagttctacgtggtataggttttttgttgtatttttaggtggaaacgtaggtaaaaagtgagaggtttttgtttgtggctttgctaagcagatgagcttagtgaggtgcatcttcctcctcaagagcaagtcttgcagaacacacagggactgggggcatctgtacatgtaaacagtacactttcactgagtccaaaattaggagcaaaaatacaaaggttcacattggtcttaggtagatacaggcgaaaaaggattgagctgtttagctcagaaacaacaaaaacaaagtttctaaagcaccactaaattatataaaaatcagaccatggacggattgaaactggtattctggtgaaatactttactattttgtaaaaagttttacaaaaaattacaaattaaaagtatcaaccctctgagttcaaagcagcattttgaaaatgaactggtagttaatcctgtaaccacccttagagttgtaagtggcccttgggaatagggatggatgggttccacctgtttgaaatcctcgaaaaccctcctaactccctgcctgtccccctccccgtcagcactgtccttgggaataaactgtcctttgtaagagtggtgacggtaaaatgaatttcagatgggttacacacactatcacttgtctacctgatgatccaccactaagaccaatgcccacttctctgatgctacccttcttgtgggattagcctcctgcaaagactctggaattggagtatcctactcttgcatttcctttttaacttaggatcccaaatgatcactttgtgccctgaggcccttcagaagatttttaaatggctgtgggacaagggctttgggagctccttttgggagaaggcagtccctctggtgagggtgagacagcagtgagcttagttcatcagaaccagctctttggtgccctccaagtcgggagtagggggaaggggttgaagctgcatcttttaaaacaaaagcaaaacaagttccctgactgagccagctaaatggaatcctgtttccatgcagaaacttgctcctgattctgccatctctagggcttcaggtgtagtttcactggaaaggaggagcccacccaagaggtggggtcgacatgatgaaatccattgtcctggaggggcctgggaggcccaatggactttaacaacatattctttcctttctcttgaaaacacattgaacctacgctcttgccgcagtactaaggcaggctggagggtggtcagttccaacagcttgaactcagaaaaacatgacttcaaactgtagcttatgctgatctttagatctaatccttgtgtgggtagggggagggagccccttccccagtctttctcactcctgtctgccaagaaatgcaaacggttcatgtctagcttgggtactgcctctgggaggagaagtgacacgttaagtaactgataccaggaattctagggtggcgattgtctctgccaggttttaacattaagattttcacaaataattgcctggggtaacatttttgcaaaagatcttactgattactttgtagtattgttcacacacaaaaataaatatttacacgaattcaaatgttgagtagtactgagcaggtggggccagatgtgtggatggctggggtgtgggagaggccttgggcactggaggttgtgctgtgctaagggtgagtctcaggtgtcctggccctgaccagaggcctggggattggtcagatggaaggcagaggtggtgtggctggatggggtattggaggccacttgagagataacgaccacccccaacctctaggggccggaagtaagcacggggtgggcaccctacctttcagagttctggacctgaggcaggatggggcatcctcactggtgccccccccatccctccttggggggagtctgccacagtgccgggaggcagtggccacagctgcaacaggcaattggctgcagaaaagctggtttgggaaggggtgcctgttctgggagcgagtggctctccgtggccatcctaggatccactcggccctggctcccctggggcctctctgctctgagggaggaaaggcaacagagggcttctgccagctctgggcaggggcgggcagcagagagctgctgtcatggctacggagtgttgcacggagaggccctgggggcctgctgaggtctgggcgagtccctggtttagcagcactggtaggtattgcactgagcaagaggaagtgcctatcaatcaatcaatcagggaggaaggaaaccaggccagctttttctttttgccctttttcacactccagggattatgggtttcttccaggaccggcccctccggaagggctggtcttaggagaacccaagtggctcctccacttccactgatccctttactccaaacatggcgcaaggggatgggagctgcagcccgccctggagctcacggctgcctgatagccggggctcaccctgaagaagtggcccctcttggcaggagtgagtctgaggggccaggcctgtgcacagaagttcagacctggctcctgggcagcggggtgtgagggcaagggccctgccaaccggctgccatctcccagcagtccgtcctgtcaagcagctgagggccagagctggagggctgcagtggctggttagggacaggacgctctctgggttccagctcctggacacccagtctggacttacttacctcccaggcagacacattgtgtgggggagttggggttacagctgttcagaacaggctcagggcacatcctggaaaaagcccacgctggagtgtgaggtagaatacaggtgaccatggactggggcttctgtagaatggggtcggggtgcctcttttgttttgctttgccatgggtgtgggtgaggtcctcctgcttggcgttgcctagggaggtgcctggtggtgtccctgtggcagcactgggatctgcaacaggatggcctggccaagggctagcggccacagggtgcaccaggcatgcagaggaacagccagcctggcacctgtcctgcccctactggccccagcccacatcagtgtagtgatatggaatgttaggtatggggatacatccttctgatcagacagacacagactagcaatctgtacaaacacaaaagaatccattttcagaaaaataaattactaaggggagaggaagaaagggtccactttgcttttctcaataaatatgcaattctgctcacctaagacttgaaaggtaattatctgggggtgggattctaacatcagggtccacgaaggtgattctaaacagagctgcagccccagcgccttgtcaggggagcccccaacccttccagagctgccccgttggcctcttccaagcaggtcagagcacccgtgtggtgagattccaaaaaaaaaaaaaaaccaaaacaaaacaaaaaaaacaaataaagccatgccaatctcatcttgttttctgcgcaagttaggttttgtcaagaaagggtgtaacgcaactaagtcatagtccgcctagaagcatttgcggtggacgatggaggggccggactcgtcatactcctgcttgctgatccacatctgctggaaggtggacagcgaggccaggatggagccgccgatccacacggagtacttgcgctcaggaggagcaatgat

SEQ ID NO: 462 - DNA, 1344 bp, Homo sapiens
  misc_feature (397)..(397): second gene starts at position 397
atcatgtttgagaccttcaacaccccagccatgtacgttgctatccaggctgtgctatccctgtacgcctctggccgtaccactggcatcgtgatggactccggtgacggggtcacccacactgtgcccatctacgaggggtatgccctcccccatgccatcctgcgtctggacctggctggccgggacctgactgactacctcatgaagatcctcaccgagcgcggctacagcttcaccaccacggccgagcgggaaatcgtgcgtgacattaaggagaagctgtgctacgtcgccctggacttcgagcaagagatggccacggctgcttccagctcctccctggagaagagctacgagctgcctgacggccaggtcatcaccattggcaatgagagggaacccaggaattgtgaggttagcaggaatatctttagggtgagtgagttttctttgagttgggcacccgttgtgagagtttcagaacctttggccagcaggagagaggtggtagggagcagccagccggcaaaggaaggagggggaaaaaaaccgccaccgggctgacttccacctcccagtggtgagcagtgggggcccaaacccagtttccttctcatttttgttagtttgcgctttcggcctccctattttcttagggaaggggagtggggtccaagtgacagctggatgggagaagccatagtttctcccagtcagctaggatgtagccattgggggatctttgtggcttcagcaaattctcttgttaaaccggagtgaaaacttcaggggaagggtggggagtcagccaagtgcctcagtgtgccctgttgaaacttaggtttttccacgcaatcgatggattgtgtcctaggaagacttttcttttcctctggatttttgttcctcctgtacaagaggtgtctttgcttggtttggtggggctgcggccacttaaaacctcccgatctctttttgagtcctttattataagtagttgtagctgcgggagggggagggggagtgggcgggcagtggatagtaagacttactgcagtcgatttgggatttgctaagtagttttacagagctagatctgtgtgcatgtgtgtgtttgtgtatatatacatatctagggctagtacttagtttcacacccgggagctgggagaaaaaacctgtacagttgtctttctcttatttttaataaaatagaaaaatcgcgcacttgcgcgtcccccccccacccccttttttaaacaagtgttacttgtgccgggaaaattttgctgtctttgtaattttaaaactttaaaataaattggaaaagggagaaactga

SEQ ID NO: 463 - DNA, 675 bp, Homo sapiens
  misc_feature (495)..(495): second gene starts at position 495
tcatttttaaggtgtgcacttttattcaactggtctcaagtcagtgtacaggtaagccctggctgcctccacccactcccagggagaccaaaagccttcatacatctcaagttgggggacaaaaaagggggaagggggggcacgaaggctcatcattcaaaataaaacaaaataaaaaagtattaaggcgaagattaaaaaaattttgcattacataatttacacgaaagcaatgctatcacctcccctgtgtggacttgggagaggactgggccattctccttagagagaagtggggtggcttttaggatggcaagggacttcctgtaacaacgcatctcatatttggaatgactattaaaaaaacaacaatgtgcaatcaaagtcctcggccacattgtgaactttgggggatgctcgctccaaccgactgctgtcaccttcaccgttccagtttttaaatcctgagtcaagccaaaaaaaaaaaaaaaaccggcacatgcggttactgtgggctccagttcagacagcaccaccactagagcgtgtggcacgccgggggtcccgcagcatcctgtgagcatttccgcggggaagctgagcacgtgaagctcgctggttctgtgcgaagggtattcctggtgctgaataaagggtgttgctgtcaaggctgac

SEQ ID NO: 464 - DNA, 1628 bp, Homo sapiens
  misc_feature (1153)..(1153): second gene starts at position 1153
cctgaagaaagttcgtggcaaagtctggaagcaaagaatatctagccctctgttcaacaccaaacaatacacaatggaactagagcggctctatctacagatgtgggagcattatgcagctggcaacaaacctgaccacatgattaagcctgttgaagtcactgagtcagcataaataaagactgcacaggagaattacccctatacctgagcctcaaccttctgggggaaagggaactagataacatacttcttacttgtctgtacagtaccttgttgcagatgggtgatatataatggtaatagaatagcacagccagacttgcttcctgcatggtagggagagacacaaaagatgggaaactgcttttccacaaggaatctccgtagaattttgcggcgaccagatggtgcataggtctggaaggtctgatctcccttggtcttccatgggatggttagtgtggaggggagatatagattgtccggccgctttgtgattccatggattgattcagtcttctggatttttttttctttatattttgggtactggagcttttaaaaatgtttggtttcaggtatttttattcatgtgaagtgtatatgattctcttgagataaggttttaagctaaaatgttactccctgttttagtttctgaactctgacagattgacagggactttgctggtgtagtctttttataggttttataaaccacttgagcctatatcagtcgttttagtgtctgacctaatatttggagctatcagtgctttgttgatttagatgatgactcaagattttttctggtccatttcccatttccttttcttccctgacccccataccctcacccttaaaattctcctgtaactcaactaacaaaatcaagcctgattcaaaacatcctagggtgttttaaacacaccatctggtgccaaatgaagatttttaggagtgattactaattatcaagggcacagttgtggtactgtcattgataataatatagtttttttttttttcctaattttgacctgtttcaccagtgttttacccttgactgccccttctatgctgcttccaaaagtgatagtgtgtgtaagatttttaccttcctttctaaagttttttttttttttttttggcttgactcaggatttaaaaactggaacggtgaaggtgacagcagtcggttggagcgagcatcccccaaagttcacaatgtggccgaggactttgattgcacattgttgtttttttaatagtcattccaaatatgagatgcgttgttacaggaagtcccttgccatcctaaaagccaccccacttctctctaaggagaatggcccagtcctctcccaagtccacacaggggaggtgatagcattgctttcgtgtaaattatgtaatgcaaaatttttttaatcttcgccttaatacttttttattttgttttattttgaatgatgagccttcgtgcccccccttcccccttttttgtcccccaacttgagatgtatgaaggcttttggtctccctgggagtgggtggaggcagccagggcttacctgtacactgacttgagaccagttgaataaaagtgcacaccttaaaaatga

SEQ ID NO: 465 - DNA, 2449 bp, Homo sapiens
  misc_feature (397)..(397): second gene starts at position 397
atcatgtttgagaccttcaacaccccagccatgtacgttgctatccaggctgtgctatccctgtacgcctctggccgtaccactggcatcgtgatggactccggtgacggggtcacccacactgtgcccatctacgaggggtatgccctcccccatgccatcctgcgtctggacctggctggccgggacctgactgactacctcatgaagatcctcaccgagcgcggctacagcttcaccaccacggccgagcgggaaatcgtgcgtgacattaaggagaagctgtgctacgtcgccctggacttcgagcaagagatggccacggctgcttccagctcctccctggagaagagctacgagctgcctgacggccaggtcatcaccattggcaatgagaggctcagggtgaggtccctgcctcggactcaaagaccgaatgcacggccttgtaggggacgccccagattgtcagggatggggggatggtccttgagttttgcatgctctcctccctcccacttctgcaccctttcaccacctcgaggagatttgctccccattagcgaatgaaattgatgcagtcctacctaactcgattccctttggcttggtggtaggcctgcagggcacttttattccaacccctggtcactcagtaatcttttactccaggaaggcacaggatggtacctaaagagaattagagaatgaacctggcgggacggatgtctaatcctgcgcctagctgggttggtcagtagaacctattttcagactcaaaaaccatcttcagaaagaaaaggcccagggaaggaatgtatgagaggctctcccagatgaggaagtgtactctctatgactatcaagctcaggcctctccctttttttaaaccaaagtctggcaaccaagagcagcagctccatggcctccttgccccagatcagcctgggtcaggggacatagtgtcattgtttggaaactgcagaccacaaggtgtgggtctatcccacttcctagtgctccccacattccccatcagggcttcctcacgtggacaggtgtgctagtccaggcagttcacttgcagtttccttgtcctcatgcttcggggatgggagccacgcctgaactagagttcaggctggatacatgtgctcacctgctgctcttgtcttcctaagagacagagagtggggcagatggaggagaagaaagtgaggaatgagtagcatagcattctgccaaaagggccccagattcttaatttagcaaactaagaagcccaattcaaaagcattgtggctaaagtctaacgctcctctcttggtcagataacaaaagccctccctgttggatcttttgaaataaaacgtgcaagttatccaggctcgtagcctgcatgctgccaccttgaatcccagggagtatctgcacctggaatagctctccacccctctctgcctccttactttctgtgcaagatgacttcctgggttaacttccttctttccatccacccacccactggaatctctttccaaacatttttccattttcccacagatgggctttgattagctgtcctctctccatgcctgcaaagctccagatttttggggaaagctgtacccaactggactgcccagtgaactgggatcattaagtacagtcgagcacacgtgtgtgcatgggtcaaaggggtgtgttccttctcatcctagatgccttctctgtgccttccacagcctcctgcctgattacaccactgcccccgccccaccctcagccatcccaattcttcctggccagtgcgctccagccttatctaggaaaggaggagtgggtgtagccgtgcagcaagattggggcctcccccatcccagcttctccaccatcccagcaagtcaggatatcagacagtcctcccctgaccctcccccttgtagatatcaattcccaaacagagccaaatactctatatctatagtcacagccctgtacagcatttttcataagttatatagtaaatggtctgcatgatttgtgcttctagtgctctcatttggaaatgaggcaggcttcttctatgaaatgtaaagaaagaaaccactttgtatattttgtaataccacctctgtggccatgcctgccccgcccactctgtatatatgtaagttaaacccgggcaggggctgtggccgtctttgtactctggtgatttttaaaaattgaatctttgtacttgcattgattgtataataattttgagaccaggtctcgctgtgttgctcaggctggtctcaaactcctgagatcaagcaatccgcccacctcagcctcccaaagtgctgagatcacaggcgtgagccaccaccaggcctgattgtaatttttttttttttttttttactggttatgggaagggagaaataaaatcatcaaacccaa

SEQ ID NO: 466 - DNA, 1186 bp, Homo sapiens
  misc_feature (385)..(385): second gene starts at position 385
ttgagtggcaacttcacgacttttatttgtggtgcctgtgctttatctcgaaaataccttctccccctgccccagacagtgggcggggagggggcagcaaaaaatagaagacgtccctccctattgcacatggaccctatatacaggcccacctggctgaggctggcgggactcttggcacattcttggatccctgctcaggaggggaggggtgacggggtggcatcacacgtgagatggggacctccaggcggccactctggtcctggctactgatccttgcacttcttggtcctcagttccttcctggtcccgtctctggccctggtcccctctggcaacgtccccctgcttggctcggcctcccacctccatcctggcctcactgtccaccttccagcagatgtggattagcaagcaggagtacgacgagtcgggcccctccatcgtccaccgcaaatgcttctaaacggactcagcagatgcgtagcatttgctgcatgggttaattgagaatagaaatttgcccctggcaaatgcacacacctcatgctagcctcacgaaactggaataagccttcgaaaagaaattgtccttgaagcttgtatctgatatcagcactggattgtagaacttgttgctgattttgaccttgtattgaagttaactgttccccttggtatttgtttaataccctgtacatatctttgagttcaacctttagtacgtgtggcttggtcacttcgtggctaaggtaagaacgtgcttgtggaagacaagtctgtggcttggtgagtctgtgtggccagcagcctctgatctgtgcagggtattaacgtgtcagggctgagtgttctgggatttctctagaggctggcaagaaccagttgttttgtcttgcgggtctgtcagggttggaaagtccaagccgtaggacccagtttcctttcttagctgatgtctttggccagaacaccgtgggctgttacttgctttgagttggaagcggtttgcatttacgcctgtaaatgtattcattcttaatttatgtaaggttttttttgtacgcaattctcgattctttgaagagatgacaacaaattttggttttctactgttatgtgagaacattaggccccagcaacacgtcattgtgtaaggaaaaataaaagtgctgccgtaacc

SEQ ID NO: 467 - DNA, 1826 bp, Homo sapiens
  misc_feature (91)..(91): second gene starts at position 91
ctcaaatccgtgctactcagagaagggaggcaggtgaggctccttcagctgctggcctggatggacagggaacaggcagggctccgggagctttcaactggtcagcaaccacgctctggcccagccgttcaataactttcccatcttccatttcgtaccggtcatctaagtattttgcggtggcctcagaaatgtgaactttgccggccactcccagctgctccatgagattggccaggttcacatcgttggaccacacgtcaaatttaaacctcctcatgcccaggatgccgcaaaggacggtgcccgtgtgcaccccgactctcatgttcaccatctccttcttctcctggcagaactgctcgatggccttgatcatgcccaggcccatctcgatgcagcagtaggcatggtcggcccggggctcgggacagcccgccacgcagtagtaacagtctcccagggtgctgattttctcacacttggtctcctcacacaggcggtcgaagcgaccgaacagatcgttcaggagacccaccagggcgtgggcagacttgttggcactcatcttggtgaagcccacgatatctgcaaataaaatactgacttcttcgatctgctgcatcttaaaagggcggaaggctataggagctttttggatggaagactttttcttcctgttcttggggctcgaggtggcatgcctcttgacagaattctcactctcctcatctccctgcttcattaagtcatcggctatgattcttggcatcacggaatgaatcatcctctctttgagggctttttccacttccaggtccttcccgtgcataatggattgccccaccttgaggaaggtgctcctggacctcacctgggacatgacgaacaggtggaccccgatggcgtggatgcagccgtggagcagccccctgctcagcagctcccagtgcagggccccggctccgggcgaggggaagcaggcttcatcccggaaatggtagccaaaggtctcgaaaaggacagagtaggccacccccagacacaaactcaggtacaaaggtaagtgcatgacggtatagagcaaaaagagcacttcgatgcacatggagaagctccccacttgagataagcaagtatctgtgggccgggctgtggccgtaaggttggagctgtcgccgcgtcctgagacaggcgtcaagacctggaactgcgcagccagggtcagggcgaacaccagcagggtgagagccagcgaggtccacgcgtaatgccgggcgtacagcttggtgaaggtaaacagaaagaagcccacacacaccaggaggaagcacagcgcgggggcgaccatgacgatcagtctggatctcatgtggaccgcaaaatagatgctccacagaaggcaggcgaagccgatgtagaagagcgcataccggaaccggcgctgggtctgcgggaagcagcgctccaggcaggcctcctccaggttcaccgagtcgaacttggggtcccaccagcggctggaggccctctcgaacagctggggcagcttcttctgcctgcgcagccggcctccgccgcccactcgccgggggacgcccccggagtccccagagctgctgcagctagaggagatgctgtatttgcagtgcttggggtggctgttggaggacagctgcttggggttgatcttgacgcgcacgctgttgctgtccccgctggagtcgcagctcacctcggtgctgtggtgatgcagcagctgctggtggggtggggaagccatgttgtcgagtcccggggcctgccccggccggggtcaccagtac

SEQ ID NO: 468 - DNA, 1531 bp, Homo sapiens
  misc_feature (298)..(298): second gene starts at position 298
ctctgtgacttcctggagactcacttcctagatgaggaagtgaagcttatcaagaagatgggtgaccacctgaccaacctccacaggctgggtggcccggaggctgggctgggcgagtatctcttcgaaaggctcactctcaagcacgactaagagccttctgagcccagcgacttctgaagggccccttgcaaagtaatagggcttctgcctaagcctctccctccagccaataggcagctttcttaactatcctaacaagccttggaccaaatggaaataaagctttttgatgcaaaaaaaaaaaaaaaaattttgtatgttgatgtttgtataccgttcagtataaaagtgtcctaagcatattagccaatcttttcacagtagagcatacttaaggctgcttggtactgagtatacttaaatataactccagaatccagggacttggtgttaaaacaggattagagcatgtaaaggtacatctagattcatatttgaatcttaaactgtatttttctcttagtattgctaatgagtaaagaaaagtctcataaggtagccaaatgaaaaagaatgaaagggaaagtgaaaaattaaggggacaaaagatgggatgtgaaaagaagaattctagtttgatggtgactcatattcacgataggatacaaagtgtgatttgttggaaacatgtcccaaatttctaaaattctgcttctctgccaaaagcaatgtctttcttggttgatatttgagttttaaaagggtcaaatctttctaattttttgtatctttagagggcagcactagaagaaatcagcaggtctaatcccaccagtaagaaaactaccacttcttgatttttacagatttaaaaaaatcttttcagtgacctttctttttaatgtaaatacaaatttaaacctaggcttaatataggcgtttcccctttcacccaagtgatgtcacagttcgatgcaaaatcaatgatccagaatgatcgtgggtaaaaataactcaaagtgtttcttaagggtgagttggcatgcaaaaaattacattgattacagtgtgttttggagctggctctgtttgtgtgcatatgataatgcagagttgagccagagcctggaaatgtcattctagatctcactaactactggaatcagtgttttaatctcttggtggaaactttcagttgcttaactctctattggaagatttttttaatgttctacatcatttatgttgtattacaatgtatgtagaaatagtaacctgtgaactatgcttttccataactttttaaaaatatatatatctaaatgaatgcaatgtgcataaatattttttaaacataacagtgaactattgcaccttttgctaatgcctctatttacttgctttggcataaagaatgagccaatgaacctctgtgtcctgtggaaaaatgtataaatgttatctgatattgctcttagatgtaatgctaattaatgttaaatcacaaataaacagtattttaaatata

SEQ ID NO: 469 - DNA, 259 bp, Homo sapiens
  misc_feature (113)..(113): second gene starts at postion 113
gtatccacggaggtccgggccatcattgcctggatggagaagaaccccttcgtgctgggagcaaatctgaacggcggcgagcggctagtatcctacccctacgatatggcccccccgccccccccgcgctcactcgcactcacacccgggcgcaggaggcgggcggcccgggccccaccggccccccatggacgcccccagcacggggcgctgagacccccgcgtcgctgcccagcccggtccggcgcgccacgccgag

SEQ ID NO: 470 - DNA, 383 bp, Homo sapiens
  misc_feature (239)..(239): second gene starts at position 239
cttctgcggccgtccctggccgcttccctggcttgccccccgcctgggcttttcggacccgcggggtgggctcgggaggcggcggggcctccacgtcgtcctcccggggctcaggttctagctctgacaggaagccctcgaggaactcctcgatctcgtcgtcggtcagcaccgtctgcgggcgccctccagggcacagggccagcaacgccaggaggcagctgagcaggggcgccccccgccccccccgcgctcactcgcactcacacccgggcgcaggaggcgggcggcccgggccccaccggccccccatggacgcccccagcacggggcgctgagacccccgcgtcgctgcccagcccggtccggcgcgccacgccgag

SEQ ID NO: 471 - DNA, 4809 bp, Homo sapiens
  misc_feature (241)..(241): second gene starts at position 241
cttgggatagtgcgaagatccccagatccttggtttgcgtcgggctgctgccgggagaaccaaacctccagcagcttctcggtcccttcgaaaaaatgtgcagcttccatcaccgtgagactagcgaacaaccaacaaccacagaaaatcaactaaattaaacctcttctcccgccgctgccgccgccgctgcggattgttccagctgtgttactaaagttcaggttccttttttttttttttttcggcttttttttttttttctcacaaactggttgcatttgttgatttatttttccatccttttcaccagtaaagattatcatcgtttatttttgtttttaaagttgaaaacaaaaaagaggagagaacagagttatggtatgaatgtatgtaaaactatagagaactacagtaatatgtactgtggttattgctgtcttcaaaaaaaaaaagaaaaagaaaaacaacaacaacaacaacgaaaacaaccggtaggcaactcggaatctgaaggaatcttgtctgacaactgtgctatccatgtgggctacggtgtgacagtggcggtagagaggagactccggctggcgaccggggactggtggagtggggtgagcgggcacagggaagctggggtccccttcccctcggaccctccccaccttccctttccccatccaaaaggatttcaggagaggaggccagagtctgtgaaatgactaaactatatactccattagaaaaccaagaaagtatgtttgaaatagaaacaaaagcctaagagaaaataaaaagtggagaaacagtgcaatgtaattcttgcactttagtggttttaaaaacacagacagtacaaggcccaggttgctggctggtgaaacccctgtccctcgtccctcctccactttgcaaaacggagcctcctttctcttggaagccagacatatcctctctgacgctatggggtttcttctccttagagctcttctctgaggttcccattctgggccggagccctctcaggagtgagtggatgggtccggggtactgtcccaccttgaggggggcttggcggttgccgtggcagccctgtctcactaaccggtgcgtggcgggagcaggtggttgaggcccaccctctaggggaggccagccctgtgggggtaccatggaggccacagaggtggtggtggggagatggggtgggagagaaggggcatgatcagaaaagggcctccctggacctcgtgcgcctgccttcctcccctcatggggccagtgtccccaggcctgtctgtctaggcctggctgtcaaagaaaggttccagtctcttcctccccatgtgccctgctttgccaggtgggtcagggcaggctggaggaaggagggtcagtcctggctgggcttccctatctcctggcagtcgtgggaaagacagaggcatcttcctcactggtggagtgaggcacgaatctaaaggggatgggaagaccttctgtgggtgtgagcatgggagtgggcagcacttagattcggagccatggatagtccggagtccaaggtctctgggtgagcagacagtcggccaaaggccagcctggagtcaaagagaccagacccctgcttagattgccatactcgcaccattccaaacctgcctccctcacaccctgccatgggggaagaggtgccgtcttcctccagtgcctcccttcccaggatctccccaccctgggctcagccagaactcccatttgggaggcttagttccatgtgtccatgaaggcccagcttctctggggagtgaccagctgcccaggagaaactcctgcatgcagaagagactcacaggtttgggttcgcaggcacgaactttggaaaccggaagagtctggcgcacttacaccaggctctaatcccccacctgatggctggcagcaaagagccaacgcaaggggcagaagcctgctcaaagtccagacacagtccgtgaagagagagcccctctcaagaattaggtccaggctgggaggaatgtggggggagcttgtagttcctggctcagtcttttctcaggggagtggcaccccagtatccacttggcagatcctagttggataactgctcaagatgcaaagggagaatgggtggaaagaacagtgacgtggaagaggtttgggatactggcctaagacatacagaaacgtgagttgggtttaggggacagctgtgcagagagatggggcatgctgactcggcaggtcaaggccttgtggctgctggccctatcgggcccctttgtctcatgaagattgagcacttctcctgtccccagccaactgtcctgtccaggggcataggagatagcccccaagttctatagctatagggttcccatcagttgaaacagatttgctttttcgctattcctcttcgtagccccaaattcgttgttggaggcggtctccgctgtgtcatgccatgagcaaagagtgaagagagctgtgtccacagcacgaaggggtctccttggccagtgtccaagccccctttcctggatatcttcagccttaaagaacagtcacaaggccacccattggttgaggaagtcattggagaatgggagtttcggaatctggctgccgagtgacagcatccctgaatcatgcgttccctgcttgtcccagctttccttccatcctccaccccagggaggatgcagggactggccagaatggaggaagagctggaaagactcgtgggcctcagtccctcattgcaggctgaaggtgggcagcggagcacatagtcttgtcccttccaaagcatggccagtttagactgattcttcctatctggcttctaaagtctagcaccctcctaaagttactcaccttccctggctctgcggcctggattaagctcatttctattttgcaacccattcccccattttcctctctttcctctcaaatcctagaaaatacatatggtggggaagctaaggaaatttctattggcttttccccctttctgctgctttgtgccaaagctagaatggaacagtcagccccctctcccttcagccctctgttcctccccacatcgactctggccggaaccatccatcttactgttctcctgcatctaaacctttttgccaccatctccctctgccatctcttacttcagtctccctcctgctctgccagcatggagagtgagggaggcttccaaaaatgcacattctgttcagatgaaaggaaaaggctggggtgggactggtggatccatcgtggacctgttgggctcatgtggtgtggtgtccggagactgtgacttcctgagggtttaaagactaaaatgggatggactgaggcgcgtgctgtgtgcaccacggagggctggcctctgcctggctcggtgggtgcagatgaacacacgtggggaatcactgtcaaatccagtactgtgccccacaaaaaagctgagtttattgctcacgggaaactctgcctcgaggcaggcaaaaatgctattacgggttgtattaggagaatatgggttttctcagttttcccagaatgaggaagctcctcaatgcccctataggaactactttgaaaagttaatgcaaacctttgaaagaaaggaagaaagaaaaaaacaaagaaaaagaatagatttatatgcctatatatgactatatggagtcctgtagataaatacgagcccacttttttttttcagcctatcctcccccacagaggctgctgcgctacttacaaattgaattaaatgagggctgaaacggcacgcttcagcatgtactgtagtcaccgtggaagaacaagtctttccaatattggggcatgtattgatttctaaaaaatgtctgcctggggaatgaaatatgcacatgtatttcatattcacagatctgcttccgaaaacctctctatttaatatcactcaattatgaatttgttttgctttcagaggaatggaatgcattttagtttttataaatttggggagagacaacactctgcccaggtaagaggagaggaagttcaggggtccagctgtccatactgctggctagaggaggagacagatccgggagaggtcctggagtgttttgccttttcctttctccccctgaccaatccatcctgggaaaccccaatagtgtcattgattgccacatcctgggctgcatcttctagcgcccacctctcccgaccccaggccagggctggacgtgaaagttgggcccctgcctggtctcggtgcatgtccttcctgcccacctgcttgtcttccttttcctaactctattcgtctttctctctcttctacacaaacacttccttcccttctcttcctctcgttcttcctctcttcccttctctgttcatccaacttgcctcaaaaagaaaaccatttaaagggggggggtgtctttttagctttttgcatctctgttgttgccattttcgaagttgagcccttgctagagattccgaggtcctcagtttcctcaaatagatagatatatatttttcccttaaatgagatgaaatgagtggcgtcctggggtggagggaggcgctggctggagtcggggctgggggtgggagggggtgagggaaaggttggggggggacgcatcactcaacgttgctgctgtcgaaggtgtggcactgaaagtccccgtcaacgtactccatgcctggcagcttcatcccgtacttgtccacgcaccagcagatgccacgtttgcggccacgggaaggtttgca

SEQ ID NO: 472 - DNA, 330 bp, Homo sapiens
  misc_feature (156)..(156): second gene starts at position 156
atttccaggtggaacttcttttggataaactcaagcaaaagggagcaattcgacgagcactgtttctctacagcaggtccccaagtcactccaagaacatgactatttcaagggggggactgatgcagtgtgaggaattgatagcgtatctgcggtcaagagaagagagcagaaagcaggctcttgctgctaaaagagaaaaaagaaaagaaaagagaaaaaagaaaaaagaggaacagaaaaggaaacaggaagaagatgaagaaaacaaacctaaggagaattcggaactaccagaggatgaagatgaagaggagaatgatgaagatg

SEQ ID NO: 473 - DNA, 2781 bp, Homo sapiens
  misc_feature (443)..(443): second gene starts at position 443
acaatatgaatgatgattcaagtaacttgaaagaaggcagtaaagacaatcccgaacctctaaagtgcaaacaagtgtggccaaaaggaacaaagcgcggtctatctaagtggaggcaaaacaaagagaggaagaccggatttaaactgaatttgtacaccccgccagaaacacccatggagcctgacgagcaggtaacagtggaagaacagaaggagacttcagaaggaaaaaccagccccagtcccatcaggattgaggaggaggtcaaggaaactggggaagccctgttgcctcaagaggaaaacagaagggaagaaacatgtgcccctgtaagtccaaacacatcaccaggtgaaaaaccagaagatgatctcatcaaacctgaggaagaggaagaggaggaggaggaggaagaggaagaagaggaagaagaggaaggaggtcttcgaggggagaagaggaaacgagatgctgaagacgatggagaggaagaagatgactagatcattctaagaccagattctctaatgtttctgggtgtgcaatagagtgatcacatctttgtttcttcatgtacgatagctatccctacagaagataatgtgtaactttttataggaaaagtgtggttttactatttttgccttatcattccaaataagaactagtctgttaatgatcatattgtatgtagagaaaaattttcattgactcccattgtggaattccctagcaatttatttagacttaattttttaaattcaagcttactgtattagtcatttttagcccataattaaaacatgatcacttttacacaggtgtagtatggtgcatttcattccttatttataaattaactgaaattacagtttgctataatataaaatgacaatagtctcttgagtggtaagttggttatttttttagaggtgatccaggaatctttagtttgaaggcagttaccttttttttttttttttttttttgactaagagtgtttggttgcttttttgtcacaagtaacttggaaaatagaagcagaatagtaaaggttctattcagcaacatagttcatggattttgtggaggttctattcagtaatatggttcatggatttagtggtgactgataagattttatttttgaaggaaaaattgcttatactaagtccagagacatgcaggtgagcccttttgtcaggctgcaaatcatgacatgccgatggttgtttattttgtttttaggtgtgcattctttttcttcttagcaattcctttatgatcaccttcccttcttgtttcactccctcccgctctctcaaaaggaacttgggaaacttgtgaaacccaggaaaacctttagtcttatacctcaactacctttcagtcctgtctgggttttaaataagtgaagtagaagaaattgagtattttctgacataagaatatattatcaatacagttttatgcagtaagctctccttaccataaatgtttcttggttgacaacatctaagacaatattagtgggatgaagaaagaaaagcaggggtgcttttggaagcagtgttagtgttcctcaaaagtcggaacaattgcctgttgatatattaataagacattaaagtcaaattttaatgttggcctctcaaatgatttggataccactctgcaaagtatttctaacctttaattcccagttttaaaacagatataataatagcatttaattggaatatactaggcagctggaaaagtatttgaaactaaattgacattaaaattaagatttgttttcaagtggatgtccattaaaagtagaaaaatatttgggataagtgagtgtgtgtttccttacatggctactaaataaaatataatgagtatacaagtatatctcctcttttgctatggaggctccatgttcaaggcaatggctttttaaatcttggctatctaaaattttttccctttgttttgaatatttgtaagtttttaagaagttagtgtcagcaaattaattgaagttatgcttctatactgggacatatttaaatactgagtatagtactgctgctactgcttctacaatgtaaaatgtatgacttggtgttttaaagtaaaaattatgatgttacttgtggagaaactaaaaatgttgtacaactgaccgaaagaaaacccttggggataagtttagtgaggggattggaatccccaaaaagataacatttttcttctgcttttaaaaactgaaattccctgttctagttcctaacaattctcattacatactatgccagattacaaaatacttatttttaaaatgaaatctatatattgactttcttatcaatcatcttactgtgcaatcaaaattagagtactttggtttgaaaacaacacttagagcctccagataacttttaagacttatttagctttgtgggtggtattttcatgcaaataagtaagggtgggttttatattttgtagaagttttcggtcctattttaatgctctttgtatggcagtatgtatatattgtgttaagttcctcaagaatctccttaaaaactttgaagttaatacttttgtgcaactgtgttttgaataaagccatgacagtgttaaaaacaaacaaaaaaatttgcagtactcctgattattcttttattgtttttgactgttccctgtttttttctgtgactgctgtaacttaaagtttttgaaactgaattgcttcaaataaattgaagatttgttataatgatt

SEQ ID NO: 474 - DNA, 3494 bp, Homo sapiens
  misc_feature (76)..(76): second gene starts at position 76
cattagctaagtctgttctgccatctgtgctgctccctttgctggacatcttgaatgatgtttgctgtagccagccttggcctcccaaagtgctgggattataggtgtgagccaccatacccggccataccaaataccttcatttttttaaaaaaggctgagcacagtcactcatgtctggttggctgaggtgggaggatcgcttgaggccatgagtttgagaccagcctgggcaacatagcaatacctatctctaaaagacagaacatctaaattctaccctggaggattgagaaagggaacatgacactggaattggacttgtaggatgggtagaagttagaatgtagagcaggataagatggaagaacattctaagaggacacactagcacaggcagagaaagaggcaataatgagcaaagcatgttcaagaaacaaatggtatgtcataaagacaatataatacacattagcagtagggtgggtaaggagagggaagataggattagaaggtaagctggaatcagatatgaagggccttgtatatcagactaaggagttttgattctgcaggcaatgatgagccactaaagatttcagaaagacagctattcattatagttgtcaagacaactatatcataatagacaaatgggttagaagaatagggtagtagatactgtatgttagctttaattcagcacctgttcccaaccccttaccccttgccttcctcaccacaggggaaaagaaacatgatttccctattccctatcttccttgagctaagtgtgtggctatatgacaagtactggttgagatatacacagaggtcttctgaggagattctaagaaagcatttacttttctggtaaaagggagtcagacgcatcttgtgtacatttttatctgctatttcctactttgaatgtgtatctgctccctggaggtacagcagacatcttgtgaccatgaggtgacaaaccagcatgctgtagaggacagagtggaaagagaaaaagtctacgtccttgatagcaccaatgagccactgtcccaaccctatactgcctaattctaggctataaataggataggcctttttttttttttttgcttaagctaatattaaatatttgtttaactagtttactgtcacctgcaagcagaacatattctgaaatgagagacagcaagattgacagtgagcaaattagcctgaaggctattacagtaacccagaaaagtgatgatgatgacttgagggagagtaattataggattagagaagacagaatagatttgaaggagcgggaggtagagacaattttgttttaggcacattgacattggcatatctatgggatgttaggtgaatataactagtaagtagaaataaaggtctacagcactagagagatatgggggttgaaaatatgaataataaaacaaatggtgcctgaagccagtgaagtctgttaaatgaaaaatgagtgtgcatatagaatgagaaaataggactagggatgaaacttgagcagcctcagcatttaagggattcagagcaagagaagaaaaatgaagaataacaaaagcaggaaaaatagagagcaaagggataagtgagtctcaaggagagagtggtgaagagtcaataatgacataaaaattcaagtaggggctgggtgcggtggctcacgcctgtaatcccaacactgtggtaggctgagtcggacagatgcttgagctcaggagttcgagaccagcctggacaacatggtgaaaccctgtcactaccaaaaatacaaaaaattaggcatggtggcgggtgcctatagtcccagctacttgggagggtgagatgggaggattgcttgatcctgggaggtggaggttgcagtgagctgtgtttgtgccactgcactccagcctgggcaacagagcaagaccccatctcaaaaaaaattaagcaggtatggaggccagaatgtcacaagacagagaggacttgaaagtagggaaaaaagggacaatatttacttttgtcaaaaagtaacaattactttttaaagaagtataacaattataggaaggagagagaaaaaatagttcaagggaagaggccaagttaaggaaaggtttttgtcttgttttgttattgttgatttaagacagagaagacctgcagctatgtagaggtggaggaaagaaactacagtatctactaccctattcttctaacctattcttctaatttgctcactgtaaaaagagaaaccgaagactagaaattaaacagggtggaatatggtcttagatgggaaggaatgaggtcaagaacacaaagagaagcatgtcttagaaaagggggatgcatggctgaaaagaggtaagtcttgaaggtagatgggaagaagttttgggaatggtcatatctaataatttagttttttctctatgaaataggaggcacagtcaactttgacagttctaagaggcttgagaagaataaaacgtttgtaatacctcttccagggaacacaatagtaaaccacttaggaaccagtagaaggattgctaagcagtattaggaagcctgtgtagcatatggccctctcaaataggtagagatgtttttagatatttaagaggaattaacattaacaaaaccaagggacaaagccaagctcaagtcccataaaacatggatattttattccagctctaggaaatgggaaaaaaaaaaaaaaaaaaaaaaaaaaaaacagagggaaacacacctttccatacaccattctaatttaactagcattaatctgggaaagctagagcagaaatatatgtttatatgtataaatatgtatgtatttatacatatatatgtataaatatgtatgtatttatacatatatgtataaatatgtatgtatttatacatatatgtataaatatgtatgtatttatacatatatgtataaatatgtatatgtatttatacatatatgtatatgtatttatacatatatgtataaatacgtatttatacatgtataaatatgtatgtatttatacatacatatatatatatgtatttttagattttaatctcactagaattcatgtcttcatttttttttaagtgcccttaaaggtcatcaaatgcaagctaatacttctacctaagtctcctcatcaatcatttaatattgtttacactgcattcacagtttgtgtgttaaccacttatgtaatttatcaaatggcatatttggaaatgtaagggagaaacttggtttaggtaatactctatgtatcagttacccattacatgatttattttcatcattatttgcaacgccacacatcttgtagttttctgtgtagtctctgcatgcagtctacttcagcttctagtgctgtacatatctatatcttctgggtgggactgcccgtgatccatgagcttggggtcaggcataaactgggttgcac

SEQ ID NO: 475 - DNA, 2180 bp, Homo sapiens
  misc_feature (353)..(353): second gene starts at position 353
ctttaggacagaagctaagctggtcatgtgctcattgagggcaccctcagattccttgtaggtcaagcaagtgaactggtactcctcgggatcaaaggcatcagccccctgctgctccacatcgctggctactcccacgtaatagtcctctatgtccccagggtcgtcttcttcttcttcttcctcttcctcacaatttgggtcatagtcctcttcattgctgtcagacccctggctattcatgtccactgacatcttagcatccagccaagttgcagatcaggaaagcagttgctttttccccctccccccaaaactaccgctttctcaaatgcattagtatttttgtcttacctgtaatcccagctactgaggcgggagaatcgcttgaacctgggaggcggattgcactgagccaagattgcaccaagattgcaccactgcactccagcctgggtgacagaccgagactccgtctcaaaaaaaaaaatcttgtttccgtagagtgcctcggggaacctagtttgggaaatgctcatttagggacctgtcgtaatgtgtgcaggggtcctctcacagaagtgtcctaattaaccacacacacttctgctgctggagctctgagcacaggcagaatgacactaaaatattcagcattgaaaggacacaagaagggaaccatttgcagtttcaaaatactgcttcacgccaggctgcatgttgccttacgaacgctgggcaccttggcgtctctcatccaaactcttccaaaactcccacttattctttgctcccttgatggaaaagcagtgatgtttgccccacaaatgacctgtgacatatgattcccaattaatgtggctgatttagtggactgttttttgtttttatagagatgggtctcacaatgttgccagggctggtttggaactcctggtctcaagtgatgtccgcacttggcctcccaaaatgctgagattacaggtgtgagcctccacacccagccttgagggatgttttatcctggctgtcacagggacacgtgccctccctcactttgtcaggggagctgtgctgtaggatgtagccctttggggctgctgaggtgaaggatgatggcacttggtaagattcctccggggcaccggggaccagcatttctgcctgctgtagaatcagcacatgctgggattggcaccacagggaggccaaggagggagtgtcaggaagcagtcagggctgaaggccttttcatacacggggaggtgaccacttgggggcccgacagtcagggctggcagcccgggaggactgttagacactggggtggacactgctgcaagcacaggggctttcggggggacccactggtccctgggcttcctgggctaacaagagagacccttccagctccccttggccctcaccggccaccacagccccctcaaggacccctgagcacggctcctcctgcgcctctggtgtctccactgggaccccatgtccctggacttcctggtccccctcctggctgcccttctcctcttcctctgcgcccctgccctccaccatcctggctccgtccccaccgcccagtgcagccctggtgggggacttgaggttctgggtggcggccaagatgtcggcctggagctgccgggaggaatccagggcttcctcgggcctgctgtcgggggctctgtcggggacctcactgaaggcccgggggcccccggcccggtcactctggtccacgtacttcttcttggggaaggacgatgggtaataggccgaggccttctgcttctgccgggtgatgaccgcggcacagacgatgaacatcagcagaaaggccagggagcccaccacagcaatcagcatcacgtactggcggaagaagtccactatcccatccaggaagttggtggggggtgatgggccccccagggttatgggctggggccccatcgatgtggggctgagggccggggtccagggtggcgggaggctcggggaggaggccgacgagccctcggcctccccactacccgccacatcctccaggaacgtggccttcaggggcacagagcgggcgtcggtagcaggcacagaccccaggagcagcaacagaaggatgaggaggctgggggctgccgccgaaaccatggtgcccccaggac

SEQ ID NO: 476 - DNA, 548 bp, Homo sapiens
  misc_feature (85)..(85): second gene starts at position 85
atctccagcgttctagacatggaggccatcactttcaagaagttggtgaagggccatgcctactctgtgaccggggccaagcaggtcctggagctggactccatccgcagccaccactggtgcatccagggctgcagcgccgtcaccggggagaacctgctgccgggcatcgactggctcctggatgacatttccagccgcattttcacagctgactgaaccactccagatgccccccacctagcagtccaggtccctcaaccttcaccaaacactacccatggggggttgggagtcagccggccaaactaacactccccctcctccaccccagcctgctgctgctactgctgcccgctgctgctctgtggccacccggctcccatggcgggagggctgtgccctggctgtctctctggctcctgacctggcctttggctaccataccaagaagagagggctgggcggggaggagctgctactgctgctaccgaggctgtgggcctcatccttcactcagttgtgaaataaaccgctccttgccccga

SEQ ID NO: 477 - DNA, 441 bp, Homo sapiens
  misc_feature (298)..(298): second gene starts at position 298
gctgccattcggcaccggagtcgctccgcgctcccagaatgcaccggcagtccgcgggaaaccaaaatggcgaggggctgtattgaagtgggctgtgtttgaggccggtgtaagaacgctcattctacccccaacccttgtctccaaggacctcggtttgtgcgtgcatatgtgccgggtacccggtggggcgggtgcccagtaagtgctcggactcgcaggggaagcgcccacggggacggattggttgttttttcctgtatgaagcggttggcaccactgaagtgaccgaatgagggcttgctctcaattttgcgcaagttgaaaagtgcaccagaccaggaggtgagaatacttctcctgggcttggataatgctggcaagaccactcttctgaagcagcttgcatctgaagacatcagccacatcacacctacacag

SEQ ID NO: 478 - DNA, 441 bp, Homo sapiens; identical to SEQ ID NO: 477
  misc_feature (298)..(298): second gene starts at position 298

SEQ ID NO: 479 - DNA, 9031 bp, Homo sapiens
  misc_feature (72)..(72): second gene starts at position 72
attggccacatcgaaggacagcctgaaaggaagggggtctttccagtgtcctttgttcatatcctgtctgactagcaaaacgcagaaccttaagattgtccacatccttcatgcaagactgctgccttcatgtaaccctgggcacagtgtgtatatagctgctgttacagagtaagaaactcatggaagggccacctcaggagggggatataatgtgtgttgtaaatatcctgtggttttctgccttcaccagtatgagggtagcctcggacccggcgcgccttactggtttgccaaagccatccttggcatctagcacttacatctctctatgctgttctacaagcaaacaaacaaaaataggagtataggaactgctggctttgcaaatagaagtggtctccagcaaccgttgaaaggcatagaattgactctgttcctaacaatgcagtattctcaattgtgttactgaaaatgcaacattagcaaagaggtgggttctgttttccaggtgaaacttttagctccatgacagaccagcctgtagttatctgtgtacacagtttacagctacaaaaacctactttggtatttattacagaaaagtgctcagttaaatgtaagtgttattccttcagcaaaatattcactgacccaaaactctttatggcattttacaatgcacacagcctcatgcaagtttagacaagtggatttatactgtcttatgagtgcccgcccctgatatattacctcattatgcaaaaataacatatctttcatgactattttgacaaaagtttaaaacacatatgaagttcaaatttcaggaaccaaggactgccagaaaatattagcctctacattacgcatgcatttagaagcttacctgaaatctgccttttataaaggaatagtatggataagtggaattgtacattttttaaacttgattgccattaaagcagaaattataaggttgcaacaatatttgtttctaatcactggctttctcaagagtatggattgacatattgtgttatgaatgcacatctctcagatgtgttgaagcatccattgcatccattttttattattttcttagttttgttcttggacaaatttaaacttttaaaagattattcaagatgaatttaaaagtcaacccttcacacagtttccctactgtatgtagaatccaggtgctgaaaccaagtgtttcttttcccatgctctttgttaaaccccaattatagataatttttccagtcttaagctctgtccaccttcaagtcaattcataaccaagtttttgaacgctgctatgaattgcactgtgaaaagcactcttccctctcagttttcttttcatcccagccatgtttatcagatccttaagaacattgtatttcagtcttttacatcagtctgaattttggaaaagaatgcaatagttgtactccacagtcagtggaactgttccctgagtccgaggctcatgtgtcattctggcactacatttgcttaaattgctattttggcaacagcacagaaaactaatatttttaagcagagaatcttggcaatgagtgagagatgttaatttcacagaagcacaactcccaacccaacccttaggaaaagccctcttccatcgttacagtgctcagtgaatattaatttagttctgcttaagtggttgctatacaaactttgaatagccacctaataaataaaccttgcatgacaaacctgcaaaatattttatcagctgttattggaaagtgattttaagcaattgcttcctcagtgtcagggcacatgtgaatttccacaccaaacagagcatgaggaaccagttgacatgctgggttgtgactggcagctttagcagcctcggtactgaagccacaccagtgtccggatggaagtctgcatctgaggttgctcagtgtcccggtcattcatttacacattttaacttgcattaaagagctgttcttttctgtggcctagactcttttcactgatctcaaaataaactggtttttttcaaaaaaaaaaaaaaaacccgaaggtgattaaaagaccttgaaatccatgacgcagggagaattgcgtcatttaaagcctagttaacgcatttactaaacgcagacgaaaatggaaagattaattgggagtggtaggatgaaacaatttggagaagatagaagtttgaagtggaaaactggaagacagaagtacgggaaggcgaagaaaagaatagagaagatagggaaattagaagataaaaacatacttttagaagaaaaaagataaatttaaacctgaaaagtaggaagcagaagaaaaaagacaagctaggaaacaaaaagctaagggcaaaatgtacaaacttagaagaaaattggaagatagaaacaagatagaaaatgaaaatattgtcaagagtttcagatagaaaatgaaaaacaagctaagacaagtattggagaagtatagaagatagaaaaatataaagccaaaaattggataaaatagcactgaaaaaatgaggaaattattggtaaccaatttattttaaaagcccatcaatttaatttctggtggtgcagaagttagaaggtaaagcttgagaagatgagggtgtttacgtagaccagaaccaatttagaagaatacttgaagctagaaggggaagttggttaaaaatcacatcaaaaagctactaaaaggactggtgtaatttaaaaaaaactaaggcagaaggcttttggaagagttagaagaatttggaaggccttaaatatagtagcttagtttgaaaaatgtgaaggactttcgtaacggaagtaattcaagatcaagagtaattaccaacttaatgtttttgcattggactttgagttaagattattttttaaatcctgaggactagcattaattgacagctgacccaggtgctacacagaagtggattcagtgaatctaggaagacagcagcagacaggattccaggaaccagtgtttgatgaagctaggactgaggagcaagcgagcaagcagcagttcgtggtgaagataggaaaagagtccaggagccagtgcgatttggtgaaggaagctaggaagaaggaaggagcgctaacgatttggtggtgaagctaggaaaaaggattccaggaaggagcgagtgcaatttggtgatgaaggtagcaggcggcttggcttggcaaccacacggaggaggcgagcaggcgttgtgcgtagaggatcctagaccagcatgccagtgtgccaaggccacagggaaagcgagtggttggtaaaaatccgtgaggtcggcaatatgttgtttttctggaacttacttatggtaaccttttatttattttctaatataatgggggagtttcgtactgaggtgtaaagggatttatatggggacgtaggccgatttccgggtgttgtaggtttctctttttcaggcttatactcatgaatcttgtctgaagcttttgagggcagactgccaagtcctggagaaatagtagatggcaagtttgtgggttttttttttttacacgaatttgaggaaaaccaaatgaatttgatagccaaattgagacaatttcagcaaatctgtaagcagtttgtatgtttagttggggtaatgaagtatttcagttttgtgaatagatgacctgtttttacttcctcaccctgaattcgttttgtaaatgtagagtttggatgtgtaactgaggcgggggggagttttcagtatttttttttgtgggggtgggggcaaaatatgttttcagttctttttcccttaggtctgtctagaatcctaaaggcaaatgactcaaggtgtaacagaaaacaagaaaatccaatatcaggataatcagaccaccacaggtttacagtttatagaaactagagcagttctcacgttgaggtctgtggaagagatgtccattggagaaatggctggtagttactcttttttccccccacccccttaatcagactttaaaagtgcttaaccccttaaacttgttattttttacttgaagcattttgggatggtcttaacagggaagagagagggtgggggagaaaatgtttttttctaagattttccacagatgctatagtactattgacaaactgggttagagaaggagtgtaccgctgtgctgttggcacgaacaccttcagggactggagctgcttttatccttggaagagtattcccagttgaagctgaaaagtacagcacagtgcagctttggttcatattcagtcatctcaggagaacttcagaagagcttgagtaggccaaatgttgaagttaagttttccaataatgtgacttcttaaaagttttattaaaggggaggggcaaatattggcaattagttggcagtggcctgttacggttgggattggtggggtgggtttaggtaattgtttagtttatgattgcagataaactcatgccagagaacttaaagtcttagaatggaaaaagtaaagaaatatcaacttccaagttggcaagtaactcccaatgatttagtttttttccccccagtttgaattgggaagctgggggaagttaaatatgagccactgggtgtaccagtgcattaatttgggcaaggaaagtgtcataatttgatactgtatctgttttccttcaaagtatagagcttttggggaaggaaagtattgaactgggggttggtctggcctactgggctgacattaactacaattatgggaaatgcaaaagttgtttggatatggtagtgtgtggttctcttttggaatttttttcaggtgatttaataataatttaaaactactatagaaactgcagagcaaaggaagtggcttaatgatcctgaagggatttcttctgatggtagcttttgtattatcaagtaagattctattttcagttgtgtgtaagcaagtttttttttagtgtaggagaaatacttttccattgtttaactgcaaaacaagatgttaaggtatgcttcaaaaattttgtaaattgtttattttaaacttatctgtttgtaaattgtaactgattaagaattgtgatagttcagcttgaatgtctcttagagggtgggcttttgttgatgagggaggggaaactttttttttttctatagacttttttcagataacatcttctgagtcataaccagcctggcagtatgatggcctagatgcagagaaaacagctccttggtgaattgataagtaaaggcagaaaagattatatgtcatacctccattggggaataagcataaccctgagattcttactactgatgagaacattatctgcatatgccaaaaaattttaagcaaatgaaagctaccaatttaaagttacggaatctaccattttaaagttaattgcttgtcaagctataaccacaaaaataatgaattgatgagaaatacaatgaagaggcaatgtccatctcaaaatactgcttttacaaaagcagaataaaagcgaaaagaaatgaaaatgttacactacattaatcctggaataaaagaagccgaaataaatgagagatgagttgggatcaagtggattgaggaggctgtgctgtgtgccaatgtttcgtttgcctcagacaggtatctcttcgttatcagaagagttgcttcatttcatctgggagcagaaaacagcaggcagctgttaacagataagtttaacttgcatctgcagtattgcatgttagggataagtgcttatttttaagagctgtggagttcttaaatatcaaccatggcactttctcctgaccccttccctaggggatttcaggattgagaaatttttccatcgagcctttttaaaattgtaggacttgttcctgtgggcttcagtgatgggatagtacacttcactcagaggcatttgcatctttaaataatttcttaaaagcctctaaagtgatcagtgccttgatgccaactaaggaaatttgtttagcattgaatctctgaaggctctatgaaaggaatagcatgatgtgctgttagaatcagatgttactgctaaaatttacatgttgtgatgtaaattgtgtagaaaaccattaaatcattcaaaataataaactatttttattagagaatgtatacttttagaaagctgtctccttatttaaataaaatagtgtttgtctgtagttcagtgttggggcaatcttgggggggattcttctctaatctttcagaaactttgtctgcgaacactctttaatggaccagatcaggatttgagcggaagaacgaatgtaactttaaggcaggaaagacaaattttattcttcataaagtgatgagcatataataattccaggcacatggcaatagaggccctctaaataaggaataaataacctcttagacaggtgggagattatgatcagagtaaaaggtaattacacattttatttccagaaagtcaggggtctataaattgacagtgattagagtaatactttttcacatttccaaagtttgcatgttaactttaaatgcttacaatcttagagtggtaggcaatgttttacactattgaccttatatagggaagggagggggtgcctgtggggttttaaagaattttcctttgcagaggcatttcatccttcatgaagccattcaggattttgaattgcatatgagtgcttggctcttccttctgttctagtgagtgtatgagaccttgcagtgagtttatcagcatactcaaaatttttttcctggaatttggagggatgggaggagggggtggggcttacttgttgtagctttttttttttttacagacttcacagagaatgcagttgtcttgacttcaggtctgtctgttctgttggcaagtaaatgcagtactgttctgatcccgctgctattagaatgcattgtgaaacgactggagtatgattaaaagttgtgttccccaatgcttggagtagtgattgttgaaggaaaaaatccagctgagtgataaaggctgagtgttgaggaaatttctgcagttttaagcagtcgtatttgtgattgaagctgagtacattttgctggtgtatttttaggtaaaatgctttttgttcatttctggtggtgggaggggactgaagcctttagtcttttccagatgcaaccttaaaatcagtgacaagaaacattccaaacaagcaacagtcttcaagaaattaaactggcaagtggaaatgtttaaacagttcagtgatctttagtgcattgtttatgtgtgggtttctctctcccctcccttggtcttaattcttacatgcaggaacactcagcagacacacgtatgcgaagggccagagaagccagacccagtaagaaaaaatagcctatttactttaaataaaccaaacattccattttaaatgtggggattgggaaccactagttctttcagatggtattcttcagactatagaaggagcttccagttgaattcaccagtggacaaaatgaggaaaacaggtgaacaagctttttctgtatttacatacaaagtcagatcagttatgggacaatagtattgaatagatttcagctttatgctggagtaactggcatgtgagcaaactgtgttggcgtgggggtggaggggtgaggtgggcgctaagcctttttttaagatttttcaggtacccctcactaaaggcaccgaaggcttaaagtaggacaaccatggagccttcctgtggcaggagagacaacaaagcgctattatcctaaggtcaagagaagtgtcagcctcacctgatttttattagtaatgaggacttgcctcaactccctctttctggagtgaagcatccgaaggaatgcttgaagtacccctgggcttctcttaacatttaagcaagctgtttttatagcagctcttaataataaagcccaaatctcaagcggtgcttgaaggggagggaaagggggaaagcgggcaaccacttttccctagcttttccagaagcctgttaaaagcaaggtctccccacaagcaacttctctgccacatcgccaccccgtgccttttgatctagcacagacccttcacccctcacctcgatgcagccagtagcttggatccttgtgggcatgatccataatcggtttcaaggtaacgatggtgtcgaggtctttggtgggttgaactatgttagaaaaggccattaatttgcctgcaaattgttaacagaagggtattaaaaccacagctaagtagctctattataatacttatccagtgactaaaaccaacttaaaccagtaagtggagaaataacatgttcaagaactgtaatgctgggtgggaacatgtaacttgtagactggagaagataggcatttgagtggctgagagggcttttgggtgggaatgcaaaaattctctgctaagactttttcaggtgaacataacagacttggccaagctagcatcttagcggaagctgatctccaatgctcttcagtagggtcatgaaggtttttcttttcctgagaaaacaacacgtattgttttctcaggttttgctttttggcctttttctagcttaaaaaaaaaaaaagcaaaagatgctggtggttggcactcctggtttccaggacggggttcaaatccctgcggcgtctttgctttgactactaatctgtcttcaggactctttctgtatttctccttttctctgcaggtgctagttcttggagttttggggaggtgggaggtaacagcacaatatctttgaactatatacatccttgatgtataatttgtcaggagcttgacttgattgtatattcatatttacacgagaacctaatataactgccttgtctttttcaggtaatagcctgcagctggtgttttgagaagccctactgctgaaaacttaacaattttgtgtaataaaaatggagaagctct

SEQ ID NO: 480 - DNA, 1742 bp, Homo sapiens
  misc_feature (211)..(211): second gene starts at position 211
ttctttttaattgtttaactttattactgttgcaccatttatacaattacatataatttcaatgcatccattgtacatttttttgttttttttttgttttttttttccattttccaatgagtggtgtgttggtgtctgtgacacagaatggaagagaaactggaactgcaatgaacgcagactttttttttttttttttttcatttccacatgctttattccagcaatcaaaataattaaaaacatctcaaattattatacacatacaaaataggtacagagtcttttgcttcctcccacccctagggggaaaaactgctttgtgctttgggaagttgtctctgaaacccggggacagaggacgcaggacagactaggagggagccgggaggatgggctgcagctgtggaggagggtttcagaggagagaggtcggagagcagaggcctgagaagccagaggcaggtggagagagggtggaaagtgagcagcgggctgggctggagccgcacacgctctcctcccatgttaaatagcacctttagaaaaattcacaagtccccatccacaaaaaaaaaaaaaaaaaaagaaaaatatcaaggaataaaaatagactttgaacaaaaaggaacatttgctggcctgggggggcatctcaatttctatagcaccagtgattccctccccaccccacccatcacatagatgtagcacctttggtataaaatggggagccgcttccaccctgcccccatccccgcccccaggcagttgccccggtgacacatcaagacaagaacgaggtagtctttcagcaacacagttacacaaggaacagaacagtctctcccgcccagccctgcggcacaagggattgacacgcgttccccaaatccgatgtttctgctttgtcgtggcccttcctgactctcctccgaacccagtgaggggctggtggctcccccggcatgaccccctcaaaaacgaaggggagatgttgcaagagccatgggagcgccagatggcaaggcttctttggcagtctgagaaccccaggtcccccagggcctgggggtgctgggcgggcaggagcgggctgagggtgggggccacttgggtgtttgagcattgcctttgattgctgggcagacaatacattgtttcctgtgtcttctggggagacagatttgggaaggagtggaggggaggccccaaggggggtgtggagaaaggagcagaaagggcagcattggggtttcataagcccaacgggcagaaagggacttacccccgcatgggtcttcaagcaagtggaccaagcttccttttttaaaaagttatttatttattctttttttttttttttttttggtaaggttgaatgcacttttggtttttggtcatgttcggttggtcaaagataaaaactaagtttgagagatgaatgcaaaggaaaaaaatattttccaaagtccatgtgaaattgtctcccattttttggcttttgagggggttcagtttgggttgcttgtctgtttccgggttggggggaaagttggttgggtgggagggagccaggttgggatggagggagtttacaggaagcagacagggccaacgtcgaagccgaattcctggtctggggcaccaacgtccaagggggccacatcgatgatgggcaggcgggaggtcttggtggttttgtattcaatcactgtcttgccccaggctccggtgtgact

SEQ ID NO: 481 - DNA, 505 bp, Homo sapiens
  misc_feature (124)..(124): second gene starts at position 124
ggctccccaggccacccagggcaaccaggccctcctggacctcctggtgcccctggtccttgctgtggtggtgttggagccgctgccattgctgggattggaggtgaaaaagctggcggttttttccccccttttttttaaatggagtgtgctggatgtctctataattttattcagatgactgcagaacctggaaaagctgttgctgctattgatgcataacatactgctattggtctttttatataaatatatatatatatatacatatatatatataatttgaatttttggaaactttagctgtgctgtcaactttggaaaaagtatcccggtttactgtgttgagttggcattgtacagaaattaacagccatattggtctagaaacgttaaacttaatttttttccatttgtacaggggtaacgcactgtattaaatatgtaaggtcttatctacatgggtttgattacagaaactaataaagtattctctaaataatga

SEQ ID NO: 482 - DNA, 907 bp, Homo sapiens
  misc_feature (507)..(507): second gene starts at position 507
ttcgtttctatgaaattactcgtatttatttagtttttctccttcaacaaaaatggaatcaactataaaaactcttgcatcctactttttttcacttactaaatcttagagagttttctgtcaaaacatattgccctagctcatttaaaaaaataacatatatcttatcagtttcctgtgaatagccatttagtctgtttcccatttttattaaaacaatcagtgcccatgtttacttttttttttgagagggatttttgctcttgttgcccaggctggagtgcagtggcacgatctcagctcaccgcaacctccacctcccaggttcaagtgattctcctgtctcagcctcctgagtagctgggattacaggcatgtaccaccatacccggctagttttgtatttttagtagagatggggtttctccattttggtcaggctggtctttaactgctgacctcaggtgatatgcccacctcagcctcccaaagtgctgggattacaggaaactggagaggcgtggctggaccaagacctccccccatgtgagcaggcttcctcctcccccaacaaccgttgccaccacgcccagaaacgtccttaagccctggccctcaggggaaaggtaacaggaggccagagccgggaccatgtgacggcgctggccctcgccaccgccgtcccccgaccctggccccaggcccggcaccatgatgttccgagaccaggtgggcatcctcgctggctggttcaaaggctggaatgagtgtgagcagacagtggccctcctgtcacttctgaaacgggtcacccgtacccaggcccgcttcctgcagctctgcctggagcactcactggcggactgcaatgacatccacctgctggagtcggaggccaacagtgctg

SEQ ID NO: 483 - DNA, 129 bp, Homo sapiens
  misc_feature (57)..(57): second gene starts  at position 57
attcttggtcaagaggtgctgagagcttttggctcttcttctggctggactggatacctgaagagattttcccaatccctggcccagcttccacccatgtttctggagtaagcggtgtccaatattatc

SEQ ID NO: 484 - DNA, 212 bp, Homo sapiens
  misc_feature (82)..(82): second gene starts at position 82
gtgatcccattaagatactaatgccatcactgtctcctacaatggaagaaggaaacattgtgaaatggctgaaaaaggaaggtggtgctccaaattactaccccaacagctttggtgctccggaacaacagccttctgccctggagcacagcatccaatattctggagaagtgcggagattcaacactgccaatgatgataacgttactcag

SEQ ID NO: 485 - DNA, 2148 bp, Homo sapiens
  misc_feature (133)..(133): second gene starts at position 133
atggtgtcgggcaccaacgtgtacggcatcctgcgggccccgcgtgctgccagcaccgagtcgcttgtgctcaccgtgccctgtggctctgactctaccaacagccaggctgtggggctgctgctggcactgctcctacccacgcagatttattccagtgaaacaacaactggaacttcaagtaactcctcccagagtacttccaacactgggttggccccaaatccaactaatgccaccaccaaggcggctggtggtgccctgcagtcaacagccagtctcttcgtggtctcactctctcttctgcatctctactcttaagagactcaggccaagaaacgtcttctaaacttccccatcttctaaacccaatccaaatggcgtctggaagtccaatgtggcaaggaaaaacaggtcttcatcgaatctactaattccacaccttttattgacacagaaaatgttgagaatcccaaatttgattgatttgaagaacatgtgagaggtttgactagatgatggatgccaatattaaatctgctggagtttcatgtacaagatgaaggagaggcaacatccaaaatagttaagacatgatttccttgaatgtggcttgagaaatatggacacttaatactaccttgaaaataagaatagaaataaaggatgtgattgtggaatggagattcagttttcatttggttcattaattctataaggccataaaacaggtaatataaaaagcttccatgattctatttatatgtacatgagaaggaacttccaggtgttactgtaattcctcaacgtattgtttcggcagcacttatttaatgccgatatactctagatgaagttttacattgttgagctattgctgttctcttgggaactgaactcactttcctcctgaggctttggatttgacattgcgtttgaccttttatgtagtaattgacatgtgccagggcaatgatgaatgagaatctacccccagatccaagcagcctgagcaactcttgattatccatattgagtcaaatggtaggcatttcctatcacctatttccattcaacaagagcactacattcatttagctaaacggattccaaagagtagaattgcattgaccgcgactaatttcaaaatgctttttattattattattttttagacagtctcactttgtcgcccaggctggagtgcagtggtgtgatctcagatcagtgtaccatttgcctcccgggctcaagcgattctcctgcctcagcctcccaagtagctgggattacaggcacctgccaccatgcccggctaatttttgtaattttagtagagacagggtttcaccatgttgcccaggctggtttcgaactcctgacctcaggtgatccacctgcctcggcctcccaaagtgctgggattacaggcttgagcccccgcgcccagccatcaaaatgctttttatttctgcatatgttgaatactttttacaattaaaaaaaaagatctgttttgaaggcaaaattgcaaatcttgaaattaagaaggcaaaaatgtaaaggagtcaaaactacaaatcaagtatttgggaagtgaagactggaagctaatttgcattaaattcacaaacttttatactctttctgtatatacttttttttctttaaaaaacaactatggatcagaatagccacatttggaatactttttgttatcagtcaatatttttagatagttagaacctggtcctaagcctaaaagtgggcttgattctgcagtaaatcttttacaactgcctcgaaacacagaaacctttttaaaaatagacactccccgaagtcttttgttcgcatggtcacacactgatgcttagatgttccagtaatctaatatggccacagtagtcttgatgaccaaagtcctttttttccatctttacaaaactacatgagaacaaacagatcgaaccgttttgaagctactgtgtgtgtgaatgaacactcttttgctttattccagaatgctgtacatctattttggattgtatattgtgtttgtgtatttacgctttgattcatagtaacttcttatggaattgatttgcattgaacacaaactgtaaataaaaagaaatggctgaaaga

SEQ ID NO: 486 - DNA, 177 bp, Homo sapiens
  misc_feature (156)..(156): second gene starts at position 156
gggtctcgccggctcgccgcgctccccaccttgcctgcgcccgcccggagccagcggttctccaagcacccagcatcctgctagacgcgccgcgcaccgacgtaggggacatgggcagagcaatggtggccaggcttgggctggggctgctgctggcactggctgcccacttccggg

SEQ ID NO: 487 - DNA, 1630 bp, Homo sapiens
  misc_feature (982)..(982): second gene starts at position 982
ggagttagcgacagggagggatgcgcgcctgggtgtagttgtgggggaggaagtggctagctcagggcttcaggggacagacagggagagatgactgagttagatgagacgagggggcgggctgggggtgcgagaaggaagcttggcaaggagactaggtctagggggaccacagtggggcaggctgcatggaaaatatccgcagggtcccccaggcagaacagccacgctccaggccaggctgtccctactgcctggtggagggggaacttgacctctgggagggcgccgctcttgcatagctgagcgagcccgggtgcgctggtctgtgtggaaggaggaaggcagggagaggtagaaggggtggaggagtcaggaggaataggccgcagcagccctggaaatgatcaggaaggcaggcagtgggtgcagggctgcaggagggccgggagggctaatcttcaacttgtccatgccagcagcccctttttttccagaccaagggctgtgaacccgcctggggatgaggcctggtcttgtggaactgaacttagctcgacggggctgaccgctctggcccagggtggtatgtaattttcgctcggcctgggacggggcccaggccgggcccagcctggtggagcgtccaggtctgggtgcgaagccaggcccctgggcggaggtgaggggtggtctgaggagtgatgtggagttaaggcgccatcctcaccggtgactggtgcggcacctagcatgtttgacaggcggggactgcgaggcacgctgctcgggtgttggggacaacattgaccaacgctttattttccaggtggcagtgctccttttggacttttctctaggtttggcgctaaactcttcttgtgagctcactccaccccttcttcctccctttaacttatccattcacttaaaacattacctggtcatctggtaagcccgggacagtaagccgagtggctggggggggggggggggcagttcgtcacatttaataaaattctctccctcccttctcccgactgcattatctcatatttatttatttgagacagtctggctctgtcgcccaggctggagtgcagtggcgcgatcttggcttagtggcgcgatgacggctcactgcaacctccacctcctgggttcaagcagttctgcctcagcctcccaagtagctgggattacaggccagctgggattacgccgccacacctggctaattgtatttttagtagagacagggtttcaccatgttggccaggctggtctcaaactcctgacctccagtgatccacctgcctcagcctcccaaagtgctgggattacaggcatgagccgtcatgcccggctttctttttgttcttcaagaaagggaaggaaaataacattgtctttgagccagttgcgtgtcgaggaaataagggtacccccccaccacaccccaaccccctcagtgccctggggtttgaagcaaatgctcagagggcctggtaggcggatgggcgtctccggatgatgcagaaagcaataagcaccagggcgaggaggccaagaaggatcaggccgatgatgagaggcagcaagatggaccggtcactggggcaggagaaac

SEQ ID NO: 488 - DNA, 763 bp, Homo sapiens
  misc_feature (659)..(659): second gene starts at position 659
gtttctcctgccccagtgaccggtccatcttgctgcctctcatcatcggcctgatccttcttggcctcctcgccctggtgcttattgctttctgcatcatccggagacgcccatccgcctaccaggccctctgagcatttgcttcaaaccccagggcactgagggggttggggtgtggtgggggggtacccttatttcctcgacacgcaactggctcaaagacaatgttattttccttccctttcttgaagaacaaaaagaaagccgggcatgacggctcatgcctgtaatcccagcactttgggaggctgaggcaggtggatcactggaggtcaggagtttgagaccagcctggccaacatggtgaaaccctgtctctactaaaaatacaattagccaggtgtggcggcgtaatcccagctggcctgtaatcccagctacttgggaggctgaggcagaactgcttgaacccaggaggtggaggttgcagtgagccgtcatcgcgccactaagccaagatcgcgccactgcactccagcctgggcgacagagccagactgtctcaaataaataaatatgagataatgcagtcgggagaagggagggagagaattttattaaatgtgacgaactgccccccccccccccccagcaggagggacaggatggagctgccgtacgtgtccaccacctcctggcactcttccgacagggacttcggcagcttcgagcacattttgtcaaaagcgtcgagtatttcttt

SEQ ID NO: 489 - DNA, 763 bp, Homo sapiens
  misc_feature (658)..(658): second gene starts at position 658
gtttctcctgccccagtgaccggtccatcttgctgcctctcatcatcggcctgatccttcttggcctcctcgccctggtgcttattgctttctgcatcatccggagacgcccatccgcctaccaggccctctgagcatttgcttcaaaccccagggcactgagggggttggggtgtggtgggggggtacccttatttcctcgacacgcaactggctcaaagacaatgttattttccttccctttcttgaagaacaaaaagaaagccgggcatgacggctcatgcctgtaatcccagcactttgggaggctgaggcaggtggatcactggaggtcaggagtttgagaccagcctggccaacatggtgaaaccctgtctctactaaaaatacaattagccaggtgtggcggcgtaatcccagctggcctgtaatcccagctacttgggaggctgaggcagaactgcttgaacccaggaggtggaggttgcagtgagccgtcatcgcgccactaagccaagatcgcgccactgcactccagcctgggcgacagagccagactgtctcaaataaataaatatgagataatgcagtcgggagaagggagggagagaattttattaaatgtgacgaactgccccccccccccccccagcaggatggacaggatggagctgccgtacgtgtccaccacctcctggcactcttccgacagggacttcggcagcttcgagcacattttgtcaaaagcgtcgagtatttcttt

SEQ ID NO: 490 - DNA, 993 bp, Homo sapiens
  misc_feature (478)..(478): second gene starts at position 478
tccccatgtgagagcagcagaggcggtcttcaacatcctgccagccccacacagctacagctttcttgctcccttcagcccccagcccctcccccatctcccaccctgtacctcatcccatgagaccctggtgcctggctctttcgtcacccttggacaagacaaaccaagtcggaacagcagataacaatgcagcaaggccctgctgcccaatctccatctgtcaacaggggcgtgaggtcccaggaagtggccaaaagctagacagatccccgttcctgacatcacagcagcctccaacacaaggctccaagacctaggctcatggacgagatgggaaggcacagggagaagggataaccctacacccagaccccaggctggacatgctgactgtcctctcccctccagcctttggccttggcttttctagcctatttacctgcaggctgagccactctcttccctttccccagccctgagcagggcctggcactgagtggagctggcttccctgggatgcttggggccttgcctctccctctgagtctggggcagcctccaccttctccattgctcaaccacagtttatttggtgtgctgactgggggaggaggacaacctccccctgagcccctgctacccccaccaggaggacctggtcctcccctagccccaggagagcctgaagggccttcgcttttggtggcttccttgcttcctccaccaccctcagaccttcttccacctccttcagcacctcccagcaacctccttgcctctttcctgcccctgttggctctgggccccacagctggggatggggagggatctgcagagggagccgggggtccaagtggggagccattttcaggcttgggagacctgtcccccctacttttccccccactttcagccccccctaccctcatagctttaaattctgcgctgctggctgccaccctggatcccccctcggggacacccccccag

SEQ ID NO: 491 - DNA, 287 bp, Homo sapiens
  misc_feature (209)..(209): second gene starts at position 209
ttaaaaaaaaaaaaaagaccattatttctttgttttgtttttcctgtataaaaaaggaccccaaatataaaggtagggaaagggacaagagggaacataccccttagtgtagagaaatgggaaggagaaggagaagcctcaaaaggagaggtgggaggggaatgtcattaaggcagcaaagtaatctctgtagaaagatggaggaggagaaggaggagggtggcggccgggcttggcttcggctccttgaggagttggcggcggcgcgacccggggaaccggcattg

SEQ ID NO: 492 - DNA, 630 bp, Homo sapiens
  misc_feature (281)..(281): second gene starts at position 281
tggttttaccttttccgggagtctccagctggccctcatttgtgtccggagctcaggagttcccaaaccgactcagtcgcaccaagtttccgtcttttggaattggggaaggagtttctttctttcttttcttttttcttgagccagttttaatcgctttgaataaatactcccttaagtagttaaatataggaggagaaagaatacatcggttgttaaagcaggagaggaagagagacctgccctgtagcgtgactcctctagaaaaaaaaaaaaaaaggcaacgcaaccaaaaactaaaacaaaaaccaaaaacccacacaacccccgatttttttgaaaactcatggctcgtggtcaaaaaagtaaatgcttttcaaaatgttttgaaaaccctcaaaaaaaaacagcacttccttaaaaagaaaagtctagtaacgaggccatcccggcgtcagaagcggtcaggctgggtttgacaagatcagaaccgaaatgactacgaaagtgggaatacaaggaggtgcatttactacacattaacgttcagcgaagctcccacaatctttaaacacacagccattggaaggacgatcttgagcaggaagggtttttactcgttgtgtgtag

SEQ ID NO: 493 - DNA, 1435 bp, Homo sapiens
  misc_feature (1093)..(1093): second gene starts at position 1093
aactgttttataaacctttattggaaaggctacaaactttatattgccaccacatttcttatgtttaaagtggttgtggggaagtaaccttggatacaaaactactatgctgttgaatcttacccaggcttgttgtaaaatattttttgtacaatggaggtagagtggataggtcaataatttaaacctcacaggacttgattagtgtcagcacaccttttttcattcaggttttcaggttctagcagacctagaaataaactacaaatactagatttaggctcagggatggcatttaatacatttaaaatttttagttttcagttttccccatttgttcctttataaatgtaaaattgtgcatctgatgtctctttcctcaaataagtgtgttctaaaaatacctactgagtgaaatggtaaaaaccagatgatggaaagagaaacacaacatccgtttcatcaattttacctgatttttctcaaaccagccttttttttttgcttatttttagtttgaaatataaataactacaacaatgcatatttcagttgccttcattcttaaattctgaataagcatcttacttttctataaaacattacagaaactcaaaataataatcaatggcttctccaattccaaatattcaacttaatggagacagcatcttttacatttaatgaaaacagaggatttgaacacgttctatgcagacatggttttactatagatttgctgttaccttatttttttaagggggtggtggtagggagatacagaagtcaggctagcccagtgcttgggagttacagcactcaagacaccctggcctctacagagcatcactgaagccactgaagactgtctctaccagccttttgtcttccaagactataagatgggcataggcctgagatataagcttcaggccaatgggtttttatgggctgtttaagaaccagtactaaggatacattcttttatgtttttccttctaaaaatgtgacacaaaagaataatttacaccaaccgctttttattatcgagtttcagaaacctttcacaagatggtaaaaaaaaaaaaaaagggacaatattggagaaactacctcttgtttaattgatctgtccaactctgagatcacttggtaactggtttcatgtgtatccaaaaatcagcatttggatttaagctttctgaatttggtagtttaagaaacagatttagtttttcagtggttttaactcatgtgaaataatgattttccaccagctctgatgcaaagagatataattttaatgaacgatttatccagcagtgtgttccaggggttgcctctccttatctacggggattactttgtacatgcagataagttttcgcaaacctatttccattttcttttgtaagcaaataaaactttaaaacaa

SEQ ID NO: 494 - DNA, 108 bp, Homo sapiens
  misc_feature (82)..(82): second gene starts at postion 82
aactattctccccagtatgattcatatgatgtcaagtctggagtagcagtaggaggactcgcaggctatcctggaccagctggcctcccaggccccccaggcccagcg

SEQ ID NO: 495 - DNA, 541 bp, Homo sapiens
  misc_feature (105)..(105): second gene starts at position 105
ggaccccaaggcccccgtggtgacaagggtgagacaggcgaacagggcgacagaggcataaagggtcaccgtggcttctctggcctccagggtccccctggcccccaacactaatcccttcctcctataatccagggcggaagggggcctggctccatccggctgccccattccggctccctgggagatcagtgttgtgagtgcatgtgaaatgggggatccccacccccagtgcccttccccttcctggggcccactcacactacaccctcttcctttcccaccccacctccccggagagaaactggacatggggcctggggaggggagctggccagaggaggacccctttcccgtggcattagaagggggaggggtggctggggcccccacccattccccctccctccaaactcccaacccccagtcagtgtttgagcctcctcgttcccctcacgcacccgctcacgcaccctcggtgaatccttggtgatgattttggcaactttgggaataaatggcaattcccacgggcttggca

SEQ ID NO: 496 - DNA, 223 bp, Homo sapiens
  misc_feature (192)..(192): second gene starts at position 192
ctggaatccatcggtcatgctctcgccgaaccagacatgcctcttgtccttggggttcttgctgatgtaccagttcttctgggccacactgggctgagtggggtacacgcaggtctcaccagtctccatgttgcagaagactttgatggcatccaggttgcagccttggttggggtcaatccagtactctccactcttccaggaggttctcactcgcatccag

SEQ ID NO: 497 - DNA, 4759 bp, Homo sapiens
  misc_feature (898)..(898): second gene starts at position 898
ttatgtttgggtcatttccacatgctttattccagcaatcaaaataattaaaaacatctcaaattattatacacatacaaaataggtacagagtcttttgcttcctcccacccctagggggaaaaactgctttgtgctttgggaagttgtctctgaaacccggggacagaggacgcaggacagactaggagggagccgggaggatgggctgcagctgtggaggagggtttcagaggagagaggtcggagagcagaggcctgagaagccagaggcaggtggagagagggtggaaagtgagcagcgggctgggctggagccgcacacgctctcctcccatgttaaatagcacctttagaaaaattcacaagtccccatccacaaaaaaaaaaaaaaaaaaagaaaaatatcaaggaataaaaatagactttgaacaaaaaggaacatttgctggcctgggggggcatctcaatttctatagcaccagtgattccctccccaccccacccatcacatagatgtagcacctttggtataaaatggggagccgcttccaccctgcccccatccccgcccccaggcagttgccccggtgacacatcaagacaagaacgaggtagtctttcagcaacacagttacacaaggaacagaacagtctctcccgcccagccctgcggcacaagggattgacacgcgttccccaaatccgatgtttctgctttgtcgtggcccttcctgactctcctccgaacccagtgaggggctggtggctcccccggcatgaccccctcaaaaacgaaggggagatgttgcaagagccatgggagcgccagatggcaaggcttctttggcagtctgagaaccccaggtcccccagggcctgggggtgctgggcggggcgtgggaagttctctaattcatctgtgtcttgctccattccttctcactcactgtcccactgactatattcccaattcaggggatggtggtagaagcccagaccctaactttccacctcctaaggtatgcctgagtgggacctggcatccaccctcctgggtgaccctgttccgtgtcccttctttcctcagctgctggagaaagcagaggcacgggagagggagcgggagaaggaggaggcacgcaggatgcggcgcagggaagctgcctttcgaagcatgctgaggcaggctgtgcctgctctggagctaggcactgcctgggaagaggtcaggagcgtagcctggccccaagcacccctcaagcctgagggcagcggtgcttcaccactgagggcccaccccagtcacgtcacagccctgggccagctccagttcccttcctttctctgccccagccctgccctgtgctcatggcggtgtccaggccaggctgagtggggcctagtctgatcagcagtgctctcctcgttcaaggtccgtgagcgttttgtgtgtgactcagcctttgagcagatcaccctggagtcggagcggatccggctcttccgggagttcctacaggtgctggaggtgaggcaggcttgtcctctggatctgcctcaggcccttgaactcattagaccagttcaacagagacctcagtggcctccctcttacccttagggcactcctggccagctaaggaaggggaggcctgaggatccctgggataggcagaaggctctagtctgagaaagggaggcaaagccagattttaggaagtaggatccttcctggggctaagtctggtgctgtcctcacccttcttcctctgcctctagcagactgaatgccagcacctccacaccaaaggccgaaagcatggcaggaaaggcaagaagcaccatcacaagcgttcccactcaccctcagtgagtaagcgtgtagaagggacatggggtgaagctgggttgttttggggaaataaacactttgttttccccttacaatatctcccttggagggaagtttgaggattcctttggccctgggtcctcctcctctctcgaattcccagacgagggcttctggagggcagagaacctctgcactgacatgtatctgctgatctgcccagggctctgagtcagaagaagaggagctgcccccaccatctctccggccccccaagcggaggaggcggaacccctcagagtcaggctctgagccctcttcctcacttgattcagttgaaagtgggggtgctgcccttggaggacggggctccccttcctcccatcttcttggagcaggtaagcagttgctgtgagcgtagaagctggagaactgttgtcccagactgagaggatgccctccacaagccccagctcctttgagggtagactggattgggagggctgcacctgtggaagtagaaagaacttcctctacctgcccaagcaagaagctggagaaggaaaactggacttagacttcctcagagcatgaggttcctgcctgtgaagaatgaacagaggggctagaacaaagaaaaagagcctgtctttctcctgttgggacttagtagggatttttctatctctagatcatggccttcggaaagccaagaaaccaaaaaagaaaactaagaagagaagacacaagtcggtgagtgaaggaacttctacctaagcccctgctattttgtgagttctgttctacctgcctcccaggctatccacaggaactgaggaggtgggctctggactcttacagaatagtcctgagagtgagacagaccctgaggagaaagctggcaaggagagcgatgagaaagaacaagaacaggacaaggacagggagctccaacaggcagagctccctaaccgttccccaggctttggaatcaagaaggagaaggtgaggggcaggggccctaggccagtcagcacgctggtcaagcttccacggcccttagtgcaggctaagggtgaactgtgcctttgctccaacagacaggctgggacacgtcagaaagtgagctgagtgagggtgagctggagaggcggcggcggacactcctacagcagctggatgatcaccagtgacccaatgagctgttctctgcctcgggtctgtgtgaggccatggctcctgggccaccctcaccgtctgcctcagacttcttccttagtctggtctgtgtccactttttctaaagtaaccccacccccagcacaccattgttggcacctctcaaggttgctcttggtgttcaagggtcccctactccctggactagtgcagtccttgccctcagccccagaccagagatgggtggtatatgccatgtggggtgggtgatgccagtagataaaagtgtgagagaaggggtctccagggaagagtcacaggctgttggacgcagcctgggtggcagagggcagggtcatcaccctctagcatcagtgcctgctcctgcctgccctggccctgaggctccaccacttcttcctccacccaggacctaatgtacgtgtgttttgttttttgttttttaaataacaatatttataacatggccagtgactcttttccatgtgctactggggcaggctggggactggacacatgcccagcagagggcactagtgtctcatggcaggcctgcttccctttgtgtggctagagcccacctagccggttctcctttccccagagttctgatctcatctcctccaaaacagatgcagtgccccaaagatttcttttctatccccatagcccaggtcagactaaatggccaccctagccccctaagctcagaaagaggagacaaagtcaggcctggtgcatcaagcctttgttgagagggggagagtctgaggtttatgtacagtaagaggaaagggaggtggtacatgtacaaaaaagtgggcccccacattcccttccaggggcagaggagaaacgggaaggtaagcaaatagccaagaccaccatgctccttgtcccctgccaaaaaaaaaaaaaaaaaaaaaaaaaccgtagctgaggaaagaaggtgaagagttggcacaccctttctccagccatctgcagagagtggttggtgcagagaagacctctgctcttctgcccaccttgacaaggacagtgtgagcctagaatgaaatgggcagagaaataagggcagtgagcctgacatctctcctcttacccttatcactagggcacagctggcacggcccatgcttcagagggccttgctcctggtaagagatgaactgagactggcagggtcccagggctccctaagcctagatacatctagaccagagctgaccatgggcctgcaaaaaggaagggaaaaaaaaagaaagaacagttgctctctcctctcatccctctgggctctagtgggagagatctatgtgccctgtttaggctaaggctggaaatggtttttcctagccctgagctgacccttggtgacccttcaggaaatgaagtcaaagaccttgggggcaaagtgcagtactggaagcaccagggacctacagacctagtgcccatagtggcacaagtagaaagatccagcctcaagagctggggcggacatggttgagagagcaacacagccctctcctgagcccttggccaattccaggtccactggttggacttgtaggactctgaggggtgaagtgcttctgcctccgagagggtctcagtgggggcctggagcccgagggggaccactgggcggtgcagcactcctggcttggtggcgaacaaccataggctggcagtggaggc

SEQ ID NO: 498 - DNA, 360 bp, Homo sapiens
  misc_feature (139)..(139): second gene starts at position 139
aataaagacaatgacactcttaaggatctgctgaaagcaaacgttgaaaagcctgtaaagatgcttatctatagcagcaaaacattggaactgcgagagacctcagtcacaccaagtaacctgtggggcggccagggctccgaccctgccgatgtggccatccagctgaccttcctgcgcctgatgtccaccgaggcctcccagaacatcacctaccactgcaagaacagcgtggcctacatggaccagcagactggcaacctcaagaaggccctgctcctccagggctccaacgagatcgagatccgcgccgagggcaacagccgcttcacctacagcgtcactgtcgatggctgcacg

SEQ ID NO: 499 - DNA, 1250 bp, Homo sapiens
  misc_feature (1054)..(1054): second gene starts at position 1054
tgataatgaaaattagctttatttatgtaatttagaaaaaatgattgtagtgttagagtttgtcaaatgttttcactctgaacaatttacaatagtatttatatacaaacataataaaataggtacatcacattgttcttgcttcaaaatgtcttctcaattctgacatgcttctatcacttcggtttgtaatttttaagagggaaatgctctgttttgacacagtgcttgattcacacagtataacactgaagtagaaggagaatcaacaatcatgaacacagttaaaaaatatttttcaaccaatatgactttatcattaatcttttttctataataaaatgtttcctgttaaaaaaaatacttgtattcacctgatgacctaaatttgttgtactaaatttggcatttatataaacccatagttgatctaaatacaatgtagatatgaacctaggttaaaactcattgatacaaatgtttgccacaaatgaaaatgaacaaaattggtaagaacagaggtaaacagaaaaatccatttgaaaaatagtggaaatggcttattctatttaaaatgagtaagactcaatttctgaacccaatataaactaaaccaaaagatggtggaaaaccatgatatagacaccaaatcttatgttgcactgtaaggctgtaagtaatttgtactattgtatactggataatcctagaccaggtttcctaaatagctctccaatcattttatcttcttggagaaatcagagaaagtttaatacaattactgaataaggcagaattttttttttttttttttagatggagtctcactctgtcgcccaggctggagtgcagtggcacaatcttggctcactgcaacctctgcctgccaggttcaagcgattttcctgcctcggcctcctgagtagctgggattacaggtgtgtgccaccacacccggctaatttttgtatttttagtagagacggggtttcaccatgttggtcaggctggtctcaaactcccgacttcgtgatccgcccgccttggccttcctcttggccgtgcgtcaggagggcggtggccgctaagaggagcaggagccggaggtccacaaagctgaacatgtctagaccctagacatgtagactctttgtggctggggagggggttagcgtccgctcatgcgtggcctcacactccgcgtgcctcctgctccgaccccgaggagaaactcccgtctgctccgacga

SEQ ID NO: 500 - DNA, 2342 bp, Homo sapiens
  misc_feature (1987)..(1987): second gene starts at position 1987
ttgccttaagaaataaaagaatctttattgttttagaagcaattttgagcaaacagacaggcaaatatctaaagataccatacatcaactagtggtttaaacatttgaagaaaaaacatggaaagtatttacatggaccagtttctttatacaaatgctaaaacatgaaaaacacccaaaaccagatagagcgttaccatcaaggtatgaatctagtaatacaaataaaactacaaaaggtacaaagaacatgtagctataggaaataatagtgtaaatagcagtatataaactggcccatgtaaaatacaaaaatattcactgaagtcaggttttctataaaacagtgtttattagaggtattttactatgaatcaggcatataatctgaatgtagaaacttttagaaatattaacagcattcagtcagtgccatgcacttgtgcttccaattatttttttaaagctgctttgttttgactcatgtgaaatagttaaggcctacattcttatacacattatccatcttacaaggttaacaattttacactaaaacacagtttaaattaaaaacgattttgaaaaattacatctatatttaatccctaagaagtgttttaagctggtaatgcagctcgctgtagctctaagagaggggttagtcaggaatctgatcttgagccataaaggttttcaggctaaacaaagaacaaatttaagtgacggaaaatatttataattccaatataactcagttatattgttataaaaatacccatgctagcatgcaactgcctatatatgtgtgcatatatatatatatgtctgtgtgtgtgtattgatccattcaatgtcaatattttggaacccagacaattttctcattttctagtgaatgggaggcacataatcccaccacaaaaaaaaaaaaaacacgaaaaaacaaccccacaggaaccttccatatatggctgcatattaacaattttaatatttgctcagccattccaacacacaccaaaaaagttctcctagaagcagcaagaaatatttgatgtgttaactaccaagctgatgtattttgctttctcctataaacattaggtggtacacggtaatttgacaattggtacatctctcagaccacaaaactgaacacaaagcacgtgaattaaaaatgattctaccataatgaataataacaacgaaagttttgattagcacagaaccatttaaatgtgaaagccaaattagtgatgttgtagcaatcaatgcaagctggaaacaaagaacaactttttaatggattaagataaaaccaagactttttggttagatgcaagttttgtttgtttgtttgttttgttttgttttgttttgagatggagtttcgtttttgtcgcccaggctggagtgcaatggtgcgctcttggctcaccgcaacctctgcctcccgggttcaagtgattctcctgcctcagcctcccgagtaactgggattacaggcgcccaccaccacgcccagctaattttttgtatttctgatagagatggggtttcaccatgttggccaggctggtctcaaactcctggcctcaagtgatccacccacttcggcctcccaaagtgctgggattacaggcgtgagccgccacgcccagcctagatgcaagttattttataagtgtaagtgcacttcgttatctaggttctaggacacactggcatttcttaagaaaaagaaaataataaaatacatcactatcaacaagaaatgttggaaggctaaagagaaatctgcattaattttagtactgcatacagaggccaatttatgagcacaaagtactaatgccctcaattggcactggcaagcaattatctctaaagcacctaaaaaatggattgaaatgcccagttggaatagtcttatatattgcaatttaaaagattgaaatatccagtttttttaaaaaaaagattaaaatttttgggggagcgggggaaggagttaatgaaactgtattgcacaatgctctgatcaatccttctttttctcttttgcccacaatttaagcaagtagatgtgcagaagaaatggaaggattcagctttcagttaaaaaagaagaagaagaaatggcaaagagaaagttttttcaaatttctttcttttttaatttagattgagttcatttatttgaaacagactgggccaatgtccacaaagaattcctggtcagcaccaccgatgtccaaaggtgcaatatcaaggaagggcaggcgtgatggcttatttgttttgtattcaatgattgtctttccccattcatttgtcttttt

SEQ ID NO: 501 - DNA, 3815 bp, Homo sapiens
  misc_feature (3697)..(3697): second gene starts at position 3697
acaccaagtactattattttattaactttaagaacatgttttacataaaaacaggcaacatcaaaaaagctcagttgataaatgaacataatatatcacagatgatttcattccacattaacctacatgtatcagcttaaactgaaggattagggggaaaaattggatctcattccacctttaattaaggacacaaattgtttgaaagttatttcattaggattctgaaaatcaaagattaacctatgccatctgatccatgcagcaagtgataaattcagtattttcaaaagaaatattgaatttttttcttgagtcaaattgaaacctttcagaaacttgtttaaatgcgccaagtccctacgcacctttttagtatgtatgagcaaaatactgttgaatttcacactcaactaatcctttaataattttctttcagccagaatgaaaaaggctagtattaatttcctaataaaattttttttcaaaagttatcgaggatatgactataaccttggaccagtttcaatttctttttattttttctgagaatacaccaaagattaatgtcaatggcaagtgagaaattgtccctagagaactattcaaggactttttcttactacatttgattggactggagtgaactgacattatagcatctttatcatcacctttaaaattctattttctcttagtagcaacagtgaagactttagaactattacttactttaaattattaaagtatatcacagacaaaatattcaattttacattaaagcaacattaagggtctcaatttcattgaacagaaacaaatgctgaagaaatttacaggtatgatttaattttagagagtgttctttctttagggaacaaaatgaaactagatctctcatttgtctgtatgggcaagatatggtaaacctcatgatcaaaacacatgccagttagaaacttgatcacagaaatgatgctcagtgttgaaacccaacaataaacaaacaaacaaaaacccccactctaaccagaggcatttaagcctctccactgaagttcctgtttcccaccagtttacgacccttaatgttactgcatgtatggttgcatatttgagatgattaaaaataaaagactggcttaaaagcacctcctcctctagtgtgtaattacatacaaactaaagattccttctgacgtcctaggaaccccatttgttaccgtttcatgtgtaagcaccattgaaccaatttttaaagcacatttgcagttatcaaatgtttagtgtgtcctcaagtttcattgatttgtttgcctttaagcaagaaaagagtaaagtgtattattttcccctgcttcttttcatatctgaattgtcaaaaaatgttaattttggaagtgcttttaatcactattttccccaacagactagaatggctccatgaaatttgacaattaagtaaggaaatctttatccccaaaagaagcacgtatcttaccctctaaactgcatgcaaagtaagggtctgtgtgagagtattttccccaaactcctaatggacatggcagacaatgtgtagaaaaatctgagttttgaactgaccaacttcaagtcttttaaaatctttgggcaaaaaaaaatatcatgtagcagttaaaaaaattattgacttacaaattatagaaaagatatgttatctacaatatatgccaggtgacccattaaatttaaaaaatgtgtgcgaatgagtaactacattaaaactaccatcttggatcttggtgctttccaaaattctgaaatcactattaaggagggaccataccagatttttttgttgttcttttccttggagaatggggaagaagttggaaagagaaggaagtaaaccttcactctttggtacagccctgtatagcaaacttcagcctggggcacatttttatggtcaaattaaaaacctttgagaataggagtttatcatagaaatgctgacagatcctaacccagagaagggctaagagcaacacagtaatattaagaaagctctccctcagcacgattgagcttcagcgcaagggatagagttgtctagtggacgcccttggccagtaaacaaccatgatttaatgtgcttgagacttggtcatatgggagctctgtgaccctctaagccaaattttcttttctttttgttttcaactgaaatatgcctcaaagggtaaaggattgcaattttagccttcattcatggatatattgctttctttcaacaatatctgatgggcctgttaactgccacccatggggagcaggttgcaggaaggtctcattgaacacaaaacaccaagtgttttcagtagtttattcacatttttttttctctgcttattttaatatgcaccacgtgtaagttagatgagggctacggtaaaaacatttttgatgactgaaatcttacttttccttctaacgatctggagcaaatcacatattcattgatcatgacgaataaaatgatttctgctacaatgttgagaaaaaatgtgttcattaatatgaacacatgtctacagagatgatttacacgatgcaagtaatgaaagagttcttccttaactagtctactatcaaactgaaaagatgaatcttaaaattcccttgaaaataccatatgattggtcatgtgtcagtaaaagaaagacggtccccatcaccaggccaccaccataagagagctatattaaatacttgggaaaaaatatggaaacaccggtggtgatgattaaattgataattacatagatacactgccataatgatacatatttgttctatgataagtgaaatcaaaaataagatcaatttggttatagaaattccttaaagaacaccaccacttaattatttcaaacttgaactatcccaagaatgtcgagaaaaaaattagaaagcactggctaaaagcaaagcaatctggatacaccaatgtagtcagcatgccttgtgcttgtctgttaaccctctgagtacatctctgacattcaggatcttggtagcttaatgttagaaagattgcattccatctgattactcaagatttctacttgactggtcacattccactgtttattcagcatagatcactcaaattctacagtgatgtgctgggatccccatgctgaatgggccctgcattcttctgagctgcccttctgcagtgtgctgagaaacaccccctagcttcacacggtccagagtccccctagacgtcgatgggaaaaggcctgagccatgcaccgcaggctcagtacactagatgctgtagcaatatagttaatgcccacagaaaaagcagtaattcagagaaagaaaggaaaatgacagtccactgcaggtaggtctctgcccattgcattcttcacacttttagagttgaggccaggctgtagagctactccatagccttggaatagtgctttgctttatatttctagagaaagcagtaatttccaactagttcagtgttcctcattaatatggaatctacctacacaccaacactctttctggtgttctgtgccccctacccccacctcccccccaaaaacaactcaactaatttactgatttatgctactttgtgattttgcgtgttatcacttccggatgctctaaaagggggggaaaaaaccgccagctttttcacctccaatcccagcaatggcagcggctccaacaccaccacagcaaggaccaggggcaccaggaggtccaggagggcctggttgccctgggtggcctggggagcc

SEQ ID NO: 502 - DNA, 833 bp, Homo sapiens
  misc_feature (772)..(772): second gene starts at position 772
aaacacactggggaatggagcaaaacagtctttgaatatcgaacacgcaaggctgtgagactacctattgtagatattgcaccctatgacattggtggtcctgatcaagaatttggtgtggacgttggccctgtttgctttttataaaccaaactctatctgaaatcccaacaaaaaaaatttaactccatatgtgttcctcttgttctaatcttgtcaaccagtgcaagtgaccgacaaaattccagttatttatttccaaaatgtttggaaacagtataatttgacaaagaaaaatgatacttctctttttttgctgttccaccaaatacaattcaaatgctttttgttttatttttttaccaattccaatttcaaaatgtctcaatggtgctataataaataaacttcaacactctttatgataacaacactgtgttatattctttgaatcctagcccatctgcagagcaatgactgtgctcaccagtaaaagataacctttctttctgaaatagtcaaatacgaaattagaaaagccctccctattttaactacctcaactggtcagaaacacagattgtattctatgagtcccagaagatgaaaaaaattttatacgttgataaaacttataaatttcattgattaatctcctggaagattggtttaaaaagaaaagtgtaatgcaagaatttaaagaaatatttttaaagccacaattattttaatattggatatcaactgcttgtaaaggtgctcctctttttttttttctttttatacaataccatgttaaccacatgagttaaataaatttgagaagttgtttt

SEQ ID NO: 503 - DNA, 4137 bp, Homo sapiens
  misc_feature (772)..(772): second gene starts at position 772
aaacacactggggaatggagcaaaacagtctttgaatatcgaacacgcaaggctgtgagactacctattgtagatattgcaccctatgacattggtggtcctgatcaagaatttggtgtggacgttggccctgtttgctttttataaaccaaactctatctgaaatcccaacaaaaaaaatttaactccatatgtgttcctcttgttctaatcttgtcaaccagtgcaagtgaccgacaaaattccagttatttatttccaaaatgtttggaaacagtataatttgacaaagaaaaatgatacttctctttttttgctgttccaccaaatacaattcaaatgctttttgttttatttttttaccaattccaatttcaaaatgtctcaatggtgctataataaataaacttcaacactctttatgataacaacactgtgttatattctttgaatcctagcccatctgcagagcaatgactgtgctcaccagtaaaagataacctttctttctgaaatagtcaaatacgaaattagaaaagccctccctattttaactacctcaactggtcagaaacacagattgtattctatgagtcccagaagatgaaaaaaattttatacgttgataaaacttataaatttcattgattaatctcctggaagattggtttaaaaagaaaagtgtaatgcaagaatttaaagaaatatttttaaagccacaattattttaatattggatatcaactgcttgtaaaggtgctcctcttttttttttttcttttttctttttctttttttgagacagtcttgctttgtcacccaggtggagtgcaatggcatgatctcggctcactgcaacctccgcctcctgggttcaagccattctcctgcccggccttccgagtagctgggattacaggcatgtgccaccacgccctgctaatttttatattattagtacagacaggatttcaccatgttgtccaggctggtctcaaacccctgacctcaggtgatccacctgctttggcctccgaaactgccggaattacaggcatgagccaccgtacccggccagctcccatctcttaattatcttagctctcctttcctccttgggttgacattgcattcagaattgtggcaaagggccaccatgctcttaagactcaagtctattttccacactgtccagaggagagaagttatcctagtagcttctacacagagcaagtgtctttctcagaaatcccagcaaaggtcttgcataccattgctggtaggcctgtctcttaaaccaatcatgaaaggggggagagaagtgaatgggatgaactaatttgcatagactaattagagcccacccctggagcctgggtgtggccatcttcccagagttcctgagctagatggagaaggggtacttctcagaaagggaaaatggatacccaatggcccaaacccaaaatagccccagttcccctaactttgactacagggcagtccagtttgggtgccgcttccgttgcactcacatgtcctacatatctgttgactactcacaagtgcaaatgcttattctcaactcaacattaacattttttctggcaacccaggttcactggttctcttccacagagcggccctgagcagctgagcctgcaagccacgcaagcatctgtttcttcttttgccaagtacaggaggatgtttgctctctctgtagagagctttctgaggtctctgggtgtacccagagatttaatagaaattcttaacgttaagtcacattccaggaaggaaggaagagttgttcgttcaaataagaaagataaatgttcggcactgtaggccctgtttaccccatctgaggccctgaattcatatattacaagacggaaggattttgcacagttttttatgtagcaagattttgctcaccactgaaaaatgtcagtgtaaatgtgaccgctttaaagatgagtcaagtaattcttggaacagggaaaaaaatgaatttgccaggtcaggagttcacctgcctttgtcagagttgaacccaaccactcttgacctcgactcactcccttagggttaagaaagcccaaacacattcctgagcacagagcaaacactcccatgtcactgaaaagaaacaaaagaatgctaaaaagtgctcagacctgatcacattttttccaatattttttcctttttttttttttttttgagacagggtcttgctctatcacctaggctggagtgcatgtttttgagacagggtcttgctctatcacctaggctggagtgcatgatcatggctcactatagccttgaactcctgggctcaagccatcctcagcctcccaagttgcgaggactacaggtgtgcaccacaacgtcccagctactttttaaatttttagtagaaacgaggtctcactatggtgcccagactggtctcgaactccggagctcaagtgatcttcctgctttggcctcccaaagtgttagaattacaggcatgagccacctcgcctggctggtttttgcctttcttatagaccctgggcatgtaagcatttattagtttgcatttttgaaacagtaatttcaatattttagtgccaatgtcaggccgcttaaacactgtattacatatcttcatctgtctggtggaactattggtgtgatcctagagaactgagtcctattctgccattcatttaaagtgttttaaactctaatctctctacttaatgcacagtagtcagattattctcttaaacatttgcctagtagaggttaaaatagtttaatccttatgaagatggaataacttcaaactcacattgtggcacttagatcttccaccaagacttcatccgtgaaatccacacctccctgttgggttcccaattacattccaaatttacatttcttttgagaatctctgcatactccagctctgtcctgttgatcctattctagaagtgcttaatgcagcaagacacagaaagttaaacgcaaattgctgcaaaattcaccctcagtggaggactagaaacacaacatgtccaatttaaagctcagttcacaagcagttcaattctgctggcatcagaaaaggagattctaattaaacattcttagggaaggacatcaaatgaggttaatgggaaacgttaccagattaaaagcagttttttgacaaagtaacagatttggaaattctgactctctgaaagccttgatttgaacctcaaacttgatttcaccatgagaagtggggatcaagggcctgcgcagttcttttcctaaatcgattcggtgctccccaccccgacgcaggcacaggtccgcaaccagatagggagatgcctgaatttcaggctacctttgacaaagctttcttcctccctccctccctttgcacgctgcatcccacgctgcctgcttaaagcgccctcatgtgtctacagatggtaaaacgtttatttctcaacagacattccagtgatagcatccaatgacctatgtaacggcacccttttttgctgtacgcgttttttgagatggagtctcgctctgtcgcccaggctggagtgcagtggcgcggtctcggctcactgcaagctccgcctcccgggttcacgccattctcctgcctcagcctcccgagtagctgggactacaggcacccgccaccacacctggctaattttttgtatttttagtagatacagggtttcaccgtgttagccaggatggttttgatctcctgacctcgtgatccacccccctcggcctcccaaagtgctgggattacaggggtgagccactgcgcccggccccagtcacttgttcttaagtttcttaagcaaactataaaatagcaaaagaccaaaaaaaaaggaaaaaaagcagttcgcctaatacattgttccagcatttccttgaaagtactgagccatctcaattgctctgattttgtgagaaaattatgaagagttgcaaagtcccagtgattctcttgttacttagctaagaatttgaaatgtaatttaaatactattctttacaatccattataaggattttaaaatctttttgcttctttaataaattctaacaaag

SEQ ID NO: 504 - DNA, 4398 bp, Homo sapiens
  misc_feature (772)..(772): second gene starts at position 772
aaacacactggggaatggagcaaaacagtctttgaatatcgaacacgcaaggctgtgagactacctattgtagatattgcaccctatgacattggtggtcctgatcaagaatttggtgtggacgttggccctgtttgctttttataaaccaaactctatctgaaatcccaacaaaaaaaatttaactccatatgtgttcctcttgttctaatcttgtcaaccagtgcaagtgaccgacaaaattccagttatttatttccaaaatgtttggaaacagtataatttgacaaagaaaaatgatacttctctttttttgctgttccaccaaatacaattcaaatgctttttgttttatttttttaccaattccaatttcaaaatgtctcaatggtgctataataaataaacttcaacactctttatgataacaacactgtgttatattctttgaatcctagcccatctgcagagcaatgactgtgctcaccagtaaaagataacctttctttctgaaatagtcaaatacgaaattagaaaagccctccctattttaactacctcaactggtcagaaacacagattgtattctatgagtcccagaagatgaaaaaaattttatacgttgataaaacttataaatttcattgattaatctcctggaagattggtttaaaaagaaaagtgtaatgcaagaatttaaagaaatatttttaaagccacaattattttaatattggatatcaactgcttgtaaaggtgctcctctttttttttttttctttttgagatggagtttgacttttgttgcccaggttggagtgcaatggtatgatttcggctcactgagacctccactttccaggttcaagtgattctcctgcttcagcctttgaagtagctgggattataggtgcctggtaaatttttgtatttttagtaaagacagggtttcaccatgttggtcaggctggtctcaaactcctgacctcaggtgatccaccggcctcagcctcccaaagtgctgggattataggcatgagccaccatgcctggctgcatcttacactttaatatccttactgttccataaaaaatgttttaaataatgcccacctaataaaagaatctctcatatctttggtgcagcaacaattggtcacatgctttcacatgtgaatatagcaggaatgaaaaaagagcataaagttatttgagagtttaattacatcattattcactaatttaaaaatcagtaattttttcaagataaaagtatactttaattgtaattataactgaaaatcttctacttcttttaatgttatatacaaataatttatccaccaagttttattttgtgttgttttctgtacttagcactgatttagtgtaatgtctgaagtgtccgcgccttagatatttctactgtgaattctcagatatttacataaacttaatttcggattaaatttttttcatttttactgcatctgcaaaaacatattttagtatgaaccctgtggtgttttctatgctgtggtttttttaaaaatgtttttccaaactgattacatttgtagggtttttctccaatataaattccctgatgttgaataaactttgtactatcaaccaagcattatagaccctcatgttttataagctgtagtttttcaaaactgtttttacaaatttattacattttccaggggttttttccaatataaattttctgatgttgaacagtatttgagcaactgcttcagggttttctttagtacaaaatgtgtacaataagatctgtgatgcaagtaatggtactacaaccctcttaatatttgtaatgtttgtcttcagaatgaattatcttcttcactttaaaggcttttattttctgaaagatcttttgacactagttgcatctataatggttttattaagtacagactctctgatgttgagtaagatatgagcacatattaatggcttttccacattctttgtgtatatacctttttccaagtaaaaattctttcctgtgcaataaggtacgagcattaattaaaagttttgccacattcttcacacttgtagaagtttactccaatgtaaattatcttacctacaatcaagtgtgacaaccatgtaaagcctttatcacattctttacatttctagaatttctcaccagtataatttattttatgtttgaaaaagtttgaggtgttgtcaaaatcactgtcacatcttcaggtttgtagagtttctctccagtatgaattttgttatgtgtagtaaggtttgaatattggttgaaagctttgccacattctttacatttgtagggttgctctttagtatgaattctcttatgtgtattaaggtgtgaggaatagttaaatgctttgccacattcttcacatttgtagggttgctctccagtatgaattttcttatgttcaataaggtttgaggatcggttaaaagctttgccacatttttcacatttgtagggtttctctccagtatgaataatcttatgtgtagaaagggttgaggacagtttaaaagctttgccacattcttcacatttgtagggtttctctccagtatgaattatcttatgtttagtaagggttgaggaccacttaaaggctttgccacattcttcacatttgtagggtttctcctcagtgtgaattatcttatgtttagtaagagttgagaactggttaaaagctttgccacattcttcacatttgtagggttttcctccagtatgaatttttttatgtgtagtaaggtttgaagattgggtaaaagctttgccacattcttcacatttgtagaatttctctccagtatgaattttcttatgtgtagtaaggtttgaggattgggtaaaagctttgccacattcttcacacttgtagggtttctctccagtatgaatcctcttatgtttggtaaggattgagaaatggttaaaagctttgccacattcttcacatttgtagggtttctctccagtatgagttatcttatgttcagtaagctttgaggaccacttaaaagctttgccacattcttcacatttgtagggtttcttttcaatgtgaattttcttatgtttagtaaggtttgaggaccggctaaaagctttgccacattcttcacatttgtacggtttttctgcagtatgaattctcttatgtgtagtaaggtttgagaactggttaaaggctttgccacatacttcacatttgtagggtttctctccagtatgaattctgttatgtttagtaagggttgagggccagttaaaggctttgccacattcttcacatttgtagggtttctctccagtatgagttaacttatgttcagtaagctttgaggaccacttaaaagctttgccacattcttcacatttgtagggtttcttttcagtatgaattttcttatgtttagtaaggtttgaggaccggctaaaagcttcaccacattctgtacatttatagaatttctctgcagtatggattctcttatgtgtagtaaggtttgagaactggttaaaggctttgccacattcttcacatgtgtagggtttctctccagtatgaattctcttatgtttagtaagagttgagggccagttaaaggctttgccacattcttcacatttgtaaggtttctctccaggatgaattttcttatgttcagtaaggtttgaggattggttaaaagctttggcacattctttacatttgtagaatttctctccagtgcgaattatcttatgggtagtaaggattgaggacttgttaaaagctttgccacattcttcacatttgtagagtttgtatctagtataattttttttatgtgtagtaaggcgtgaggaccaattaaagactttgccacattcttcacatgtgtagggtttctctccagtattaattctcttatgtttagtgatgattgaagggcagttaaaagcttttccacatttttcacatttgcagaaattcactctggtatgaattattttatgttgagctagatgtggaagcatgcaaaatgatttgccacattctttgcatttgaaaagttttttttcagtatggcttatcttatgtctgtttgaatttgaaaatttatgaaaggctttcacacatttatcaaatagaaatattttgctctgggtagctggcaaacattggttaaatccattataacctcctctgtgcaccttacactcatccacacttttatggtctttttttaaatgtacatttttatgttcacagtttttatatcttctcagtgtcgctttttggaaaggatcttttatatgctgctctggccaaaagtcttgggtaaaatgagaacacataa

SEQ ID NO: 505 - DNA, 1615 bp, Homo sapiens
  misc_feature (255)..(255): second gene starts at position 255
gagcaactggactctccggattgaccaagttcatcctgggctccattgggtctgccattgcggctgtcattgcgaggttctactagctccctgcccctcgccctgcagagaagagaaccatgccaggggagaaggcacccagccatcctgacccagcgaggagccaactatcccaaatatacctggggtgaaatataccaaattctgcatctccagaggaaaataagaaataaagatgaattgttgcaactcttaaaaaaaaaaagcacataaaatccaccctatcttaatgcagcagttggaaaagttttcttttttctttcctttttctaagttgcagtaggttttatacctaataaggtatgctgtagacataggaaatatcacattattaaattgtaaaatgcaattttgattaacagataactggtatcgtgagtttaaaaatcagatgaaaatggttcttaaaaaaaggagaaaatgactaagtggatctgtacaaatcaatatatgggaccttagcaaggaaagtataaaatttttttttagtaagcagtttttcattagttagaaggaaacggaattctgaatttcaccttatatgtttggtcctcttatctttcctggacaaaacagtcctaaccgttttaacaaatctcaattaaagtaatctaataatgtagaattcaggacaacctaccatctgtgcatctacaatatcctgaaagtcttgctcagttaatgaaaaaaaaagccaaatctgaccatgtttacagttttccacaataaaataaaatatctagaaaggcaaataaaaatggcttacttacatgaggttatttttacttgttgattgtacatttaaaaaactgagtatgtgccttttcctgctcattcagtacttttcataaagtcccaagttgagtgcatgctgttttgtaaaccacagtgtctaaactgtagcaaaaatcagatgcatagacaggttatttttaccttgcagaaaagcactgtatacagagttacaggaacaaatttgatatcatataatttaagaagctctcataatcaggtatggacattggcttatacaacatacactgtgaatcaggcacagcaacctgcaaaccacatcatcccaacagttttccattcttcctattgacaaacacttaaacacagcattttcatcatatgaaagtaaacaaaaacaacaacagaataagctttccccacactaatttctaatccaaagagctttactgcaattaatgtaaattgctatcaatcactgaattgactgggcaaagatggacttggcactgtccccccaaaataacctagaaagaatgctttaaacagatataatccatagagaaagagatttacatcataaatgctgggggtaaaaagtacgtagaatgacagatacacgatttggggtgagagatggcattgctccacataacacaaaagaattctgttgaagtggtcactgcttctgttgtttcgtggctgggttcttgggaggaaggagtttgtatgtattgaagtagcccaccacctgctggggaatctctgccaagacacactgagcaagtgcttcttttggagc

SEQ ID NO: 506 - DNA, 2126 bp, Homo sapiens
  misc_feature (2062)..(2062): second gene starts at position 2062
tggaagaacgcagttttgttgaaaagcacagatggccgtcgaatatgtacttgaagcagcttgcggaatacaggaagtatattcactcccggaaatgtcgttgcttagtaatgtaacctggagcttttatacactacatttcttttttattattatgaagaatgggatacctccaggttccagtaaaattcttctgaccgaaaccaatgtgggtgttagaaaaattaccatatagcttaatatgtttattagttctctttggaaaaaaactaccactgtggtcttaaaagggaacaaaatataccataggctaaaactaaggctttcactctagaatgcaaagctgttttgcagctgttttcccttaaagatgtcctgttgctttagtgatatttagacccctctcagttaagaaatgcttagattaaaaaaaaaaaattacgtaggattaatacagaaatttaatcatgtctgattaattgctctattaaaataaggggcatttaaagacccagcataaccatttgtataatgagaaatctaggggaaaaccaatcagtccaacatgagattttaggaatagaaatttgccggccatttggaaagtgaaatgccacttagttctcaattgatgacagtgtttgaatcatcataaaaaaaatacctgcttttcatctggacaacccaattgagccactttatctccttttggcaatctgagtaggcggggaacctaggcagggctggctttcttagcgtgtaacttgtgtagcagcacagggcccacacttagaaggaccccacacttggttcaaggctctgctatagcggaaattcttaataatgtttgaagaagggccccatgatttcattttgtgctgagccctcaaaattatgtctgtttcgtggtgggaaatatcctatgttttcttgctcaaacacctttctctctgaaagcagaaaaaggcactgatataaagggaagagaaggaggctcaccggagggaagagaacatagtgaagattcccgcctttggggaggtctggaccacccagggcctccactgccaccttggctggcaagggagaaatgtgttgtgttgtcttagctttaaaacagtcacagttcttgctctatcatagatgaacaaatactttcttgatcattctgtaagaccaggaggttggtaagagtgactaaccagcctaactttaatacacatgtataaagatgttcacagagaaagatgctctgtagagaatttgctaccgaagttggctcaagaatttgtttttagtgttatttaccaagattaggacgtcagtggcttaaattctttgaattcttttcaaggactgcaagattatttgataaagagtagcatgaatcttgtgctctaatattacacagtaagttcaaagaaaggatgtaagtcaaagacttgttacatagagggaaaatggactgggatagaggacagactgatagtttctttctttcatatcacatgtatagagaaataattatatcagaaactcacaaacctagacatggaaaaacagattactgtctattgtcagcatcattttcatctgtaagtcactactggaatatatttttcttttaatttccagtgactttagaatacacacagtttttccgacttttcaaaaatttgattaaatggttttatagtataatattgggaccccataccgttagcccttgtatgtataccaacactgccaaagtaaaacattaggtcaggcatggtggctcaggcctgtaatcccagcattttgggaggctgaggcaagtggataacttgaggtcatgagttcgaaaccagcctggccaaaacagtgaaaccccgtctctactaaaaatacaaaattagccagatgtggtggcgcacacctgtaatcccagctactcaggaagctgaggcaggaaaatcgcttgaacctgggaggtggaagttgcagtgagccgagatcgcaccactgcactccagcctgggtgacaagagcgaaactccatctcaaaaaaaaaaaaaaaacaggactgtgattagtaactggataaaatacgcacaatgggaagaaagcctaaaggagattcaaag

SEQ ID NO: 507 - DNA, 1418 bp, Homo sapiens
  misc_feature (701)..(701): second gene starts  at position 701
gaggggaggccggaggccaacaactgtatttccatgtcagctggggctctcagccgcccaaggggaggacaacagaggtcagctgcagaggaaggctggcaccagcccccaatcccaaccccacctccaggccaatacatgcccctgggactggctcagtcccagcaccaccctgcaggctccaacaaggtgggttttgtcccctctcactccttccagctcatcctcaggcctctagcggcctcatcctcaacgggcccgggacactgaacaggtagggtggcagagcccagctgggcccaagctgggcagaggggccctcaggcagggcaggtttccaagggagggcccgggaggacggcctggtgtggggtaggggctcagcccagcgggcgctggtagggccggggaggggactccctggagatgaagggagccccaggatacacgagctcggctgccaagcttgggtggggtcttccaatgcacgaaacagatctgtgctctggatcagctctacccccaccaaacagatggagagacagacaggcaggcagcatttctgaacccagggaggggaaaaccacagaacaaaacagcaagtcgggcttgggccgccggcttccagggcgcccaggacagtgggcgggcgagtgtgtgggtgtgtgtgggaggggccgctgggccaggggcctcctgccacacacacacattctctccacaaagtacaaaatatatatttaaaaacctcaacacaaccaagcatcttgcaaaggcccaggaaagcaagggtttggccagtcagggatgaggatggggcccgagggtctaaagaaggcactagagggacagggaccgctttgggtctcacccagtcaagttcacagtctgccctcttagtgtgaggaaatggggcttgaggtaccctgtttacttggcgctgggccaagccctccatctcctgagatggcctcatgtgggagaaggcggagggaaggtcggcttgggaatatcccatatgtctgtccgaaggctgtggcggggctcctgctccagggatgctgggacgtggcggtgcctgctaagtgctcagctgtgtgcgtctcgcagggaaagagggcccagcccagcatccctggtcatctcctcagttcaggccagggtgtcatccgagacccctcagcggaagttgcagggggaggaaagaactagaaataaataaagtccccagtggcccagcatggcacagcagggaggccactctgtttcttcaagtattcttggccgatggggctccaggccctgtcgaggctcagatggggatccccacagtgttcacctggtccttgagtcccagcaggctgtaggcgatgcgcttctggtggccgggcagccgcaccccaatcctcttgatgtcg

SEQ ID NO: 508 - DNA, 535 bp, Homo sapiens
  misc_feature (341)..(341): second gene starts at position 341
gagtcctcgctggccacgacaaccgcgtgagctgcctcggggtcaccgacgatggcatggctgtggccacgggctcctgggactccttcctcaagatctggaactaatggccccacccccactgggcccaggccaggaggggccctgcccatgcccacactacaggccagggctgcggggctggcgcaatcccagcccccttccccgggccacggggccttgggtccctgccctcccacccaggtttggttcctcccggggcccccactgtggagataagaaggggatggaatgggggaagaggaggagcaggaggccctcatccttctgctgccctgggcggtgtcaaagtggagaggcaggtctttggggaggccaccaagcagccaggcatcaccttcatcgcagccaagttcgatggcatcctgggcatggcctacccccgcatctccgtcaacaacgtgctgcccgtcttcgacaacctgatgcagcagaagctggtggaccagaacatcttctccttctacctgagcag

SEQ ID NO: 509 - DNA, 476 bp, Homo sapiens
  misc_feature (370)..(370): second gene starts at position 370
acatcaacgagtgtgatgaggccgaggctgcctccccgctgtgcgtcaacgcgcgttgcctcaacacggatggctccttccgctgcatctgccgcccgggattcgcacccacgcaccagccgcaccactgtgcgcccgcacggccccgggcctgagccctggcacccgctggccgcccacccgcgcccgccactcggggcccctgccgcgcatcctgcagcccgcttatgcgtatgtgcacggggccgcccgcctggacctggagaagggacctacggacgcctggaagctgcgacgccctgcactgctcccgcctccaccagcgcctcccactgatgtcgtggtcccgggcctggcccaggggcccctgccagtaggccttgcgggtgacattcaggtaggacagagaacccttgtaatacttggagtctgtgccacccagcatcagctcacccccaggctgcgcatctgggtcc

SEQ ID NO: 510 - DNA, 733 bp, Homo sapiens
  misc_feature (32)..(32): second gene starts at position 32
ggtgtttttgtttttgtgtgtgggtgtgtgtgagcaggaggcccctggcccagcggcccctcccacacacacccacacactcgcccgcccactgtcctgggcgccctggaagccggcggcccaagcccgacttgctgttttgttctgtggttttcccctccctgggttcagaaatgctgcctgcctgtctgtctctccatctgtttggtgggggtagagctgatccagagcacagatctgtttcgtgcattggaagaccccacccaagcttggcagccgagctcgtgtatcctggggctcccttcatctccagggagtcccctccccggccctaccagcgcccgctgggctgagcccctaccccacaccaggccgtcctcccgggccctcccttggaaacctgccctgcctgagggcccctctgcccagcttgggcccagctgggctctgccaccctacctgttcagtgtcccgggcccgttgaggatgaggccgctagaggcctgaggatgagctggaaggagtgagaggggacaaaacccaccttgttggagcctgcagggtggtgctgggactgagccagtcccaggggcatgtattggcctggaggtggggttgggattgggggctggtgccagccttcctctgcagctgacctctgttgtcctccccttgggcggctgagagccccagctgacatggaaatacagttgttggcctccggcctcccctc

SEQ ID NO: 511 - DNA, 3284 bp, Homo sapiens
  misc_feature (695)..(695): second gene starts at position 695
gaggggaggccggaggccaacaactgtatttccatgtcagctggggctctcagccgcccaaggggaggacaacagaggtcagctgcagaggaaggctggcaccagcccccaatcccaaccccacctccaggccaatacatgcccctgggactggctcagtcccagcaccaccctgcaggctccaacaaggtgggttttgtcccctctcactccttccagctcatcctcaggcctctagcggcctcatcctcaacgggcccgggacactgaacaggtagggtggcagagcccagctgggcccaagctgggcagaggggccctcaggcagggcaggtttccaagggagggcccgggaggacggcctggtgtggggtaggggctcagcccagcgggcgctggtagggccggggaggggactccctggagatgaagggagccccaggatacacgagctcggctgccaagcttgggtggggtcttccaatgcacgaaacagatctgtgctctggatcagctctacccccaccaaacagatggagagacagacaggcaggcagcatttctgaacccagggaggggaaaaccacagaacaaaacagcaagtcgggcttgggccgccggcttccagggcgcccaggacagtgggcgggcgagtgtgtgggtgtgtgtgggaggggccgctgggccaggggccccgggtcgcagagagcacgttcccgttatttattcccctccgcgtcctacacaggctgccctggcagctgtcttcaagggtaggctgagctccccaccctggagcccctgagggcggcccctgagcactcctctctctccactctctctgtccctgccccagcggcttccagtgtggcatctcagcagtgtcctggcccctccagagcagtgggacatctggggactgtttttgtgtttaggggaaaaaattctgctgcactctgcttgggccttgaggtctgtggcagggctcctctggcccgcagtggcctggatctatctgggccatgagtgacgggcagtgaccagagggactggaggccagcggtgtccacccttgccctcagcaagagagaatgcattcttaaaagaaagctgtacatgtatatatatgcatatatatatatgtggctctagcctcaggctccagccccagtggggtactgtacagttaactgaagaagaattttaaagacgatttgaacaagaaaatgaaggcagtgggaaagcaatgccaaatggttgtggagaaagtggccggagcctccctggagtggagcagccctgaagcctgtgccccccgacctgcgggccgctgttttggtttgacatgacaaggaaaggacttcctgctgaccctgagagcctctggggtgccgcggcaccacggggcatgcatgattgtgctagcgtttagtctgagttgatctttttaaaactgcaagtgttgaatactagaggttgttagacccttttttatgttttttaattaatcagtcacttgtaaaagcaaacaagcggtccatccccttttcaaggtcacttttttgatggtaccgaagatcccatggacattaagggacagctaactgtggccagactcagccccatgtccttggccaggcccaaggagaggactcggccccatggggtgtgccagtcttgcagtccgccccagctgagtagcgtgagccagatgacgccacagagacccgcctcttccctgaacgcgggtcggtgtggagtcagtgactgctgactcagggagctccttggccccgtgggcactgtgccagggctggggccttctgctgctgccacacccagctcaggcctgggccagcccctgcccccagcccactgagggggtgggcttactccctgggcagtcttgggggccagagctgaggccagtccatattacagtggctgggctgtttttttcagtagcccctagcattggctgggattcctgttcctgggtgcgcctccacctcccttctgatgtttcctggctatggtggggtgggaacctcagtttcccccaaagtcttccctggatgctggcttcaggttgaagtccctggttcttccagttcctcacgggttaggtaggggctcctgcatcaccttcagaatccagttccaacccccactctccttaggccttgtgctctgctctgccctgccaggctgcccttgtccatgtgagtagcatgggcgggtggtggggacggcagtggtgatgaagggggtgcaccacaggcctcatgaagcagttcccacatgggcgtgtggctggggcgtggccaccacagagcacatggctgtgtctaggcgcaagcactttagcagtatctgtttacatgcgcaaggatcaagccgactacctgtgctgtctactgggacagcagtctccgagctactccgtacctccctctgccaggtcgtggagttaggccccagtccctacttgtcactggttcccactgtgctcctaactgtgcagcacctgggagctctggcctggggctggaggccctggtaggagctgcagttggaggccgttctgtgcccagcagcggtgagcggctcccatgggccctgtgtctgcagggagccagggctgcggcacatgtgctgtgaaactggcacccacctggcgtgctgctgccgccacttgcttcctgcagcacctcctaccctgctccgtgtcctccctctccccgcgcctggctcaggagtgctggaaaagctcacgcctcggcctgggagcctggcctcttgatatacctcgagcttcccctgtgctccccagccccaggaccactggccccttggcctgaggggctgggggccccacgacctgcagcgtcgagtccgggagagagcccggagcggcgtgccatctcggctcggccttgctgagagcctccgccctggctttctccctgtctggattcagtggctcacgttggtgctacacagctagaatagatatatttagagagagagatatttttaagacaaagcccacaattagctgtcctttaacaccgcagaaccccctcccagaagaagagcgatccctcggacggtccgggcgggcaccctcagccgggctctttgcagaagcagcaccgctgactgtgggcccggccctcagatgtgtacatatacggctatttcctattttactgttcttcagatttagtacttgtaaataaacacacacattaaggagagattaaacatttttgctaaaagct

SEQ ID NO: 512 - DNA, 168 bp, Homo sapiens
  misc_feature (111)..(111): second gene starts at position 111
ggacccagatgcgcagcctgggggtgagctgatgctgggtggcacagactccaagtattacaagggttctctgtcctacctgaatgtcacccgcaaggcctactggcaggggcccccgggccacgacagtggccgcccggggccggttcagcagcagtgcaatctccc

SEQ ID NO: 513 - DNA, 517 bp, Homo sapiens
  misc_feature (462)..(462): second gene starts at position 462
gtgattacctcgcccagggcctgaagctcagccctggccaggtccagaccttcctgctgtggggagcaggggccctggtcgtctactggctgctgtctctgctcctcggcttggtcttggccttgctggggcggatcctgtggggcctgaagcttgtcatcttcctggccggcttcgtggccctgatgaggtcggtgcctgacccttccacccgggccctgctactcctggccttgctgatcctctacgccctgctgagccggctcactggctcccgagcctctggggcccaactcgaggccaaggtgcgagggctggaacgccaggtggaggagctgcgctggcgccagaggcgagcggccaagggggcccgcagtgtggaggaggagtgagccggatgccccacacaccgccagtgtcataccaaagagctgagctgcttcggggccatgcagccctccagccttctgccgctcgccctctgcctgctggctgcacccgcctccgcgctcgtcag

SEQ ID NO: 514 - DNA, 3185 bp, Homo sapiens
  misc_feature (3071)..(3071): second gene starts at position 3071
ttgtatgggtaaaaaattccatttttatttttactaatgtaggggagaacatatgtttccttctatccatcctaggtttagggctgagatctctataacaaaagagagattagcaagagaaaagcatgcacatttatttaatataagttttacacgacacgaggggctccataaggaaataaaggcccaaagaaacagttgaacttgaatgttttttatagtaggtttgatgaagagcagccagtgatgtagaaatgtcatagggcaaagtgtgaacaagctaaatgtaataaactgggggaaactgagaggcctgtttgtttagattcctctttgtgtccctgtgcttttggaggtaaggatgctccttttctctgggtgccaggagagcacctcttacatgacagtcttatgatctacttcaggggaaggtcagaaaatccttcccaggttttatggctgcttctggggagaacagcaggcagaaggtcagagtcaccttcctgcttctgcaatttcctcaaatgccttcagcttaaaatattcaatatgtcaaagtgctgtattttgtgtagggtgtcctgaaccccgtcactaacctctaactgaaagttaggattttcttcaattctgaacatagttcataaaccacggtaatattagcaatacttcatcatcaaaagaaaaacccagatattttcatatcacattagttttttgcatctattttcattatgcttatcactatttcaaatttaggatagctattaactcttatttaatgcatttataaagaagcatgcatattaatatataacaaacttatcttttaacattttaataactgtatttcgatataattagattcctttgtaatcctatatattttatgcatttaaaaacatgattttaagaaggcattcataggctttaacagatagctaaagactaagaacccatgtttttattctactttcaatacttgaaaagttgtggataaaacaaaaattatgttaaaaactgaaaagtaggctgggctcagtggctcacgcctgtaatcttagcactttgggaggctggggtgggtggatcacctgaggtcaggagtttgagaccagcctggctaatgtggcaaaaccctgtctttactaaaaatacaaaaattagctgggcgtggtggtgcacgcctataattccagctactcgggaggctgaggcaggagaatcgcttgaactcgggaggcagaagttgcagtgaactgagatggtgccactgcactccagcctgggcaacagagtgagactccgtctcaaaaaacaaaacaaaactgaaaagtaatcaactaaatacttttaaactataatattctatacacttttgatgatagccatgtattatggtattatttatgtttttatatttagcaattcttgttccttaaaatgtgctttatggagaaggagccagagttagtgaaatacgtttaggttaatttaggatatattaatgacattatcccacacattgttcatgtcatagacatgaacttaaaaaatttaaagttcctgctgcctgcttagatgcatctactaatctagagcagttgtaaggaagatccatctgaattagataaaaatatgagcagtggagtattggttattttattctggttggctcagttatttgccaaataaaggccctggtcaaattgttgatgactacgtaaaaataatttggactaatacattaaattgttgatcattaaaataattcttccaaagtgcttgtcttttatgcatttctttactttaacataatataaaaatatgtgttgaatcctctttttttaagacagggtcttgctctgtcacccaggctggagtgcagtggtgcaattacaagctcactgcattctcaacctcctgggctcttgtgatcctcctgtcttagacatctgcatagcagggaccacaggcacacaccaccactcctggatagtttcttttttatttttgtggagacaaggtctcactatgttgtccaggctggtcttgaactcctgggctcaagacgatcctcctacttcagcctcccaaagtgttgggattacaggcatgagccactacacgtggcgttttgaatcctcttctgtacaaagatacaatctgagtccttaggacatttatagcctaatattttcttccatcaaagttgctaaaccccatcaccagaataccacaattaatattctcaggatagattattaatagttgcctaggaataagaatggtatgtggcaatgatagaaatttgaaatggcagatttattaagtatttttaagccatcaagttacaaaaggctattaggggtcttaaaaagacaaagagtatacaataaaacaataagcaattacagattgttttaggttgaacaatttttgtacagttatatctatagtacattactaatttacttagcaaactttatcctgagatttgcaaatttaaaaaaatgaagaatcaaactatattttcttttctgtttttttgaaacagagtctccactctgtcatccaggctggagtacagtggtgtgatctcagctcaacatagcctcaacctcttgggttcaaggaatctcgtgcctcagcctcccaagtagctgggattacaggcatgcaccaccgtgctcggctaattttttgtatttttagtagagatggggtttcaccatgttagccaggctgctctttaactcctggcctcaagttgatatgcctgccttggcctcccaagtactgggattacaggcgtgagccaccgtgcccggcctcaaactatattttctaattagtacagtaaatacacattaatcatgacacaattatttcttctggatacagcaggaaaaattaagttaagagaaagtgcttcatatttcttgatttgttataaaaaggagagatcctctagatttctgggtaagagggaaagctagcaatcccacaatgatttcctttatttcttgccatccgaatatatccttcttcaccaaagttgtggccccagcagtgagtagctctatccatgtttggacagtttctgtgggttcagttgctttgatgtgtttcagagtttcatccagtaaaacatcacctgttgggctgtctgactttagcagtac

SEQ ID NO: 515 - DNA, 4373 bp, Homo sapiens
  misc_feature (4142)..(4142): second gene starts at position 4142
ccgagagtaaataattcttgctttattatgaaccaagtcacattttgtctcttccaacagatgcttgagccaaaaaagcaaacataggcagaaatacaattgagaatatcttcatgtttcaacctttaatctgacttgccttttactatcctttccccatttcttctaatctcttttgccttacaatatattaccttctaggtatcacctcatcctatagaatcccttctagtttaatgtcctgccccaaacaatactaacccattgaagataactatgaaacctttaaatggacagtggttccttttaaaagcagccttactgaaaattttatatacacttaaatcaagtaacagttaccgtgagttttctaaacttttgtgttaacagaaatgccagttcagcagtgtgactgttacttttaaatgtctgtcttgccgccctagagtgacagacatcccagttaaacatattaggaataagaaatacataaatccaatgaagactgtagaaaaagaattttagcacttgaaggaacttcagtcatttaacccaacccattcatgttatagattgagaccatagaaataaaagtagcctataggatacaaaagttagcggcagatctgagataaaaatccagctctttggatccccgcgtttttcaccacacttagctgtcgttcccatgtattacgaacaaagaatcaaatataatcaagtgcagcctcacttcacaggcaagaaaacagactagagtttaatatattgcccatgtttatcttaaggtgaaacatttactcttacaaccacagttgatgttaacctagttaataaaatatgaaaggtaattactaggggaattttaaacggcactacataagcaaacatgactcaaattactttttccatttctgcttcccaaattattggagttactgaagcaagctatgctgctttcaattccaatgataggcatattcccaaataaactcatttaaagagctcataaaatgaattatcctatttccaagtcagttgattagcaaattaagatacagctccaagttaccctactgcttaagggttttccggtccaatttgtaaggttttcggatttaaagattcagactgcataccaaaggtggacaaagacaacgcaagctgatttaggttgtcacgtggcacatactctagtttaaaccctcaactacaagaaaagaaatggtgtattgtcatttttgccaaagcaccccaaaatgaaatactttcttactcaatctaggttcttttttttcattctagtcccttaagctcctaggatttttagatgttgaaaatactccctgcgcccggcattcaatattgtatggttcattaggatctgttgtggctggctttggacattttttgttcactagtgagtatctgtattttttatttctctatgtactaaaaaaagcatttctctacataatgaactatttttttttctaggtggagtaatgtatataacgtaattatattctaattaattgttatgcttatttttacaggtagaattagaagatcatgtgatgttggagtaggagggtttatcttggtgactttgggatgctggtatgtttgctaagtattcaagaacatccatgattatagtaggttatctaattcaaaaagcacatgctcttttcagagcagtctcccattgggagatcctcaccctcaatgaagaatcttgatttttcaggacattttcatggaaatcttaaaatgcttgaacagataaatgcatattagacatcccattaaaaagaaagctgtggtttttacacttcacttaggaaagcctcaaccatttcccttaccctaatacttatttcatccctgcttattcatatctgaaaatgctactttaagaatgtgtttacaactactgatgagtgaatataaaatatggatgaacctcaaatatttgccagacctaagagtatgatatgtatgtactatatggttccatttatacatgaatttctacagtgagctatttaaggtggtagaaatcattttatgtagacatagcattattatcccgttaaaaacgagagcaaatacttgtttcttataatagccaatgctatcagaagacttaaaaactaatggattttatcactttacaaattgttatgtagacatcctttttttcctaataaaaaaagaatgtgttgataggtattctgacaccaaaactgcccaaaaatagcactataaattagaacatatttttcagtctcagggtagtagtcatctgtatttaagttttgtgtgatttagagaaatttcataaattaatttctgtaggactttatattaacaatttattcatattcttttcttctaaggtttcattgtaggtataattatgcaaagcaaagaatccaggaaagaattgccagagaagaaattaaaaagaagatattatatgaaggtacccacctcgatcctgaaagaaaacacaacggcagcagcagcaattgaacaatcttgagcatagaagtcaatgtaaacgaagttaagatcaaccacataaaacatttcatgtgcaataagctctcaatcaagtaaataaagtttaagttgtagtcatttttttcccacacttgtgtggaatgaaaacttgccagtttattctggccctgtgtctactgccaggatagcattcttacgtgttacatatagtggacttgtcatccttaaaatgtgaacagaatttattggcagtgtggcaaagaattataaaacatagtgtttaatgtacttggagtttccttgtagtagtaagtatagagtttgatgataagtaaacgtcccttaacaaaaacctcaaccttattactatcccattaaaaaacagcaaatacttactgagttcttgtaagagctaatgtcattgtaagatttaaaactaagggcttttatcactttgcaaattattttttaaatgcattcatcatttgacagtgttctctcatttcttaaaatgcgagtcatcttccaaaagagttgtttttaactgccctaaacatttttggggaagtatgcagggtttaaatttttaagtataattagttctgaattaaaatatgcacatggaacttgtctggcagactgatgcaatagtaaaacaactgcagaattactattaatgtaaacaatccatttgaaagtcaatcagctgctcccattaaaatattatttaaaatacaatacccacagcatctaactaaatcctcaggatttattctccgggagaaattatccctttctaggaaaatgaagttatttctggttttaattcatacaatactttaagaaaatctgttaaatataacaaaacacaagctagatgcttaagaaatgcttaaagaaatattggggcgaaggtaacagcagtcaacaggattgtggccattactggtcctattattttgatgtaccatggaaggcacagaaatcgagcaaggaagaaaatattagttattttgatctacatctttttctaaagaaaagtggagcttgcctccagttcaattcacaagagcattttccctcccatgcccaccttttcttgtggctgtcgctaggaaggatgcagaggctgtgtggtttaccaaatgccttaacttagcagtgaatgacaactgtcaaacacatgttgagggaaaatttttactgattcacaaaaaggaagacagtttgcccactcttagtggcacaaatcaaagctgcatgcactacattatccaaattagtcgtaaccaaatagttaaaaaattctgctgggcacggtggctcatacctgtaatcccagcactttgggaggccgaggcagttggatcacctgaggttaggagtttgagaccagcctggccaacagggtgaaaccctgtctcgtctaaaaatacaaaaattagccgggcgtggtggtgcatgcctgtagtcccaggtactcaggaggctgaggcaggagaatcacttgaacccgaggtggggcaggcggaggttgcagtaagccaagatcgcgccattgcactctagcctaggtgacagagtgagactccatctcaaaaaaaaaaaaaaaaaaacagaaaaaacccaaaaccacccaagaaccaaagaaggcctgatctgtagtgtgaggatccagggcgcagctccgggggggggctgggggccctactgccgcagctccacatagttggctgggaagagcccgtaccggcccttgcacaccccgcgccaccagccgtcgtcaatcatctcgatgttggtgatgatgtcatcagggtcaaatgagatctcatcatcgcccg

SEQ ID NO: 516 - DNA, 298 bp, Homo sapiens
  misc_feature (174)..(174): second gene starts at position 174
aatctgaagaagagctggcacccgcagaccctcaggaatgtggagaaagtgtggaaggccgagcagaagcatgaggctgagcggaagaagattgaggagcttcagcgggagctgcgagaagagagagcccgggaagagatgcagcgctatgcggaggatgttggggccgtcaactcccccacagtttgtggttcggccaagagatcagattgttgctcaaggtcgaacagtgacatttccctgtgaaactaaaggaaacccacagccagctgttttttggcagaaagaaggcagccag

SEQ ID NO: 517 - DNA, 4455 bp, Homo sapiens
  misc_feature (1897)..(1897): second gene starts at position 1897
gggcaagtatagcgcatttgagcccgagggtgtcctggccaacgtgctgggcctgctgctggcctgcttcggtggggcggtgctctacatcttgacccgggccgactggaagcggccttcccaggcggaagagcaggccctctccatggacttcaagacgctgacggagggagatagccccggctcccagtgatgcgcccggccggccctgggggttcgcggggtgtcttcttgcctgcccctgctgaggcgtcttcaggactgcaggctccggagagtggctctggcagcaggcgggcgcgtgggtgcagctgcatctgtttgagtgctgctttctggggtcaggtctccgcctcctctgcttctcctttctccgctgctatagaccagttcattgtgtgtggctcccgtgtctctgttgcccccttcagtgcagaaggctttgggtaggacttcgggtgttcggtcctggtcgcagagcacagatctttaaagaagcgagagaggaggccccaccctcctggcagcagatgcctggggcaaggccaggggaaactgggggggcctcagggacaggcctggaaaggccacgatggctgctgaattcaaacaaggagtccctccagcctgaataacacgtggcacaaatgggcccggcctttggcagaggagcaagtgatatgatgtgtaaagtatgttggtggtgaaagcaaggttccccaggagaggggagggactggcccctgggaagctctgagatgaggctgtggcccagctgtagtcctgaccttcctcttctttaaccctttagccctaggatggctttggtgggagaggggatagaagcccatgacttcagacagactttctcttggcagatgcaggcgggcctcctcccaggctgctccagacatgggggttggggatggggggcaccttgcagccccttcctgctggggctccctccttgtagcaccccccttgcggctcagctctggtttcctctcccaggctcacccaggctctgctcaggctgggaggcagagggcacaaaccttataattttttaaatgaaaaaccgctgctgctggctgtggctagagccccctggggctgctggagctgctgcctctgttctggaggacgagccttctccttatctgctgcccatctttccaggaagtcaggatggagtcagaacaactacagtcatcccccgtggtgtctgcacatcactccagccccataaagagtgtcatgttagctgagtcaccatttggcttcggcctggaaatagtgtgattagaacactgatcgtgtgcgaggccaggagatcaagaccatcctgactaacaaacacagtgaaaccccgtctctactaaaaatacaaaaaaattagccaggcgtggtggtgggcgcctgtagtcccagctacttgggaggctgaggcaggagaatggtgtgaacccgggagatggcgcttgcagtgagctgagattgcactccagcctgggcgacaggctcaaaaaagaaaaaaaaaagaacaccgatcatgtgcttcttggatctggtgactgttctctccctgttttcctttctttttgggtgtttgaggagcatggcttagcttgagacacacacagacactgtgtacttcagtgaagggcttaatatacagtttccaaacctgacgactcttcttcttgtaatggctgcccttttcctacctgaggccgtcttagagaaaggggccagtctcctctaatgctcagatttcccatagttggcttttgctgtgtctcctgcctcaggcagtgtcatttctgggagcaggtggttgtagtccaggcccctccccagcagggtctgcccaggctccttcgagcccctttcccccccccctccccccccaaatcgtcttcctcccatggcaatgactttaggcgcctgtgagaggcacaaaagcggcaaagcttcttctactagttcttctggtaggcttcacttaactgggacttttactctagcgtgaggagggggcctcctaaggaaagtcatgctgggtaaactgtgcgatgttacagagcacattgagtctgtggtcatcgtggttcttctatcttcactgtcacctgtatcctgttacacatactcagttcctaattgtaagctcaattttggtattagcaaaagcatctgtcagtttttcctcaattactcacacctcttcttgcctaaataaaacaaagaaacaaagaaaacaagtgtggtgtcattacacgtctcgggagttcctcgtcactgactttatatatataaaaaaaagaatgcacatgcgggccacgttcacagatagacagattcacccgaaatgagaatgagggccttaaggctgccgaaaacaaatgggtggaaatagcaacgttgtttccgtcaattccaaatgtgcactggctgcgtgagacaagccaatctccaattcctatgcttttttcattaaaaagaaaaaactatctcgagaggaaaaagttctggtcaaataggagttcagtgtttgttatctggtaacagtttttttatcttcctacaattacttggggaaggagtgtcttcggggaggaaaaactgacacactgacaaggctcccgaaattggacagaatggttaaggatatagctcttccttttgggtttttctaccagtaggcttctagcacctgaattttcacacactgcaccacagaccttctccaaacgcctctccgaccccacagcttctgcacccagctgcgtccgccagcacgaggcgcagtaggaaacgccccagtgcagagtgggtgacggcagtgtgatccctgaggagggagctgcagcagcttcagaagcgggatgttctctgaaaataccaacacgatccatgacatacagacctgaattttctctatttttgtggcgtttcacgtttctctcaagaggattaataattttggtggtggatttacgttaagaggaaagaaggaccaaaaaaaaaaaatcccacagccacctgacctgaagtcgctttcattctcatttagcctaggagaccgatcaacagcaaaaccaacctggataaggctgaataaggatgttaaagcccaaacaactagcaaaggaaaagtacacaatcgatggcttgatgttacatatggctgtaatgtagaaatactgtaaactgcaatttagtgttaatactgtcaactaatcagagacttcggaaaactggcaaggcctaaaccataaggatgaatgagacctcaggttctaagtctgtcagtctgggatttacactgttccatgtctgtaggctacaccctggaaaacatgcagagccgagacagatgagatagaaagtacccaaaacgagagacgagagcgtatgtacataaaaatccttactggaaccacagaacttactgaatgagggccattcctctttaagttttcttttcatctgaaaaccctattatctagcaataagttaaattagagacagacagctccacttgcatgaatctacagaacagtccagacgccagtgtgaggctgctattccaataccagcacagctagcctgactttccactagtggtattttggcaaaaatgtcaaagaggcgatcaaagacaggacaggtcgtgggtttctccctgggaaggtcatccctccctttccctcccccacccgacccccaactcatgggaaaaaaataaagactgcagtagtagcatccgcgtgcgctgccagttcccctggggccttaattgttgccttcgccgccatcgtcgtcctgctggtcgctcgtccagagcgtgaggttgtcgcggaggagctgcatgatgagcgtggagtccttgtaggagtcctcgttgagggtgtcaagctcggcgatggcgtcgtcgaacgcggtcttggccaagtggcacgcttgctctggggcgttctggatctcatagtagaagacggagtagttaagagccaggcctaatcggatggggtgggtgggctgcatgtgctctttgctgatctcgtgggcttcgctgtaggccttctcggaggactccaccaccgtcgcccttttctctccggtggccacttcagccaggtagcggtagtagtcccctttcatcttcaggtagaacactttgctctcgtactgggtctcgctgcaattcttgatcaggtagttatccagcaggctcagcacatcctggcacacagcctccaactccttctctatcttctcccggtacgcacggaccatctcaatcttcttctcattgccgtctgcagatgtcttctgctcaatgctactgatgaccctccaggaagagcggcgtgcccccacaacgttcttgtaggccacagacagaaggtttcgttcctcattcgacagtggctcattcagctctgtcac

SEQ ID NO: 518 - DNA, 1766 bp, Homo sapiens
  misc_feature (890)..(890): second gene starts at position 890
ctgtttctgaaagtttattccacaagctggttccaacggcagggcctttgcgtctgctgtttccaccatttgaacacccacccaccccagcatggccagctctctcttcccgtcccagcccaaatccatctccttggggccttcctgctgccccgttttaagaacagccccacacccaccttgcctcatcacctctgtaatttaccaccatgcagatggcatcctctgactttcctgagcctcgaggctcatctgaccctgacaggaggcagcagcctcgcggtgcattggggtgactggggttgcgtggtttcagctggtttgcctctgggggttgggaatttttcttcctgtgtatacttctctgcactttccaaattttctaccacaaagatacatcagaaataaatgctggagccgggcgcagtggctcacgcctgtaatcccagcactttgggaggccgaggcgggcggatcacgaggtcaggagatcgagaccatcccggctaaaacggtgaaaccccgtctctactaaaaatacaaaaaattagccgggcgtagtggcgggcgcctgtagtcccagctacttgggaggctgaggcaggagaatggcgtgaacccgggaggcggagcttgcagtgagccgagatcccgccactgcactccagcctgggcgacagagcgagactccgtctcaaaaaaaaaaaaaaaaaaatacaaaaactagctgggtgtggtggtgggcacttttagtcccagctactcgggaggctgaggcaggagaatcgcttgaacccgagaggtggaggttgtagtgagctgagatcatgccactccagcctgggtgacaaagggagactccgtctcaaaaaaaaaaaaaaaagaaaaaccttctagagctgatttgatggacaatggagagagctttccctgtgattataaaaaaggaagctagctgctctacggtcatctttgcttaagagtatactttaacctggcttttaaagcagtagtaactgccccaccaaaggtcttaaaagccatttttggagcctattgcactgtgttctcctactgcaaatattttcatatgggaggatggttttctcttcatgtaagtccttggaattgattctaaggtgatgttcttagcactttaattcctgtcaaattttttgttctccccttctgccatcttaaatgtaagctgaaactggtctactgtgtctctagggttaagccaaaagacaaaaaaaattttactacttttgagattgccccaatgtacagaattatataattctaacgcttaaatcatgtgaaagggttgctgctgtcagccttgcccactgtgacttcaaacccaaggaggaactcttgatcaagatgccgaaccctgtgttcagaacctccaaatactgccatgagaaactagagggcaggtcttcataaaagccctttgaacccccttcctgccctgtgttaggagatagggatattggcccctcactgcagctgccagcacttggtcagtcactctcagccatagcactttgttcactgtcctgtgtcagagcactgagctccacccttttctgagagttattacagccagaaagtgtgggctgaagatggttggtttcatgtttttgtattatgtatctttttgtatggtaaagactatattttgtacttaaccagatatatttttaccccagatggggatattctttgtaaaaaatgaaaataaagtttttttaatggaa

SEQ ID NO: 519 - DNA, 505 bp, Homo sapiens
  misc_feature (45)..(45): second gene starts at position 45
gtgaaggttcttcaggttcttaaagtctccatctttgatttcgggtttttttttttttttttttttacagatcacaggaattttaaattgcagatcagtcatgctacttggggtgatcagaaagacttgaacacttaccaagtgaataattttattaaggtcctgaaggtgagtgtccggaggtgctgggtaaaacacatcacaggtaagaaatgggaaacctacctcagcatttctgaaaggcacaatctatggaagggaaacctagcgtaataaaaccctcactggatgtacatggaaaggagtatggtgagctatttcctttttaaaggatgagaccttcataaattggcccctcggattctggtgattcccgccgcaagcgcaaatgctccagtgtgttatgaaaatgtttgttaatctgctctgtttcttcactggattcaagattcgggaggtcttctcgaatcttttggataagctggtttaaaacctgaattgttac

SEQ ID NO: 520 - DNA, 278 bp, Homo sapiens
  misc_feature (82)..(82): second gene starts at position 82
aggatcagctggtgcaatgttagaatcaaattgggtcagagtttgtgagcttgaagagcgttcactaaatgtctcccactgctgctccaacactgaaagcttggacacttttccctgaaatcctaaatacaaccaaaaaccctggcagacgaaacctctgggtccaagcagacagccaggctcacaacaacactgttgtcagccactgttcacgagtaacaggcttcgtattttcaacaactcagattatctagaggctgttcccgtggagtaagctc

SEQ ID NO: 521 - DNA, 285 bp, Homo sapiens
  misc_feature (89)..(89): second gene starts at position 89
cgctgccagttcttttaagttccatttcctgcatgtggattttgcttggagtcatacgaatgggaactggatgaacaatagcagtatcctgctccaacactgaaagcttggacacttttccctgaaatcctaaatacaaccaaaaaccctggcagacgaaacctctgggtccaagcagacagccaggctcacaacaacactgttgtcagccactgttcacgagtaacaggcttcgtattttcaacaactcagattatctagaggctgttcccgtggagtaagctc

SEQ ID NO: 522 - DNA, 300 bp, Homo sapiens
  misc_feature (88)..(88): second gene starts at position 88
ctcagttcctacccccggttgcgagaggagacagagcgaatcgtcaccacttacatccgggaacgggaggggagaacgaaggaccaggccgagtgtactacttcaaccacatcactaacgccagccagtgggagcggcccagcggcaacagcagcagtggtggcaaaaacgggcagggggagcctgccagggtccgctgctcgcacctgctggtgaagcacagccagtcacggcggccctcgtcctggcggcaggagaagatcacccggaccaaggaggaggccctggagctgatcaacg

SEQ ID NO: 523 - DNA, 413 bp, Homo sapiens
  misc_feature (244)..(244): second gene starts at position 244
gcagacggcaaccgggccgctgattgggcggcgaaggagccattcggggagactctggtgggttcggctgccccaagagtgataagttcggcttcagacacgccttagcgccagcagtgagtcggagctctatggaggtggcagcgggtaccgagtggcggctgcagcagcgactcctctgagctgagtttgaggccgtccccgactccttcctcccccttccctcccccttttttttgtttttcctccttaagctgctgtcaatccaaaccattggcatcatcgtttcttttgaattaaaaccaacatatcagcaatagtctgctctccccgggaatctctaacatgctctgtttacatcgataaatgcacttaaggaaaacaaacaaattaaagctcatcttaaagtccaa

SEQ ID NO: 524 - DNA, 541 bp, Homo sapiens
  misc_feature (166)..(166): second gene starts at position 166
ggtggaagatgtctatggatgtgacattcctggggacgggtgcagcatacccatctccaacccggggtgcctctgctgtggtccttcggtgtgaaggcgagtgctggctctttgactgtggggagggaacacagacacagcttatgaaaagccaacttaaagcaggttatcctgaatacatgtctaacaattttccttgcaacgttagctgttgtttttcactgtttccaaaggatcaaaattgcttcagaaattggagacatatttgatttaaaaggaaaaacttgaacaaatggacaatatgtctattacgaatacaccaacaagtaatgatgcctgtctgagcattgtgcatagtttgatgtgccatagacaaggtggagagagtgaaacatttgcaaaaagagcaattgaaagtttggtaaagaagctgaaggagaaaaaagatgaattggattctttaataacagctataactacaaatggagctcatcctagtaaatgtgttaccatacagagaacattggatgggaggcttcag

SEQ ID NO: 525 - DNA, 1431 bp, Homo sapiens
  misc_feature (101)..(101): second gene starts at position 101
gatcatctgtatctactttctcctcatttgttgaaagttgagattcatacttggacaactgcttcttaatctccacatcatcatcattttcaggtttctttttgtttttttttttttttcctttacaagatcctaactctgattttgtcagactcaaaagctgggattcatattacagatatacagtttacagcacacttggctggaatgcaaaaccatctattccacaaggccagccatgcaattctagacatcttgagaacatcaggtccaaaccctagcctaataggaaaaatcagtcctaaacaggacagacttggtcaaggtcaaggtcactcgagcggtgtcatgacagcaggatgcttctgacctcagtgttctgagttcatgtccttgcttgcatgaagtcttgtaagcgttctccaacagtctcagctgcttcctttgctcgcctcccagcccagtccatgtgtctgtaagcccacacctgctacaggaaatctgtaactcccctcttcgtcagcctttgccctcaccctcagcctggtagaccttcattttcctcccctccaacctcttgaccatattcgatccaaaggcccaaatttcagtacacaggtagctaagacaaaggttagaaaaagcccagaaggcactttattggaggtctctgcctccattcacaggagaaaggagctgggagccccatcctaagggtcccagcatcagcccactggagggcctggaacagtccagcactctgtgggagaggagtggggaggggaatgttttagaaaaaatagatctctatgtacatctgacatatttatatagcacataaattagggagtgctctgacccctgcccgtggagcccaagcactgagcagggaggtgaacgccagtccagaaagaaggtgctggagcccctgctctgtcctctccatcacggtgctcccctagggcctccccaggcctccttggctcagtccaggtgtctgcaggaggaaggtgttgtctgcatttagtgtctgagactgggtttgaggaggcaccagataaaaggagatacacttgcagctataaagtcagcttcaaaccccagggcttgtaattccaagaggagggtggggaggcgaggccatagtctccgagtcccaggacgatggctgacaatacaccaaaacatcagcttctctccacagcacagctgggagcattccccagtggaggggccatctggcctgcctgtcctcccaggaaggtttgcaggcctcgagtggtccgtgagtttggtcccgggtatagttccaaccctcagttccgactctggagaacctcttcctccttccagccgcttgagtttttgccaaacttgtagacgagtcgccggccatccacccgttccaggatctcccgtttgtagtagtac

SEQ ID NO: 526 - DNA, 213 bp, Homo sapiens
  misc_feature (179)..(179): second gene starts at position 179
ctcaggaccgtgggcgtgctgggctccacagcggtgatgatacccttcatgcctgtgttgtgaagcacactgggtctctgctggagggcatcctgggtccgaggggagatgggcgagtgctggtgggcatgggagtgggaggcggggcggctgctgctgcccccacccccgccgctgccgcagccaaagctgctgccaaagccgcccagtttg

SEQ ID NO: 527 - DNA, 4943 bp, Homo sapiens
  misc_feature (4363)..(4363): second gene starts at position 4363
ccagtgataaattgtccatttatcagttgcttagtgtaaaaaccatacattattatcttgatgagaaatcagctgaccccctgcccctcaaaatggcagcattctgccctagatgtcatcaccgttgggaacattagagtcttgctctgggcaatctggttttaaactttattttccatgtacagtttcagattatacaaaacatagaaaatggactattttaaaggtacattaagtagaaagtttctaactaccctaaagtcacaaaccaagattcaaaatgaacctctaggccttgccctaacatttccccaacaccacaaaattgtccaacttgctctattgtaagtaacctttaaactattagcgagtttagtaacatcccgcgaggcagattttaaactacgatacagtttctatctaggccactgtgtttagtgtgtttacaaacaggcttggagttctaggtttcttcatcatcagtgaacacagagcgtcctagagcgccagcctgttcatgaggggtgtccacaaaagcacgcaaactatagcagagtgtgtgggagtgaataggtctccgatgttcctgtattcaggtatatatatatacacattcacacagaccaacaagtcaagcattctccaaactcatttgaacagagacccaaaataattttaatgcaaataacaaaatgagttagtctgtctccatcacatagcccctcaatgaaagaattacagtactttataaaaatgtcataaaatgcgcaaactacagttccttcaaatacagttgatgctatctttggtcctaatatgtgcttcttggatgtctactaattttgttgttgttattgttcttgaataactggtaataagcaccaagtgagggctgattctatctacaggtaagaagcttggatgttttctccctgattttgtcatttctttccaacttcccaaatgcatgtcatacagcagggaagaggcatctctcatgtctcaaaaaagcttaatggcacaggtggatgtgggcactgaatgttgtacagcagtggcaaccagccgggaaaatccataggatcatttcagaccgcattcaacacagatactcatgtagccccgacgtttcttgtgaagggaattgatgtattgcttgagggggtcgatctctggttctaaggtgttttgtttgtttccatcgtgactaccagaaaattatagaaggccagacgcagtggctcatgcctgtaatcccagcactttggaaggctgaggtgggcggatcacctgaggttgggagttcgaaaccagcctgaccaacatggagaaaccccatctctactaaaaatacaaaaattagctgggcatggtgggacatgcctgtaatcccagctactcgggaggctgaggcaggagaatcacttgaacccaggaggcagaggttgcggtgagccaagatggtgccactgcactccagcctgggcaacaagagcaaaactcagtctcaaaaaaaaaaaaaaaaaagaaaaagaaaaaagaaaattatagaaaagccaccaaggtagaaagtttcaagggaacttaagattcaacttcctccatgagcttgggtagcatcctgttaaccctaggggtgtaagccacattcttgcccacaatatgactagtgagagtatctcatggaggcaggaggtgacatttgtcctgtctctggccccaggtcaccctgtactgcattggtggcttctccatagggagggggtcctatctcatagactccaaacttcatgatggcagggaggatatctggatttgctcacccctgtattttcagagcctcacacagtgcctggaacatggtaaacatttaatactatctgtcaaaaacaaatgaatgaaagagcagatggaaagagccaatcctgcattgaagagatatccatggtggccctaaaactactcaaaccagatgtctcttcagctccactggaactgagctgatggcaaaccaccactccactcagcagaaggtcaagtgcaaaagtatttaaatagcacgaggtcccacaccccatcccaggacagcccccagcatcctgctccaacataagcagaaaaagacaatgaggtgcaaagagcttatctcctgggatggttcctgggtggtctgcattgccacacagcatcatgctttgatcctgaaggacaaggccccaaaagccctatttctcagcacagtcttaaaatcacctggaaatcattcacccagaccctctgaatcagcctgtcccaagcagcacgggaacccctaaagcttgaaaactccagctctatgggaccctctcaccgcatttactgtcgggaccatgggcccctccacagacatgttttctgggtgttacacagacaggtactgcccaataactgtcatctgcacgaactgaatggagctatatttagactgatctaaatacctaaatgcctccaggagcatttaataataggcacgcgtaaagcagcctccctaccatgccacaggcctcgattttgaatcgttttatttttgagacggagtctcagactgtcgcctgggctggagtgcagtggtgaatctcggctcactgcgacctccgcctcccagtttcaagcgattctcctgcctcagcctcctaagtagctgggattacaggcacctgccaccacaccgggctaattttgttgtattttcggtagagacggggtttcaccatgttggccaggctggtcttgaactcctgaccttgtgatccacctgcctcagcctcccaaagtgctgggattacaggtgtgagccaccgcacccagctgattttgaattcttagtggtgttctttgcagcctccatcacagtgtgtaattagtttcttttcttttttttctttttttgagatggagtctcactctgtcacccaggctggagtgcagtggcacggtctcggctcactgcaacctccacctcccatttcaagtgattctcctgcctcagccacctgatagctgggattacaggcatgcaccaccacgcccagctcatttttgtatttttagtagagacaggttttaccattttggccaggctggtcttgaactcctgacctcaggtgatccacccgcctcagcctcccaaagtgctgggattacaagcatgagccactgtacccagccagtttttctaattaagttttaatctgtctcctccactaggccatgagccctaggaggagattgtctctagagggtatcccctgtgcctggcacatgcatgcaagttatgatttatgttgatgaatgaatgaatgaatgaatgaatgaatgaatgaatgaatggtggatgggtcctctgaggctctagaaataggggtgagaggccagccaggtgtagcatgaagggctggacaagaagggagaggccttctgggataagatgggaaggaggctgtaccccacaccctgaaggtgtctatgagttcacatggctcaggaatggagttttggggccctagatgtagacagctgtggcgatggaggccaaggttttggcctgctgtgggggttgcattcacctccccatctccacatgacgataccccagcatttacgaggcagctctgctgacctggcccaggcaccgtggtccccaacttcaacgcatctgaagcgttgcccagggagcgcgttagaaatgcagattccctggccccatcccttgaagactctgattctgtaggtctggggtgagggggggggcgctgtaggttttgcctaaagacgagtctaaatctggcacgcaggttaaggatgaccattcctaaggcaagcaggtgacactgtcggcaaattgaggtgagactttttctgacccaccccgataccggagggatggctgggctctggtttggatacagacagaatgccagggactacacctgcttctcacttggaacttgggtgaaacctctcaggaagctgtcattcttctcctataccccacctcaccctcttccacccaccactagcagagagattcgggaggggcttgggccagctgaaacccataggaagcacgtccccagagacccggctttcccagcctctcctctcctcccatcacagccccatggttaagaaatgtcctgccgagtgcttttggatttgagcattgctggatttttgcttgtgtcttgttgagacttttgagtgggcagcagttctgaataccagccttcatagtctattctctgatctcaagaatgcaaaaactcttctctcttttggattttttttttcttttttcttttttttttttttttttttttttttttggctacattaatttattgaaacacagatcaagagcagaggaggaaggggagaggcaggaaggcagttgccgtgggcaaggttctggtcctggcccttcctgctcctgaggccccttcctatgggtgccagcggacttctttctagggtggcctttcccactgtggggtggcagagcccagaagtgggggatcacacagagaaatgtgaggccaggagtgggaggggtctttcaaagtgcaggagaagtagctgagcacttgctccaggcgcctggactggatgggccaagcaaggcagggcaggaaagatgcctggggcctgggacttgagttggggtgcctaacatttccggcagctgctgccgcaagaccccacacccagggagctgataccacaggagcccacgccgcaggaaccccctccgcaggtggtgttcaattggccgcagggcgcacacaggccggtgctcaccgccacgttcccgttgcacggagcgctgcagacactgccagtcactggccgggagcctgacacgcagaggtccccgcacacgaccccgccccgggagctgctgacac

SEQ ID NO: 528 - DNA, 299 bp, Homo sapiens
  misc_feature (134)..(134): second gene starts at position 134
cttttctctctgaatttcggaagggagttccaagccttttgctgcaataaatacccagctagacctgaatttcatgttcctgatttctttacttccaagtgcttctatggcattcttggcatcgttattcagtcattagaagtggtgctggaggcaacggctttctcgctcacatctgttcgagtggagcacttcactatggaattctcaacttttttcttttcagtggtcgtggagctgtgggactgggcctccatgatgtcttctcattacttcagctctcttcgaccaaaaatgcc

SEQ ID NO: 529 - DNA, 1584 bp, Homo sapiens
  misc_feature (1373)..(1373): second gene starts at position 1373
acgttgagtccatttttaatgttctgatcacctgacagggcaccccaaacccccaactcccaataaaagccgtgacgttcggacaaaccgcgtactgtgaaccttccggccccaaagccccggcccggccaggggtgggagagtctcctccagcacctcttttgtgggcccgccaccccccagcgttatccccgtgtaatgggtggaggcggaacaggccacatcacggcatcaggtctctacagcttagcaaatactgacatttttccgtttgggggatggggggaaccacttcgcctaacgctcaaacacatcaaccccaggacttccttttgtgccagctccccctcccagaagcctgggccccaccttgtcctcagtggctgagtgggaggggcaggtggagaccagacccccaccccgccccagcgagcttgtctttccaccacggttgggggtggagggaacccgctcagctccccagaggccgagtctctgccccagctacacattgagtgccttgttctcgccgcctaccctgtgcctggcatttgtcctctccccccacagacgtggaacagggagggcagggtcctttctccccttactctgacctgtgggttttccaggtgccaggaacttcggtcaggcgccatctgtccggcctgagggaagacctggctggtttcagtggctcaagtgagcccaccctcacatctcgcccaggtgtcccaacaccacctgtggggtgggggaggtggcgggaccatgctgggcctgacagggtccaaggccatccttggcttcaacgtcccaccaggggagggtcttggccccccacctgccagcactgggccctgcctctgcagctgtcatcagaaccttcccctcacccacacctgctgctcgcctcccacctgagaggaccacctgagggacccagcctctagccaggttctctgcccctcaccagcccctctggccaggtcaccagctgccactctcagatgttctcttggcctttgcagcgtctataaccctccccaccttctgctcctgcacccctggccaggcctcgtcacaggcaaggacacaacagctcagcaggtgaagccctgggcctggtgggactcaggtttgaataggaaaagagcagtgaggggccacagtgacaccaagaagggaaggacgggggccctctgagaccccagggaaaggacttttggggcagaattcccaagaactgagagggtccatcccccatgggcgttggccccttactctgccagatgctgctcgttgcctggcaggagccagatgtggtcaacctgcattcccctgggagcccactgtcccccccccccccccgcctgtcactgcagccgcccctgccctgtgccgtgctgcgctcacctgcctccccagccagccgctgacctctcggctttcacttgggcagagggagccatttggtggcgctgcttgtcttctttggttctgggaggggtgagggatgggggtcctgtacacaaccacccactagttctcttctccagccaagaggaataaagttttgcttccatt

SEQ ID NO: 530 - DNA, 509 bp, Homo sapiens
  misc_feature (331)..(331): second gene starts at position 331
cttgtcccggagctcttcaatggtcttgtagtaggggctgtagtcccgctcagggctagctgggctctgcttcaggtgccagtcacggatcttcacctccaggtcagcgttggcctcctccagggcgcgcaccttctccaggtaggaagccaggcggtcgttgaggttctgcatggtgatcttctcattgccagtgaggaggccgccatcacaagcaccaaagtcaacaaagccaccagcaaaacccccaccaaagccacctccaaggccacctccatagccacctccaaggccacctccatagccacctccaaagccactaccagccccagcaagagcacaagaggaagagagagaccctcactgctggggagtccctgccacactcagtcccccaccacactgaatctcccctcctcacagttgccatgtagaccccttgaagaggggaggggcctagggagccgcaccttgtcatgtaccatcaataaagtaccctgtgctcaacc

SEQ ID NO: 531 - DNA, 566 bp, Homo sapiens
  misc_feature (269)..(269): second gene starts at position 269
gtatgacaacgaatttggctacagcaacagggtggtggacctcatggcccacatggcctccaaggagtaagacccctggaccaccagccccagcaagagcacaagaggaagagagagaccctcactgctggggagtccctgccacactcagtcccccaccacactgaatctcccctcctcacagttgccatgtagaccccttgaagaggggaggggcctagggagccgcaccttgtcatgtaccatcaataaagtaccctgtgctcaaaaaaaaaaaaaagactgggaagagagctagagggactaggagataatgtgtatgtaggtttatgtgatgggatatcaccctgaagagttgtgtcttttgtggccagtgacaaatccaggaaatgaatgttgctgatagggataaatcttgaggctgagggcgggtggtacagatgtgtatgggaaaccccaacccctatatattgtaaatagatgggctgggctaaacattgttgccgtttcatacttctaccaactcagcttttacacaataaagctctactgtctctggtttgctt

SEQ ID NO: 532 - DNA, 2155 bp, Homo sapiens
  misc_feature (2112)..(2112): second gene starts at position 2112
atctgccaccgcagtctggttggagctgttgtcttgtatgctcagcgaggcccggagagacccgggagagagctaggccgagtccaccgcccgagtctgctgcccgagcccgcgttacgcacaaagccgccgatccccggcctggggtgagcagagcgaccaccgcccgggagcagcgcggcgagacgcacggtgcgccctatgcccccgcgcccccaccgcccccgccgcggcagccgaagcgcagcgagagaacgcgccaccgcggggcccgggtgcagctagcgaccctctcgccacctgcgcgcagcccgaggtgagcagtgagcggcgagcgggagggcagcgaggcgttcgcgggccccctcctgctgcccgggcccggcccgctcatggcggccatccgcaagaagctggtggtggtgggcgacggcgcgtgtggcaagacgtgcctgctgatcgtgttcagtaaggacgagttccccgaggtgtacgtgcccaccgtcttcgagaactatgtggccgacattgaggtggacggcaagcaggtggagctggcgctgtgggacacggcgggccaggaggactacgaccgcctgcggccgctctcctacccggacaccgacgtcattctcatgtgcttctcggtggacagcccggactcgctggagaacatccccgagaagtgggtccccgaggtgaagcacttctgtcccaatgtgcccatcatcctggtggccaacaaaaaagacctgcgcagcgacgagcatgtccgcacagagctggcccgcatgaagcaggaacccgtgcgcacggatgacggccgcgccatggccgtgcgcatccaagcctacgactacctcgagtgctctgccaagaccaaggaaggcgtgcgcgaggtcttcgagacggccacgcgcgccgcgctgcagaagcgctacggctcccagaacggctgcatcaactgctgcaaggtgctatgagggccgcgcccgtcgcgcctgcccctgccggcacggctccccctcctggaccagtcccccgcgagcccggagaaggggagacccgtgtcccacaaggaccccaccggcctgcctggcatctgtctgctgacgcctctggcttgcgccaggacttggcgtgggcaccgggcgcccccatcccagtgtctgtgtgcgtccagctgtgttgcacaggcctgggctccccactgagtgccaagggtcccctgagcatgcttttctgaagagccgggcctcagagtgtgtggctgtgtgtctgttcgactcccctcgccccattttcaccccacccccgcctctgatccccgggggcgagattggcgcgggagtgtggccgcgccccatcagatgttcgcccttcaccagcgggagcttgatatcccttgtctgtaacatagaccccgggtactgcgggaggggagggctgctggggaggatggggggatgttatataaatatagatataattttattttcggagctaagatggtgttatttaagggtggtgatgggtgagcgctctggcccaggctgggccagactcccgcccaagcatgaacaggacttgaccatctttccaacccctggggaagacatttgcaactgacttggggaggacacagcttcagcacagcctctcctgcgggccagcccgctgcgaaccctccaccagctaccggagggaggagggaggatgcgctgtggggttgtttttgccataagcgaactttgtgcctgtcctagaagtgaaaattgttcagtccaagaaactgatgttatttgatttatttaaaggctaaaatttgtttttttattctttgcacaattgtttcattgtttgacacttaatgcactcgtcatttgcatacgacagtagcattctgaccacacttgtacgctgtaacctcatctacttctgatgtttttaaaaaatgacttttaacaaggagagggaaaagaaacccactaaattttgctttgtttccttgaagaatgtggcaacactgttttgtgattttatttgtgcaggtcatgcacacagttttgataaagggcagtaacaagtattggggcctattttttttttttttttacagggaatgcattctttctgaaagtatcaagacggcgcc

SEQ ID NO: 533 - DNA, 408 bp, Homo sapiens
  misc_feature (124)..(124): second gene starts at position 124
gtctggcggcttctctgttgacaactcagctggttccacaccctggcaattgtgaagagttggccaaatgtttgtccactgagctgatctcctctctggagcaccggggccaccaggagggaggtttattcagtcaccatgaagctgctgctgctgcacccggccttccagagctgcctcctgctgaccctgcttggcttatggagaaccacccctgaggctcacgcttcatccctgggtgcaccagctatcagcgctgcctccttcctgcaggatctaatacatcggtatggcgagggtgacagcctcactctgcagcagctgaaggccctactcaaccacctggatgtgggagtgggccggggtaatgtcacccagcacgtgcaaggacacaggaacctctccacg

SEQ ID NO: 534 - DNA, 305 bp, Homo sapiens
  misc_feature (21)..(21): second gene starts at position 21
accagtagccgcggacctcggtttattcagtcaccatgaagctgctgctgctgcacccggccttccagagctgcctcctgctgaccctgcttggcttatggagaaccacccctgaggctcacgcttcatccctgggtgcaccagctatcagcgctgcctccttcctgcaggatctaatacatcggtatggcgagggtgacagcctcactctgcagcagctgaaggccctactcaaccacctggatgtgggagtgggccggggtaatgtcacccagcacgtgcaaggacacaggaacctctccacg

SEQ ID NO: 535 - DNA, 922 bp, Homo sapiens
  misc_feature (481)..(481): second gene starts at position 481
tcatgtcaaactgctttattacatcttaaataacagtacagtttaatatagtatctatcttgcatccagcttccttgcagtacactgactttaaaattaaatacaaaaggtggaaaggggtaagggtgcagagagctctacagagttgttggacggaaagagaaagaaggggtttcatttgtattctctttgccagatccaggcctaccgcaaggtcacagcacagttttgtatagaatgttgcagaaaacaggatggagaagccactactgctgctatgaaggagtgcggggggcggggcggggggtcccacagaacctgctttccaaacgctgctgctgaacactggccttgaaatgaacaccaggacaatctgtgtgtgatgggaatgagccacctcagatgtggagggccctgaagaatccatataggagggcaggctcttcactccctctccctccctctctctccctccccaccacaggcctgctccttccttagccttggctaagatggtccttctgtgtcttgcaaagactccccaagtgggacagggagcccctgggagggcagccagtgagggtggggtgggactgaagcgttgtgtgcaaatccagcttccatcccctccccaacctggcaggattctccatgtgtaaacttcacccccaggacccaggatcttctcctttctgggcatccctttgtgggtgggcagagccctgacccacagctgtgttactgcttggagaagcatatgtaggggcataccctgtggtgttgtgctgtgtctggctgtgggataaatgtgtgtgggaatattgaaacatcgcctaggaattgtggtttgtatataaccctctaagcccctatcccttgtcgatgacagtcatcctaatgataataaaacctgcatccagat

SEQ ID NO: 536 - DNA, 3104 bp, Homo sapiens
  misc_feature (2454)..(2454): second gene starts at position 2454
tctggttaaaagcactttattgattacagtatcaattcacaacatttcataaagccactgtacaaatagaggaatgaatcactgtgtaagaaagatctaagaacagttaaatcatgatacaagtccatagtttatatggtttagagctttaagagccttaatctaacacgtttacccttcccataattagactactactgacattcatgttcagttgaccacgagtgtgtacaaatcattctaggtaaagacaaacactttcagaatgctttaacagaaaaataattttaatcaactttaaaaacacacttagatgtggatgcctttggataggaaaatagaaatgcaagtgttcagatgcttctttgaaaagaaaacaataggatagagcaccattgtgtaaaagacaaaaggcttgagatatctaccaagtatatcactgaagttctattaattaagaaataaatactgtatgatgtaagattttgttgaatacatttaacaccagttggaatatagctttttcccccccgtaatgctgctttatcacaactgtattttacaaaatcagcaactggatttaagaaagaagacataggagattttatcaacatgcaaacatttgctaaatacaaggtgtaccatcaatgtgtgattaattaataagttactttttaaaataaagtgctagcttagatattctactataaaccatttcattgagtacctattatgtaaccaatattttaaaatatacactgaatctgaggcaacccaaaatgaacaatggaaagaaaactagtaaatctgaaatgtacttcacattctacttaatctaatttaaaatataaattcattgtgcaacccataagaaagatggtccaacctgtgggtatttttaaaaattctaacaggagaaatcatttaaaattttgctttttcacaatggcaaaaaggaaagaatttgaacataatatttaatttttaaaaaaattcagcctgactccgaccctgaagatttcagaaagaacatcgtcactattaaaatgatgacaggcccaaatgggggattgtttaaccagttttcctaagttaaaccaagaataagccacaagtattcaattgtgttacaacttagatctgagacatttacatcaaagcatacttccctgaacatgttcacatttaaaatgcttaaggtcttattattaaatccaaaataccaaaagtattagaggagctagttatacaatattggcacagcatttttaagcaataataaaagtttcattttgtcaccttaagtcaagatccatttatctattaataggttaagtctgaaattctgtaacatattctagaagcacctacatccattatttccaggagactagtttactactatcatgcaatcgctgaggtcatatgagtctaaaatgaagggaattgctgaacaggcccttttgctgttgagatatgaagcccaaatctttgcctctgaagacggaattcaatgtggtgtgtgtaatcacaagtaaaaacttgagctagggaggaaccttggatattcagtctacatctcaaacagcatagctgccaaaaatgaggcctgtccattaaagtggaggagatatccttgctgatggcaaaaactgctttttctttttgggacggaatcttgctctgtcgctcgggttggagtgcagtggcgccatctcagctcaccaaaacctccacctcctgagttcaagtaattctctgcctcagcctcacgagtagctgacaggcgcccacctccacgcccggctaatttttgtatttttagtagagatggggtttcaccatcttggccaggctggtcttgaactcctgacctcgtgatccacctgcctcggcctcccaaagtgctgggattacaggtgtgagccaccatgcctggccaagaactgcttgctgaagcaggtttttgggacgatatgctcaacaccacagggtgataacatacttagaaaagaatatgtatctctaaaatattcttgccagatctcaaaaaactactcttcttgacatgctacagagtcaacaaattaaccttctcaggcacattatgtttaaatgtttcttagaaggtaaagaaggaaacctggctgggcacggtggctcacgtctgtaatcccagcactttgggaggctgaggctggtggatcacttgaggccaggagtacgagatcagactggccaagatggtgaaaccccatctctactaaaaatacaaaaattagccgggcatggtggcacatgcctatagtcccagctacttgggaggctgaggcacaagaattgcttgaacccaggaggcagaggttgaggttgcaatgagccaaaatcacaccactgtacactccagcctgggtgacagagtgagactctgtctttaaaaaaaaaaaaaaaggccgccgtgacctattcaccctccacttcccgtctcagaatctaaacgtggtcaccttcgagtagagaggcccgcccgcccaccgtgggcagtgccacccgcagatgacacgcgctctccaccacccaacccaaaccatgagaatttgcaacaggggaggaaaaaagaaccaaaacttccaaggccctgctttttttcttaaaagtactttaaaaaggaaatttgtttgtattttttatttacattttatatttttgtacatattgttagggtcagccatttttaatgatctcggatgaccaaaccagccttcggagcgttctctgtcctacttctgactttacttgtggtgtgaccatgttcattataatctcaaaggagaaaaaaaaccttgtaaaaaaagcaaaaatgacaacagaaaaacaatcttattccgagcattccagtaacttttttgtgtatgtacttagctgtactataagtagttggtttgtatgagatggttaaaaaggccaaagataaaaggtttctttttttttccttttttgtctatgaagttgctgtttattttttttggcctgtttgatgtatgtgtgaaacaatgttgtccaacaataaacaggaattttattttgctgagttgttctaacaa

SEQ ID NO: 537 - DNA, 198 bp, Homo sapiens
  misc_feature (85)..(85): second gene starts at position 85
atggagatcttataacaatttttgatagttctgacctttcctttgcaattcagtgcagtaggatactgaaactgacattatttggaaaatctacttcctcatcaagcacccctacagagttctgcaggaatggtggaacctgggaaaatggcagatgtatttgtacagaagagtggaaaggactgagatgtacaattg

SEQ ID NO: 538 - DNA, 286 bp, Homo sapiens
  misc_feature (176)..(176): second gene starts at position 176
caggtcctcaatgatctcctgaatgcgtttcttggctgcctccacacagtccttggcgcccttgagggtgactttgtcgctctgtgtgccagagcgtgggaagctgaccatcaccccgccatactcttcagcaatctcccgcaagacctggcctctgcggatgacgaagtggcgggggggggtggggggttggttagagttgtaatggacccagatggaacttgtaatgtgggccccacatgatagaactaaattcagatatcattaaataaactcttgtacacta

SEQ ID NO: 539 - DNA, 1258 bp, Homo sapiens
  misc_feature (1031)..(1031): second gene starts at position 1031
gaaatacaaatgatgctcaaacacagcttttattttacttcaaagtttacctcagatcagcctgggaaggtgaggggaatgaagcagatgctgttaaagggtcatgggagagaaaaggtatctgtgggaagagaataatctcttttgacttcgtgtgctgcctcacggacacactggagcagggattgggcccccaaggcctcaggtagccccgtgcctgtggctttgctgggtgcagcctacgtggctgctcgaatgggttgcaggctggtgcctaaagctttcccaagggggcgctgcatgctgccactgactccacagttctggggtcctggtggtggtcaggtcctgctcccagcgctccacaaggcactctctcctgtggcctggatccactagacactagacatttccctggtgggggccctctgtggcagctgcacctcacatttccacttagcatcactctagtggaggctctctgtgggctgggcatgctagctcagttctcttttcctcttcttataaagccaccagtcccattcctgtgataacccattaatccattaacccatgaatgaaggcacagccttacgatccaatcacatctcaaaggccccacctttcagtattgccacattagggattaagtctcaacatgagtgttggagggaacattcaaaccacagcagtatgaaaacaatattcaactccaaggtatatggtcaagattacaggtggtaaggaataggctagagaataggaataggctaaatttgctagagatgtgctgtggaattatctgtatttctagctatgatcttagcttcctcaagtccatttcattgcaagaatatgaaaaattaaattgagatccaggttctttttttatttttcaatttttattttttgagatggcgtttcaccctgtcacccaggctggagtgcagtcgcacaatcctggctcactgcaacctccgcctcccgggttgacgccattctcctgcctccgcctcctgagtagctgggaggctgaggcaggagaatcgcttgaacccgggagacagaggttgcaacgagccaagatcgagccactgcgctccggcctgggtgacaggagactccatctcaaaaaataaaattaaaaaaaaactactacaataaattatcaccttggactgtataaaacaacttttaaactagtctttttaaaaagtacacttaaataaaaatctaaacataagagaatgtaaagtga

SEQ ID NO: 540 - DNA, 1258 bp, Homo sapiens; identical to SEQ ID NO: 539
  misc_feature (1031)..(1031): second gene starts at position 1031

SEQ ID NO: 541 - DNA, 4809 bp, Homo sapiens
  misc_feature (194)..(194): second gene starts at position 194
ggagcagcagggaggcgagcagagggcccccagagggagccgcggaggtgcaggtcgaagaggccgggctacgtcgtgccctgcgcgtgagcagctgcagaggcagaggcagcatccagcggcggcgccagcagttccagtccgttgctttactttttgcttcaccgacatagtcattatgccgaagagaaaggttgcataccctgtcctgagggcgcggcacggagtgcatgcgggccgctgccatgacgaccgccatcttggagcgcctgagcaccctgtcggtcagcgggcagcagctgcgccgcctgcccaagatcctggaggatgggcttcccaagatgccttgcactgtcccagaaacggatgtgccccagctcttccgggagccttacatccgcaccggctaccgccccacggggcacgagtggcgctactacttcttcagcctctttcagaaacacaacgaggtggtcaacgtctggacccatttactggcagccctggccgtcctcttgcgattctgggcctttgccgaggctgaggccttgccatgggcgtctacccactccctgcctctgctcctcttcatcctgtcgtcaatcacttacctcacctgcagccttctggcccacctgctgcagtccaagtcagagctctcccactacaccttctactttgtggactatgttggcgtgagcgtttaccaatatggcagtgctttggctcatttcttctacagctctgaccaggcctggtatgaccggttctggcttttcttcttgccagcagctgccttctgtggctggttatcttgtgctggctgttgctatgccaaatatcgttaccggaggccttatccagtcatgaggaagatctgtcaagtggtgccagcaggtctggcttttatcctagacatcagccctgtggcacaccgtgtggcgctctgtcacctggctggctgccaggagcaagcagcctggtaccacaccctccagatcctcttcttcctggttagcgcttatttcttctcctgccccgtgcctgagaagtacttcccgggttcctgtgacatcgtgggccatgggcatcagatcttccatgcatttctgtccatctgtacgctctcccagctggaggccatcctcctggactaccaggggcggcaggagatcttcctgcagcgccatggacccctatctgtccacatggcctgcctctccttcttcttcctggctgcctgcagtgctgccaccgcagcccttctgaggcacaaagtcaaggccagactgaccaagaaagattcctgaggctggcaagtggggcaacgtgtggaggaagcccctcataatttggagaaaacttgatacaatagaagctgacttttaaggcattggcttttaaattaatacatatatccaaggatatgttatagctgcagtgtttgaaagccaaaggatttaagagttttgttgttgttaataaaaggaatactccttttccttttggatcatagcttaacaaggcacaggaagggaagggatcttgactaagattcatgagacattgaattaaggagaatcatcttcatgcctgaaaatttagcaaaattccgactatggcctccaggggcaattcctaaaagctgaatggataataaaattggactggaaagtaagtaggtggctggtcctcaccctgttggaatggctatcctactatgctgttctttggtaatggaataaattgacccaaggaccgaatttcatttggatttcaaattgtccagagtggaaaagccttcaagatgacatgatgaattactcagttcatctgatttctggtccctcctttctcgacaactataatactaacccttttctcaggataactgtctacacctggcagttttctctgacgtgctgttcactcacatccctaccttgcatggtaatataaaggactaggaagcagtcatacttccaggaaatgcttggattcatgtggacattcaggaagcttattctcatataatactaatctaaacagtactagaaattacagtgccaagagccaccaggaggcccagccaataagcatagatactatatggtatcatgggacccatctattttttaccagtggactacaggattacttgagagttatcagggctgcctaacagaccaggagatctgggggttgcaccagggaatcgccatatttgaccagcatgttttaaaagctcttggtaggattagttggttctaaggatccctctagggacctcattatttcaagaggaacccaaagtccagcctcctacatagatgctgccccacgaaggacccacaaaactaacctagttcagggttctcaggcaggcagttctgcttcagcttagagcagaacccataaaatactcaagtactgggataggcaagcatgtgtgtttactgtggattggtccctgaaggctcctttgggtgagaacatgtgaaccaggcaccctggtttgtttggagcattgctgcccagaagcttctatgggataggtggtgcttgggattgatgtgttgtggccatgcagccctccctgaggattgacttctgcactaatccagtgaaggaggctgtgtcaaaagaagggctcagaagccctcttttcagaggcaatgattcctgtcagtatgaggtcccttagttactaaaaagggacatgatttaactccagtttgatgaacctcctccgagtttactttattgtcttcaaatcttttgttttcttcctttttgtgagatttgtgggttttgtgccttataaatggaaatgtatgaacacaatatatgctcatgtagaattttctgttctgggttattgggataagaaaaaatatatattgctcttcaactagtgaatgaaagaaacttcagaaagctagaattgcttatcaatcaaaagactttctcaatctattttggccacaaacaaacatattcaactgaagctttccaataatctttatatcaagaaagcatgcgtcttgtcagctacattgttttcttagatggatttctcctgttaatcctcaaatatctgaacttctgtgttacccaagtgtcttatacaagcttctggtgtctaggacaaatttatggcaaataaaattagcaaaactgaactgggttgaactgaacaagaggatgggggaattgtgcaaatacgttgttagtagaaggtcaatttaaaatagggactagaaattatttgaagttttctttattacggattcaaagacttattttgaaagttggaaggagaagggagggaagagagcagaagggaagaaggtgtaagtcaagctcttgaatataactggtggtattgtgggcagagatctttagttcaaatccacgtattttttaaaagagagaaccggaggtagagcaatgatcagatgggtgcacagaccagtgccaatctgaacattgttaatggcctgtgacatgatgagcacaggaacaggcatgaagatattgccatacaattttaatttatacaagtattggcccctcaagtggttggaaattttttttttaatctctttttctgagacagggtcttactctgtcgcccaggctggagtgcagtgatgcaatcacggctcactgcagcctcgacctccccagctcaagcaatcctcccacctcagcctcctaagtacctggtactacaggcgcgtgccaccacacctggctaatttttgcattttttgtagagacagggttttgccacgttgcttaggctggtcttgaactcctgaactcaagtgatccgcccacctcagcctcccaaagtgttgggattacagacattagccatcacgcctgccctagaaacagttttttaataggagatatttgagaggcattgaggtaggagactctatgacatgccctcagaatatcagaatcttcttagaaataaactaggaaatgcagatgtttttaactactcagacttttgaggaattaatccttttaaaacatttttgttaaagttagtgtatcagtaagaaacagacctagtttaaaaggaataatcaacaattttataaaggagatggcttattcaaccatagcccctccaacatatctactggaaattctgctggttaactttatctctctctctcttaatttagactttcaacctatgaaaatgtaaatacctttgaaaaaactaaactatcagtcatttacatcctctcatgaatgaaatgcagtgtagggagaggagatggcaggacacagcaaacaggacacatttgcctgcttctctcttgcctaattcttcctgacctgtatttactgatgcttaataatacttgtaagactctaggggttcatttcccatttcagcggaaagtacttcactcaacaacaatattctcaagagtcttctactggaagctagaaagaaataggaatttaagtccatagaatgaaggtagttattcctgcctgtgttgcccacctgttcacaaaaagtacctttatgcttgaaaacattaggttctttggttactgcactgtagtttcaaatggatcctccagatggcattcatgtcttactcagaaagggcactgccattgtccccaaggcttctgtctactaattctattggtcttgtgttttgcttgcttggcaaaaaaaaaaaaaaaaaaaaaaaaaaaaaaaatggagctattttctgtctatataaatctacttatatgaataaccattaaagtgattttgtatatgca

SEQ ID NO: 542 - DNA, 5958 bp, Homo sapiens
  misc_feature (77)..(77): second gene starts at position 77
gcatatttgctttgtcttttgacatagctgccacagcatcttcatgagttgcgaactcgacatctgcttcaccagtcctcttccttcacttcttgttgtaattgcagccattttcattggattctttctagggaaattcatcttgtagagtgaagcatgcagagtgctgtttctttttttttttttctcttgaccagaaaaagatttgtttacctaccatttcattggtagtatggcccacggtgaccatttttttgtgtgtacagcgtcatataggctttgcctttaatgatctcttacggttagaaaacacaataaaaacaaactgttcggctactggacaggttgtatattaccagatcatcactagcagatgtcagttgcacattgagtcctttatgaaattcataaataaagaattgttctttctttgtggttttaataagagttcaagaattgttcagagtcttgtaaatgttattttaataatccctttaaattttatctgttgctgttacctcttgaaatatgatttatttagattgctaatcccactcattcaggaaatgccaagaggtattccttggggaaatggtgcctcttacagtgtaaatttttcctcctttacctttgctaatatcatggcagaatttttcttatcccttgtgaggcagttgttgactgagtttttcatccttacaatcctgtcccatggtatttaacataaaaaaaaataaaactgttaacagattcttgctcgatagcttgtttgtgtctgtcgtgttattagagggaactccactatatatggtcacttgaaattatgatgcaaaggtttctcttgcattgaaaccctcttggatattacagtatttttaattgaaagtcctaattctgttaaggaaaggagttgattaaattttaaggtaccactggtattttgggagattataatcagtttgttttcaagataatagaaaataaggtccatgagaatagaagttatgtgatttcagtgagttgatgtgtacagcatggctgtgctccatctgatttaccccattcttaagttctgagagtatgttctcaaggaagatttaactctctttggttttaaattactttttaaccagcctaataaataagtcttactacttttcataatatttcataatagttaaaagtaggtgtttttttcgtgctcaatttggcactcaaaataatgttcattatggaagtttggtaatactgagcaagcctgtggaattttctttatgaaaaatgattttagcctttgcaaatgttaaccatgtgaaacacattttcagtataagtatgcgttacagggtttgatactttcctgcacttaggtttgtcctattcttcatttattcatactaggatagaaaattttggaatcagaaaatagatccagtgtttagctacatacaatctagtacaagtgaatttttattcttaaacataggtgtgttggctctttttttaaaagatgcgctctacctgaaaaggaaattggattttagaactggatgtggtgcagtgaagtattttaggcccaggtctgtgtacacattttatagaagaatgaagtactctgaagtattttggttgccttttcatttcaactgtgttttgaatttgtcagatcacacatatattgtgttattgggcgctgtggtatcttttataaaacctcttgcttgtgtgcaaaagttcctaaaaggaaacacaagtaatgcctatccattactagcatgctatgctgcatgctttactgccattgctgtatgctttactgtctttgtaaaaatccccctctccccttttctggtaactggaaaagcatgctaaaaatagtcttatattttcaccccataaatgcagaatcagtaattccttggcttaaagctcttatataatcaatattattggtggtaaataccaagtttggtatctcatagctatctttttttaaagaaattaagttcttgaaaatttagccaaatcccgttttatgggaatgctctttagaattcattttgttcagcccctttgttctatggttgagaaatctgaggccttacgaaggttaagagaactttccccgtgtctcacaggtaggtagaggcagagctggaactagatatctggtctgttgactctagctcagtgtcttctggtaactgttgaaaattgtcttagtttgagagatggctgaaataatgaacataaaatgctatttataataacaagtatatgtgaaatttcttattgtaagactactaccggcttactgttgaatagtttggttatagtgtttaggctagaaatgcctcccacattggtaataaacattacaaaatacaatgtatttttaggtaggcattttataaaatgcattatgccatggttgcttttgagatagattgtagtctgggtagcatctttaaaatgtatgtgggcttaactgttgttcatatcaggagatgctctgattgtataggtgagactctgtttctgttatttttaattgctgtatgaaatgtgatcagattattttactaccaacagttatagtttgaaagtccaactgtattaattgactgataatatgataatatagagattaaattgtttgtcttcattccttatatgtttagaagtttttgctttgtctgcctgcttacttgtatatgtaagcatgagggaaatacactgttgctaatactgaaattacaatcaagtaactaaggccttgagttcatatgtgacactgaatgcactagcttccttcgttctataactaatgtaccttaacttcccccattcttatatttacaagaagctaagtcattatgttctgagtgtgtggtatgttcccttaaaaaaaaatgacacttggaagaaaaatgtatgaaattcagaaattccgatcaaagaaaagtaattctttctttttttttttgagacagagtcttgctttgttgcccaggctggagggcagtggtgtgatctcacctcactgcagcttccgcctcctgggttcaagtgattctcatggctcagccgcctgagtagctgggattacaggtgtgagccaacaagcccggctaatttttgtatttttagtagagacaaggtttcaccatgttggtcaggctgggctcaaactcctgaatccgcctgcctcggcctcccaaagtgctgggattacaggtgtgagctgccgcacccagccaagaaaaataatactcttaaatacttagatgttcacctaaagttgatattatttggtatgggaattacttttgaactgtaatctttcagattacaccactttgaaaacaagttttaacagtagggtaaaaatatagtttttgagggtattcccaacttgtgatcttctaccactttagagacattcaagtaatagttttcttagagctttgcacattcctattcactgagattttaaaaatttcacctttattcgagggaaggatcaatgcttattaccatttggaaaaacgaagatcagaaggtaaatgatctttattttctagctttaaagggaaattaaaccattcatgaataaactttaaaaatgtgaagtgtccttttccttttcacaatacaaaaaaaatttcaacagattgtgtggtttgtgcatttatatcctgttaagcattaatagctaatcactgggacttgaattctgatggcagatagtctcttgcttagtgagatggagttaactattttttagtaggaagtgagaacagctgattttcatgccacgtttcatagccccacttttggtagactaccaccacgcttcttcgcgtaagcagtggcatcttgggaatgaatgcccagccgctcgtgggttggtgcaaagaagtataaacatatatcactaaggaaaaagaaagtttgtcttgcccttctgacacagtgtgtgcacttcaggcaatttttggaaaatataaaaaattccaaattctgcctttcagcagcatcaattgctaggaacatttcattcatttccctgtaatattaatgttctttaagcataatcactaattataagttgtatcctatttttttccagcttaatttctgtggtttattgaaaaccaagtataaatgtgactaaaagcattttgctttgtttttatagttaactttcttaaggttatggacattttataatgtaacatttgattggcctggcctcttgacaattcccttctagttatgcatatcctcctgttgccacatttcttgttttaaaactcagtttcttgttttccagttgttgctatgtataacacccatcttgaaagagagtatataggaagttattcagataacttttgtagtagtgatattcaactatagcagtaccttaactcatgatgagcttaggaacataaaagataattgttgcttgaatagcacccccagagatactgacctaattggtctggggtggagatctggcatggtagtttttttcaagctccaatcatcggccagacagttgctttatgtaggtttttaaatgccaaaggcagatatgaagtagatttaattaagacttgacttcagcaatacaggggaacttaaaatacttatttttctttaaactgcaggagtcactgttaggtattgcttaaaaaaaattgcataaaagctttgcttgtcaagttaggattgctggaataccactaaagatttttgacttgtgaataaatgagctgtcatcgcaaaaaggcgatttgagaaatgtgggcttcagtattaattgccattttgctgacacccagtgtacctacctacctgagaaatttattttgtccatcatgtatttctcaaagcaaaaggtggttttcaagtataatgtcgttttcaacatgcttattacttagttttacgtcagctcatttcatcatcattgataacttgtgaaatacttatctccatcctatggaataggggagacgggtttagacaggttcaattagctcaagtctacacagctgaagtagcagagaaagtgggatctagatggtctgatcctagtgatctaccatatgaaggacatagtttgtgtcctggtccaagtcaaatattgactcctcacaaacagtaagtatggcaattttgtgatgcctttgattccactttacatggagtactattatttgtgaaatgtctttaagatttttggtcttaaatttttgaagactgctttccccctttatctcccagaaaattgagaagaagtaaactcctgcccactaacaatctcagtccgtgaacaaaaccaacatgaacattcctaaacaagagtgtgtgttactctaagaagaaggctatagaatttatggaaatggcttatgtaacctacaagactggagaacagaatgtgactggccttttctaatggtcctttaagatttaatgattaaagcaagagttttttataattgactttgtggtctaaattcttgatactgtttataattctacaaagaacaaaaattgttatgtactataggcacttaagaaccctgaggaaaaataatacaatgtgtgtgtgtgagagagagagtgagttactgacattgttccaaaaaaaaaaaaaaaaaaaaaaaaaatgtggagggttgaaatggtaaggaattggaatcttttgtattttcgagcaataagaattcctattcttgtttcaaatagaggtttgttaggaattacagttgtggggagcaaactttcttttttgtgctgttttaattcaaaatgtatatccttaattgtatataatatgtagataaatatatgagggtattaagctactttgaattaaatttaaggatatatttcacatgaaaacaaatacaaacgagaatcaaaataaagttttgcaaagta

SEQ ID NO: 543 - DNA, 4773 bp, Homo sapiens
  misc_feature (913)..(913): second gene starts at position 913
gtgtgtcaaggatgccacaatgccatcgacccagaagtgcagcgggtgacctataacaatttcagctggcatgcatccacagagtgctttctgtgctcttgctgcagcaaatgcctcattgggcagaagttcatgccagtagaagggatggttttctgttcagtggaatgtaagaagaggatgtcttaggaggagggcacccagaagtatcgagccatagctatccaaagtggtctgcatttctactgtaaaatgcaatttgaaaaaaataaaacgcaaaaaaagaaactgtaaaggaaaccaagagattttgtttaatttttttggccattttttcttcatcaattttttttcggtctcaacttttaaacttggtttaagcatttgatttgtaaaacagtaaataattgtatctttccatagcttttcaaatgtgaaatcatttttggaagcttggatctcattaaacttcatgtctctattccatttgtgccacacacttaaaagttagtgtactgaatggaaagatgagcattcctagttctacacttcttttttccccctcatgtgtaaaatgaaaagaaaactaaatttgccctaataccaaggcgctacgtttattgcctcgtcttattcactgacctttgtaatgatacacagtgaattctttttgacaaagagaaatgcagtgtagtatgcagagctgctgttttaatgcctatgcatttactctttcctgatttaggcagaggtggcattttctttattgcatttctctatttttttaatgtaccctaccttcagtattctctttgtaagttggtgacttgcatctgtggccttgaatattttattatcacatgtggcataacagtatccacactttttagttctttatttttttttttttatcacaacagaagtaaaatgttgctttgtacctggtgtcttttattaagaatttactccccccatttctcacagagaataacagtcgggagtcattgtcacaatataatagaaatgttagcaaccagattcatgtaaggactaagtggtcctcatgaattgcattaagactctgtactgctcatattacactccatcctctctgtagtttgctgggtagtggagggggtaagctaaatcatagtttctgacaataactgggaaggttttttcttaaaataacaatggaattggtataattgggattgaaaactaaaacttggaactaagatagagaagatggagtgtatgtagaagggctgttaaaaatgtaaaacttggttgcattatttgtggaggctcaaacttgtgaaggttaataccataatttttccatttgttctgcattttgattctgaaaagaaagctggctttgcccatttcttattaaaaaaacttgttgtaaatccagttgtctaatgggatctatatgaagttagccatgtctgtatgcccttctcccacaaaatactgtataactagtgtgcttgtagtagttaactccaccatctttgtaagctaatgaaattgtgagtcacccatttatatcttaatttttaatcatgtcagttcttgaatgggtatctccttagcctgctgatttctttttctttctaaagaaagtgggtggagaaattaatttagacgtttgtttgcaataaaaagaattcattttactcttgttttgggattctcgccatcaaggttcaaaatccctttatataactcccaagaggagaaatttattaagtgtgtgctttctggacagcttattctttactctgcatagaacatttaggttttaaaaacttaaatgtatactgacaattgatacataattatgaagtaaagttgaattcttcccttcccctcccccccagacaacttttaacatatttaatgaggggaaaaggtactggctgggagaagttaacactgagtttatcatctttacagaatgctaatgctgtcctcaactgattattttatatacatatatatgatacatgaaactctgggatcagatgcttttagaagccatcatgcaagccagtcattgatgtcactgctacacaacactgctaacttgactgtagctatgtaataacattagatcccctaattgtaattatattgggtttgcacagaacactttaatcttcccctcaccaatgtgaagtgaggaatcaggagtcaaactgtagaactaaaatttgacttcagtctagcgtttccttggtgtttttaggttgctttggtaagtttaggtttgctatatttctgattgcttagaattttgttttagccctttaaaatcagatcataaatatgaattcatacttctaaggaattttcttgctataagctggagtttaggtgatgtataggttcagttgagacatttttggaacaggcaaatccttagttaacataagatatttaacagttgaagatagtgtcatggatttttatcttttttagcaagtaatgctaagaaccactggcctgagctactactcttcagtatacattattaggattgcatagacttactagaggaacagtttcaggttttgatgctaatcagtgttgtgtcctaaagttgtcctttgtgcctttaaaaagttttggatatatcttctagtttaaaattgcttattaaggaattcattttataattgcagtgggaaagtaatggtcaagtaacactaggtagactatcatgcctgtttagcccagagaatttggggggagagagaatagataaaaatggcacccagaaaaatgttaaaatctttagtcaagactagaattaatacaattgtctacacttgtatggcagaaataaccttataaagtgtttaaggaattcagagaagggaatgtaccaaataagcaacagggagaaaattaggtaagaagtaagatacgaacgagaaacctgatttattgctcatccttcccttgcctccctaatggcaagcaaaactctgaacatctgaaaaggatgtagttctggacaaatcctgactacccagaggaaactcactgtgagattgctgttgatttgaagggtgctttcactaaggttatattttaaagtagaataacacatgctgagtgtaaactggctttggattggtcagctgcagtagtacaaaaacagcatagaatttgagaaaactaaaactgctatgagatagctatgagaaaactaaaactgctatgagatagaaatgatgtaaaattatgtggaaagttttccctcatatactcacatacagcctttgaagggctctggctctgaccggttgatggccttgagcgagatgaaatcatgaaattgagtcaaatcaatttgacattgaaatgacaagaggaaactcttaaatacataaaaacaagctctcatttgcctaggatagatactgtcttaaaaataaagactgaacctagatgttctgagcactagcaacaaggtattttaacaagtttaaaggaattctctgaaaaagttataaaattattctaggaaacataaccataatagtgttttaagggactttcacctggggattttatattcatgaacagagtgtattctgtatttaaaatgtctcatttgtgggaattggatgacatgttttttgataaatttattcacaatataaattgactttttattctaggaccatgtgaataatgggttccattgcacaaatacaaatattttaatagcttcttaggcagtggtgtagacatcttggatataaataattgtagatcttgtatatttgatttttaaaaaactagaataaacagagaggcataaacatatcttagagtccaagtggtagtgtttagcattggatataataaatggatgttttacaaagtgtttccataattctcttcctatacataaatgtcttgttttcaaaagtggatggaacttggctgggtgtggtggctcacgcctgtaatcctagcactttgggaggccaaggcgggaggatcacttgagctcaggagtttgagaccatcctgggcaacatagtgagacctggtctcttgaaaaaaaaaaagtggatggaacttgtagcagagaattttatctacttctcaacctgcttcagaatacccatttgagatgttcccctggaaagatgaacacaatactgcatctgaagccatttcttcccacctaacattcttaaaatgattagagtctaaactttgtcattcattcctaattctggagctctgaggttgaggtgttcagagtttggtgaataattgggtttaagttttaacattttagtaataataaaagcaaacacatacatgttaaggcctgacaataggttgcaatacccatgcattgggactcatacccagcataaatggtgagggactgaacattagtgctttgagcaagaattggttaactacctgagatctctaaaacagtaatttgaattactaatacataaaccacaagtctcttcgaattgttaattgcctaaatttaccctaaaacttagttaacgctgcagtgcctttattaaagcttttttttgggggggggtgtgggcacagctactccataactttaaattttaaagcatgaaggtgatctagctagtgttagtgcttgagttggtagttacataggctgctcttgaatcgtcctgttttctttgcctagtattagcaccacaggtacatatttgtaaaataagcattaaaagtactttgtccagc

SEQ ID NO: 544 - DNA, 355 bp, Homo sapiens
  misc_feature (279)..(279): second gene starts at position 279
ctagacctagcttgatcatgcgatagatgcggttggagtgggtctggggatcctcaagggaaaagccagaagatagcagggcggtttcaaacagcagcaccaccaggtccttaactgccttatcattcttgtcggcctcagccttctgccgcagcgtctccacaatggggtggtcagggttgatctccaggtgctttttggccatcatatagcccatggtggagttgtcccgaagtgcctgggctttcatgatccgctccatattggctgtccagccggagggggtgggcaccgtggctagggtgagccgcttgcaggctggctggacacggtacttgagggggagaggcccgtt

SEQ ID NO: 545 - DNA, 4779 bp, Homo sapiens
  misc_feature (2635)..(2635): second gene starts at position 2635
gacaacttccccagataccccgtgggcaagttcttccaatatgacacctggaagcagtccacccagcgcctgcgcaggggcctgcctgccctcctgcgtgcccgccggggtcacgtgctcgccaaggagctcgaggcgttcagggaggccaaacgtcaccgtcccctgattgctctacccacccaagaccccgcccacgggggcgcccccccagagatggccagcaatcggaagtgagcaaaactgccgcaagtctgcagcccggcgccaccatcctgcagcctcctcctgaccacggacgtttccatcaggttccatcccgaaaatctctcggttccacgtccccctggggcttctcctgacccagtccccgtgccccgcctccccgaaacaggctactctcctcggccccctccatcgggctgaggaagcacagcagcatcttcaaacatgtacaaaatcgattggctttaaacacccttcacataccctccccccaaattatccccaattatccccacacataaaaaatcaaaacattaaactaacccccttcccccccccccacaacaaccctcttaaaactaattggctttttagaaacaccccacaaaagctcagaaattggctttaaaaaaaacaaccaccaaaaaaaatcaattggctaaaaaaaaaaagtattaaaaacgaattggctgagaaacaattggcaaaataaaggaatttggcactccccacccccctctttctcttctcccttggactttgagtcaaattggcctggacttgagtccctgaaccagcaaagagaaaagaaggaccccagaaatcacaggtgggcacgtcgctgctaccgccatctcccttctcacgggaattttcagggtaaactggccatccgaaaatagcaacaacccagactggctcctcactcccttttccatcactaaaaatcacagagcagtcagagggacccagtaagaccaaaggaggggaggacagagcatgaaaaccaaaatccatgcaaatgaaatgtaattggcacgaccctcacccccaaatcttacatctcaattcccatcctaaaaagcactcatactttatgcatccccgcagctacacacacacaacacacagcacacgcatgaacacagcacacacacgagcacagcacacacacaaacgcacagcacacacagcacacagatgagcacacagcacacacacaaacgcacagcacacacacgcacacacatgcacacacagcacacaaacgcacggcacacacacgcacacacatgcacacacagcacacacacaaacgcacagcacacacaaacgcacagcacacacgcacacacagcacacacacgagcacacagcacacaaacgcacagcacacgcacacacatgcacacacagcacacacactagcacacagcacacacacaaagacacagcacacacatgcacacacagcacacacacgcgaacacagcacacacgaacacagcacacacagcacacacacaaacacagcacacacatgcacacagcacacgcacacacagcacacacatgaacacagcacacagcacacacatgcacacacagcacacacgcatgcacagcacacatgaacacagcacacacacaaacacacagcacacacatgcacacacagcacacacactcatgcgcagcacatacatgaacacagctcacagcacacaaacacgcagcacacacgttgcacacgcaagcacccacctgcacacacacatgcgcacacacacgcacacccccacaaaattggatgaaaacaataagcatatctaagcaactacgatatctgtatggatcaggccaaagtcccgctaagattctccaatgttttcatggtctgagccccgctcctgttcccatctccactgcccctcggccctgtctgtgccctgcctctcagaggagggggctcagatggtgcggcctgagtgtgcggccggcggcatttgggatacacccgtagggtgggcggggtgtgtcccaggcctaattccatctttccaccatgacagagatgcccttgtgaggctggcctccttggcgcctgtccccacggcccccgcagcgtgagccacgatgctccccataccccacccattcccgatacaccttacttactgtgtgttggcccagccagagtgaggaaggagtttggccacattggagatggcggtagctgagcagacatgcccccacgagtagcctgactccctggtgtgctcctggaaggaagatcttggggacccccccaccggagcacacctagggatcatctttgcccgtctcctggggaccccccaagaaatgtggagtcctcgggggccgtgcactgatgcggggagtgtgggaagtctggcggttggaggggtgggtggggggcagtgggggctgggcggggggagttctggggtaggaagtggtcccgggagattttggatggaaaagtcaggaggattgacagcagacttgcagaattacatagagaaattaggaacccccaaatttcatgtcaattgatctattccccctctttgtttcttggggcatttttcctttttttttttttttacagacttcacagagaatgcagttgtcttgacttcaggtctgtctgttctgttggcaagtaaatgcagtactgttctgatcccgctgctattagaatgcattgtgaaacgactggagtatgattaaaagttgtgttccccaatgcttggagtagtgattgttgaaggaaaaaatccagctgagtgataaaggctgagtgttgaggaaatttctgcagttttaagcagtcgtatttgtgattgaagctgagtacattttgctggtgtatttttaggtaaaatgctttttgttcatttctggtggtgggaggggactgaagcctttagtcttttccagatgcaaccttaaaatcagtgacaagaaacattccaaacaagcaacagtcttcaagaaattaaactggcaagtggaaatgtttaaacagttcagtgatctttagtgcattgtttatgtgtgggtttctctctcccctcccttggtcttaattcttacatgcaggaacactcagcagacacacgtatgcgaagggccagagaagccagacccagtaagaaaaaatagcctatttactttaaataaaccaaacattccattttaaatgtggggattgggaaccactagttctttcagatggtattcttcagactatagaaggagcttccagttgaattcaccagtggacaaaatgaggaaaacaggtgaacaagctttttctgtatttacatacaaagtcagatcagttatgggacaatagtattgaatagatttcagctttatgctggagtaactggcatgtgagcaaactgtgttggcgtgggggtggaggggtgaggtgggcgctaagcctttttttaagatttttcaggtacccctcactaaaggcaccgaaggcttaaagtaggacaaccatggagccttcctgtggcaggagagacaacaaagcgctattatcctaaggtcaagagaagtgtcagcctcacctgatttttattagtaatgaggacttgcctcaactccctctttctggagtgaagcatccgaaggaatgcttgaagtacccctgggcttctcttaacatttaagcaagctgtttttatagcagctcttaataataaagcccaaatctcaagcggtgcttgaaggggagggaaagggggaaagcgggcaaccacttttccctagcttttccagaagcctgttaaaagcaaggtctccccacaagcaacttctctgccacatcgccaccccgtgccttttgatctagcacagacccttcacccctcacctcgatgcagccagtagcttggatccttgtgggcatgatccataatcggtttcaaggtaacgatggtgtcgaggtctttggtgggttgaactatgttagaaaaggccattaatttgcctgcaaattgttaacagaagggtattaaaaccacagctaagtagctctattataatacttatccagtgactaaaaccaacttaaaccagtaagtggagaaataacatgttcaagaactgtaatgctgggtgggaacatgtaacttgtagactggagaagataggcatttgagtggctgagagggcttttgggtgggaatgcaaaaattctctgctaagactttttcaggtgaacataacagacttggccaagctagcatcttagcggaagctgatctccaatgctcttcagtagggtcatgaaggtttttcttttcctgagaaaacaacacgtattgttttctcaggttttgctttttggcctttttctagcttaaaaaaaaaaaaagcaaaagatgctggtggttggcactcctggtttccaggacggggttcaaatccctgcggcgtctttgctttgactactaatctgtcttcaggactctttctgtatttctccttttctctgcaggtgctagttcttggagttttggggaggtgggaggtaacagcacaatatctttgaactatatacatccttgatgtataatttgtcaggagcttgacttgattgtatattcatatttacacgagaacctaatataactgccttgtctttttcaggtaatagcctgcagctggtgttttgagaagccctactgctgaaaacttaacaattttgtgtaataaaaatggagaagctct

SEQ ID NO: 546 - DNA, 4779 bp, Homo sapiens; identical to SEQ ID NO: 545
  misc_feature (2635)..(2635): second gene starts at position 2635

SEQ ID NO: 547 - DNA, 2453 bp, Homo sapiens
  misc_feature (2102)..(2102): second gene starts at position 2102
ttgatcagatgttttgggaggttatgcagttgagaaaagagatgtcattggcaaagctgggttatttcaaagaggaactctgatgctctgcgtgggaccatgcctgaactccccgaataactgaaaaatggctgaatatttttatggttacttgatatttatttccaaggagtgagcctaagacttttttccccttttgcaaattgctctaagaagtaccatgatttcttttaaactgatctatgctgtgtttgcttattctttagttgaacacactatgaagaattccaggtgtactagtgaatgtaatttatagttgccaaaaaaaaaaaaaacctgaaataaataaatgttagattgaatgtgtgtacattttctcttctagctctgacatggcatttagggttagcagaatgtattaaatagtaattttcaaactacacagtagcttccttccttgtgagaggcaagaaagaagtctgagtggatagtactcactttccaaggcccccacctctagaatggctttatttttatctgttttctatattgggtttcaaaaaagattttatttgaagaaatacttctgctgctacaaagtttgaaagttactattttaattattctgctctctgtaactgaaagaatccctttattttggttattcattaaaatataatagaaggcagtcagattttatcccagagatgtattcctgagtgtcttgatatagtgtattcatgttttatatgtgttgaccactatattgtcattggagggacatagatgtaaatgagtttgacgtgtgtcaaaggggtttaaaggggtgtggattgaatgaatggtacgtgcgaagtatatgctgattatagaaccacttgatctctgcattccaaattgtaaaactgactcaactggagaaattataacaaagaggtttgtggtagacatgtaataagtatagaaaagcaaaaagaaaagagaaactgctttagtttctgtttagagaaagctgctgttaatatttttggatagtagcctttcagctttcagatattttctacttacatatgcatatttttgaaacaaaaagtaggctttttttttgctttttaaacctaaacattaaatatattttcccttgggtaaacctacacatcctaatccctgtttatagaattttaacataatttaattgtgtttggagatgaggtggttttcagtttatttttcatattataatgctgtgacgagtatccttatctgtacacttctgaacattgtggagttctttcatgtggatgcctggagataaaattgtgtcgagatatatatgtatttttaaatgtttgatctgcattgctagattgccatccagaaaagttaatcaatttgtattcacagcagcagtgtacaagagggctggttttctgaagataacatttttttcagtcctgttcagaggtttggtcaatcttacctgtagatgacttcagccaccaggctggatgggagcccacagacaaaaggacattggtgtatgttatggtgaaaaccatcagtaccatgcctagctcaagaatgtgaaattgaacctgaaaaaaactttgaacctacaattttatgttctgaaaatagttattctaatgtgagggcattaataagaatatgtaccatcaaagcttcagaagattttccgtacaaactaaaatcacttttggagaaagtacctaaataaaaagagaaacaaatccaggagatactgtacggtttgaaagaaaggtaatcaaatactcagaaaaagtttgttgatgacttaaaaaggataaataaaaagtaagactaaagaaaatcagtatacccattaataataaatctttagtaatctataaggggaagaatgcttttcaaccttatacactagaagcatgctctttaaaattaatgcaacaggatgacgacttgatgtagaaactatatgtggaattatagattaaaatgtgattgaaacatatttagaaaatgtgattatcttcctgatcctactccctttaggaagaacttcttaaactggaagcaggaaaaaaaaaaaccataaaagggggggggtgtctttttagctttttgcatctctgttgttgccattttcgaagttgagcccttgctagagattccgaggtcctcagtttcctcaaatagatagatatatatttttcccttaaatgagatgaaatgagtggcgtcctggggtggagggaggcgctggctggagtcggggctgggggtgggagggggtgagggaaaggttggggggggacgcatcactcaacgttgctgctgtcgaaggtgtggcactgaaagtccccgtcaacgtactccatgcctggcagcttcatcccgtacttgtccacgcaccagcagatgccacgtttgcggccacgggaaggtttgca

SEQ ID NO: 548 - DNA, 4758 bp, Homo sapiens
  misc_feature (4605)..(4605): second gene starts at position 4605
aactttgtattttgccacacattgttttcatttacagctatgtctgacaaatgagcacgtttgacatcactgataaatgcaacaccgtctagggcctacgagaaaaccagggggctcggctccgctggagcctctgcccgtggatttgtttagggaaggggagtcgaatatctatttttcttcttagtaaaattatctgccagagaaacaatgaagcatgaaaaagtactatttagaatgtgcatgcctatatatgattttaaaatgctaattgttgcattccgggaaactttccattatatatatgcatatatatgtatctttgtaatttcagtgaatttttaaaactagtatggcaggttgaaagcaatgcacctgtttacttgcacacaccataaatcgaaaagcaggagtgcgctttcctaccggtctctatgaaacccccagacaagaggcatagttaactactacatttaatagccttcttctctaacacagtaatttttatttaaaaaggagactaaacagaagtcaggggtaggtggttctccatgactgcaaataataataataatgatgattttttttaatgtacagctctcacacaaatttcattttgtgaacacactggtaagtacacgatgctggggcttccaaaatgtggcgtatcccactgatggctccaacttgcgagtgggctcagttctgtaattggaatgaaaggaattttaacactatttagacaaagatcaaacgcagcgtaaaggggaaagctagatttcctcatatgatttttttttttttaaatttagagacttattgtaatgaatggcacttactcaggatttaggagttctttgtaagaaaaaaaaaacatgtatttgtttgctactcccactatacttcaaagttttcagtaattgttatttctaaaaatgccttttactaggagttaaccttctcttacagccagccactcaaacctcatttttgccagcacctttgcatttgattttctaaagtttgggggcccaaacctgcttattatattcaactaccttgtagattcctatcaaaatgcttaattctacacaactatattttccttccaatccaggcctcatttgtcatgagataactgcaataactacatccagaatatcactcttattttgagaatgtttgcctaaaatctttcatcagatgcttttttgttaaaagcattctctccatttctgcttcttcagagtttgtgtatctcttagttgtgatgaggaaaaaaaaaaaaaaaggaaagaaatatctgaagtcaagaacacttgacttcaagctcatgaggggaggtttactattaagacttttgttaagcaaaattaagtgtggattcaggagcctgtctaaactagcacataaaggaaggtcaaaatgtcgaggttacacactgtcttcgtgttttgtaaaaaataggcaggaaggccagatgataaactggccagaacttagcagcaccaaacacaacctgttttcttaaaaataagtctttcagtcagagttgcaatattatctttttttcttttaagaacggcagaaaacaaaacaaaagtcatcgtgtttggctgtattttcaaaacagtgctggctttgtctaacattctattggtgtgctaggggaagatgactaagagtgcaaactgcatgaatttgtaacattagtttcatgaatttgtgtcatttaaaaataggtcagcgcttaggagtcctactagtgaaggtagttttgagtctttccaagggatctttaagtcagcccccatacacagcctattttggggtaaataccagtaaatcaaagcacagcctatattccacacaggtattattttttgcttttatttctggggatagcatgatctgaaatcattactagctcatccaggtagagaagttctccactgaatattcacggtgaaatatgatttgataacatagtttaaaccagatatgtacttggaaatatggaagtaaggagtggattttctttttcctatttaagacaaatgatcttcagtgttaaagagaaaagcaaaacaaaacaaacaactatgatttgtcatgtttatgttaaatcttgtcaggccttgctaacaagaaaatctcggtgtgtaagagaagaaggaaaaatagtcaactttagtgaaaaggcaagcgctgtttctctttaccgttcaatgcatatgtgcgcaagccacctctgatgcgccatatttgtccggctcctctgtctatggatggctttgctcctgatcagaagtgtagggccatgctcaggaagcctagttccactgttttgttttgtttttcctaccaagggcaattatggctcaactcatttgaaaactgaaaactttggggagaaaaaaatgaggtcataatttacatctatattaaatattgctaatcagtatatggggccagcctcctcacttcaaaaaacagcctataatttcaccctgaattactgtctccctattcctccaggaatccttccactggagaaaaggatgcattttacacttttaacgaggttgttgggcccagttaaactgtacactaagaaactgagtacagaatcaaaaaaaaatgccgtttattattgtagattattcttttcttgatataaccagaattgaaaatgaaagaaaagcacataggaacaacacgcgtggttagttagtaactcaagatataaaacaattttgcacagcaaaatatgtaaaagaaaagtaactgacaagatttttttatatttattgtggtaagatttacttttcatttctttttaaagacaggatgtcagtccctgaaaataacatttactgattattgcctttaaaactgtggatttttttttaagttacagaaaatccagttctgcaccacaatacaactgtaaaaaaatctgcatcatcttaaaactgtgcagtaatgccatttttataactgcataaattttattagcgttctaaacagttttgcaatttttttttgtattatatgcttgcaggttatatcttagtgcaattcagtcccaaatactttaattttgaaaagaaaaaaaaacatacatttttgaatgtaaaatacccctacagatataaacaggggcgtttcccctcttaatactttggttttcaatacagtcagtggtatagcaaagactacacatacccaacttatatttaagttgcaagcacatgctgtataagctactttttttaaacagtccccttgcaaactctaccccccttaacatcacaatagtaaacaatttagtgcatcaatcgtttaaaaaatctacagctaaacagacctaactctttcaaatttatctataacattcctttatctgtagcatacattttaactgggctaacagattataaaaactagaattaaattatatactagaaacccagagcattccacatttgacaatgaccaaaagccaaaaaatataaaataaaaataaaacaaaccaaaaataatggggcagtttctctttttaaaaaataaattttagactgcttctcggcaatagcacaattttagtccccaaagtggggcgtcattcttattaaaaagaaaacattaagagttcttcaatgtttgccaggttaaatgtgtaacccattctggtatctttgacaaggaatgccttcagtgcattgggaggttgaagttctgagtaactcaaagcagttttggagcagatgcaaaatttcatgggaagaaggctctacggttgcactgttttgttctaaactcaaaaaagtcatgaggcaataaaacaaaagtatgaatgccatgctataagtcttcgaacgtccatttccaagccaaaaggaaaaaaaaaggaaaaaataattataccatacatgtccagcatgcaggctttttttttttattaatataatgtctcttttccataaagtctttgaaacagttatagttcattgttgctaagacaaagtagcaagcataataatgcatgagatgagaatgagtttttttaatggcagactaaactctcagatttggcatcacaaggccaaaactcacaagtcacacccagaaggttgatgcaggcttgattgtggaaggttcatgaggatttttttctctattttagcataacaatgctaaaaaaaaaacccgatggaactcggcacgctgcaagtctataacatttcacatttttttttcctttgcaagctcaatctcacatgaagaactcaggagaagaaaaaaaaactttgcttttttttttctttcatctcggaagagatgggttgagaaggagtgagggtggaggttggaaaaaaggtgggcaacacagcaagctctaaaagtaaaattaaaaaaaaaaatccaaacaaaataaaacacacacacacacagaaaatgaacaccagttcatgaactgaaggggaagaagaagaaaaaatatgtgaatgatgcaggcttcaaaggtgatcaacgtttcacatgaagaactctgctgagatcattgaacattgtgcaagtccgggggtggggcggggggggggcaggggcgggcaggaggccggctcgcaggggccgcaggtgtccgaagaggaggaagaggagaggggcaggagcaggagcagcagcccagcggcgccgaggagcagggcgcgcagcgacggccgctccatggcggggtgcggtggcagcggc

SEQ ID NO: 549 - DNA, 342 bp, Homo sapiens
  misc_feature (306)..(306): second gene starts at position 306
ggtcctgggcccagtctgtgttgacgcagccgccctcagtgtctgcggccccaggacagaaggtcaccatctcctgctctggaagcagctccaacattgggaataattatgtatcctggtaccagcagctcccaggaacagcccccaaactcctcatttatgacaataataagcgaccctcagggattcctgaccgattctctggctccaagtctggcacgtcagccaccctgggcatcaccggactccagactggggacgaggccgattattactgcggaacatgggatagcagcctgagtgcttatgtcttcggaactgggaccaaggtcaccgtcctag

SEQ ID NO: 550 - DNA, 342 bp, Homo sapiens; identical to SEQ ID NO: 549
  misc_feature (306)..(306): second gene starts at position 306

SEQ ID NO: 551 - DNA, 366 bp, Homo sapiens
  misc_feature (298)..(298): second gene starts at position 298
ctggttgtcaatgaggatatttattggggtttcatgagtgcagggagaagggctggatgacttgggatggggagagagacccctcccctgggatcctgcagctccaggctcccgtgggtggggttagagttgggaacctatgaacattctgtaggggccactgtcttctccacggtgctcccttcatgcgtgacctggcagctgtagcttctgtgggacttccactgctcgggcgtcaggctcaggtagctgctggccgcgtacttgttgttgctctgtttggagggtttggtggtcctcatcgtcgtggtgattgtgggagccctgctcatgggtctccacatgagccagaaacacacggagatg

SEQ ID NO: 552 - DNA, 221 bp, Homo sapiens
  misc_feature (187)..(187): second gene starts at position 187
cagctgcgggaagatgggcagctccgcggcgtagggcaggaaggcgccgtagccttgggcggcggcggccgcagcggccgcggcgtagggcgccccgtacacggacgagagcacgttggacagggaccccgaggcgttcagctccgaggctccggcacccaggccgccccgggcccccgcgctgccctgtgcccccaggtcctgcagcgcccttcccgctg

SEQ ID NO: 553 - DNA, 1509 bp, Homo sapiens
  misc_feature (1293)..(1293): second gene starts at position 1293
tgcatacaaactgggagctgtttattggtcgccgtgagaagcctatatacaaagaaggcacaaggagggggagggaattcccctgctacagtaccatggaaggggctggggctggggagtgggcctgccaacaggcaggggtcaggagaggttttctggaactagcctcagcttctcaaatgggccttaggacacagcccatgggggagggggcagagccaggctggctctgaaagccaaggatagctaagaactccacctctaggcccctgacgcatggtcagcgtggggtctggctggatggggtggggcagggccccctgcctattctacattcaagtgtcgctccctccgtggtcttgcagggtctctctggggccttctgaggctggctggtagtggtgagtgagaagtggcatctcctctgtatcctcccaacatctgtctgtccagaattggtcccctcctctctgtggaggatcccgccgtgccccagcacagtgagcccaggctacgttgccgtttgcctgtctttgttccttcctgctgcattccctgcgagttcagtctgtggccaaggagagaggcttcacagagatgcaggaaagcaagccgttctgggtccttctttctagttcctttgctgttgggtctgagcacgccaggtcctccaagtgcccccgtagacaaccttaggcaggatccccacctctctggcatgggtgtcattgggggcccaccagccagcggcccgggggctgctccctgtcagtagttttgacagcaaagtcaatccagtgactgtggctcaagatggatccagtgtgaaagggggaggtgtcaccacattgcaggggccttttcctcccggctctggtgggaggctctttggcttgttttggcgctggcagaggctgagacacggcgagcccatgcaccatccgtgatgcaccagcacagtccacgagcagtgggccccacgtgcatctagggcacaggaatgcagtgcactcggcgttgtaaggtccacagcgctggccctcctgtgggaagatccccagggccagacagcatgtgcatgctcttgacgaggtgtatgtgcctgagcctgctgctaccagccaaaggtggtggcccctgtggactgtcagaggcataacttatgataaataggaagaaaggggacactgggggaggagggggtgggatcagggaggacgtcagtagtattggtcccgagtctgccagctggtcacccagtgcttcttggtgggcagggtgctccctggaggaggagctcccacgcggaggaggagccagggcagctgggagcggggacaccatcctcctggataagaggcagaggccgggaggaaccccgtcagccgggcgggcaggaagctctgggagtagcctcatggaagagaagcagatcctgtgcgtggggctagtggtgctggacgtcatcagcctggtggacaagtaccctaaggaggactcggagataag

SEQ ID NO: 554 - DNA, 781 bp, Homo sapiens
  misc_feature (130)..(130): second gene starts at position 130
ccagtgccgacttgggcacctttcccttggccgagttccgcagtttctgggcctgaattgccttcgtcttccggggccgtttcaccggagcccctctcggcttggcctgacctggagggtcccggggggctctggaaaatctcttgcagcgtatcccgggtgaaggcattgctgtcctggaagacgttattgagggcgtggagggcacaaagctccctgcgctgtttctcatggtagatttgtgggggtgctgcctggggcagctccaatgattcagatttggccttgtctcctttccatggcacacaactcatgttttttgttttaggttccagagatggctataaacaccccactcttccctctagaggaagaatgtaagcttctcagtcttttccggattcctgaggtccaccttattctctggtgtccatgatttatgctttgtcactgggagaaaagattggaatcaaaaggaaaaaaataaaacccacctcttctctcttctcaatagaaaaataacttttggattacttttattttgctaccactgtcaaagtgcagaatttaaaaaaacacataaaatgtaagaccttgtttccgtttccccacccttccctcccacccccctccaaaatccccacgattttcttgctgtttccctctgcaaatgccaggcctcaaagcaggaggaccgaacacaatcggtcacatcgctccttttcttccatttcttttgaaccacgacgccaatgactcgggagacaaggcctgggtgacg

SEQ ID NO: 555 - DNA, 426 bp, Homo sapiens
  misc_feature (180)..(180): second gene starts at position 180
ctggattcagggtatttggtgagggtggccaggctgctggtgtacatgtggccgcccacatcaatgtggacaggcgcattggattttgtgagttgtgctggagtagggatgccttggttgttcagtggagatgcaggggatctagtgatcagaggtcttgacatattgggccgactgtcctcatgtcttccttcttcccgtggatgtccagatgaagcactccacactcctttgagagagataaacaaggaagatgtgtgcttagtccagaggtttcatcaagaaatgaaagcagagacaataaagttttggtcttggttctcctgttggcttcagaatgaacataattaagatgattaacgatcaactcaggcctgaaaaatgagtaactgtaggtcatgttgccatgaagttacgaagaaaaag

SEQ ID NO: 556 - DNA, 426 bp, Homo sapiens; identical to SEQ ID NO: 555
  misc_feature (180)..(180): second gene starts at position 180

SEQ ID NO: 557 - DNA, 176 bp, Homo sapiens
  misc_feature (86)..(86): second gene starts at position 86
agtagcaaaacatcttcttcagaataaattccagtgataacatatccttttaggtagtttcctgcttcactaaaatcttcttttgctgtaacacacagcaaaatgggcatatgcagctacaatccagttgtgatggccagctactattagcacctttcgtggatccacaggaaatc

SEQ ID NO: 558 - DNA, 1981 bp, Homo sapiens
  misc_feature (1667)..(1667): second gene starts at position 1667
tgcaagaaatgtagttctatttattctctgttctaatgggtataaacattttgttatctaacttgaacatcataccaactcaaaggcaggtcttactagcaatgactggggctcagagaggtttggcgacttcacgaaggtcacacagctgtcagggggaaaagtcagaacttggatccaggtcttcagactctcaggtctggtgtcatcctagggggcttggtgatggccatatctttaatgtatttgtggagagtgaaaggctgtcagtgagtaagcttaagagaacaggagacttgtgtgggaaacagtcggtatccattgattagactgaatcatgtagaattgctaatttcaccattttgaactatcgaaatcactatttggtatgactcaacctcatcctttaagtacacattcatgacagtgagtggttagacagtgattcctagattagtttgggatggggcagtgccttccataggacaaggccattcctggtagagacggagggagcaggctgtccttcagctaggggcccaggggacttcctggctgctgtgtcctttagcagggccttggaggatggaaggactctcctggcccttaccacaggggctattcaggaacagcctcctgccgtggcactggagctgcggtggccctctgaagactgcagggacagcaacaggcacaaagaagtcaggctgcatgtggccccagtcgggactcagaggaggaaagggaggggttgcgggggtcaatgggtgatgtgcttcctctcccatagctgaggagtccttgcaatggccttcctgagccatcagcaggcctatggccatgtgactagggaggagaagggatatagggtaatggtcttctggggcctgctgggcctggtcaagtctgaggaggagatagagaaaacaaagcagagaccctcctcttcatctggggagaagggacctgattctaaacggagatatgtgaggctttctggggcagcgatggaaggacaaggacagaataggtgtccttgttgccccatggagaatgggcttcaggaagaatctgcctcagtcattttccagaagtgcctgagaggtgcagggcccgagtctggttaggtgacagcgggtcaagaggaggacattgtcctctctcttgtgttgctgcagatgccacaaaactgggccacggcacgatcaggcagttctggggcccccaggagggcagccttggggtgggcacagccagccctggcaggatgagcaactctgggtgggggggagtgggggatgagcagggggacatgaagatgcttggtggagcctggggtcatggctggtatctggttcctcccctgtgattccttcttggggactccaagacaggacaaggaagactggagccctccagaaacagatgggcccaggtccgtaagctgaggattcagtcccccctggattcaagcccagcatgtgcctacccagccagatgctccatgaacacagttcagggggcccgaagacagcactgttacctggagcccacatacagcctcagcaggcaaagggagactcagagaaaacatgggagggatttacagtcacatgcaggcagggaccagctcaacccttctttaatgtcatccagggagggggcccggggctggggaggaggggacggtgcgaaaccccaccccaaactattttccactccggtgcaaagtctccctcgcccgagaaaactgcattccagcgcggggcctcttggatctcccctgcccctggccctccgtccctaggtctgtccgtccgtccgtccgtccgtcctcaggcgcgctctccggggactgggggctgggctctgccagggcagggcgatgcgggggtgtgggggggaggcctcaacaggtgacggcctctcctacccacaactgggcctgcctggttccactgctgcaaaccaccgaggctct

SEQ ID NO: 559 - DNA, 243 bp, Homo sapiens
  misc_feature (198)..(198): second gene starts at position 198
ttaaagtcctcgccatcttccagcaggcggcggtaggtggcgatctcagcctccagcttgaccttgatgttcagcagggcctcatactcctgggcctggcgctgtccctctgcccgggtctgtgccagctctgactcaaggtgcagcaggatcccgttgagctgctccatctgtagggcgtagcgggcctccacctccggccagccgctcgcgctcctctgcccgctgctgctcagccagcct

SEQ ID NO: 560 - DNA, 242 bp, Homo sapiens
  misc_feature (109)..(109): second gene starts at position 109
attcatggccacaccccgtactcgtggccagcagttcctctttgccttatatttgtggtacgcccggccagccttcaagatgggtttgtcaattcggccacctccagcaaaaaccttgagcccctctttgagacctacctcagtgtcctgaggaagcagctagataccttgggcaatgacaaagggcgcctgcagtctgagctgaagaccatgcaggacagcgtggaggacttcaagactaa

SEQ ID NO: 561 - DNA, 485 bp, Homo sapiens
  misc_feature (107)..(107): second gene starts at position 107
ttctgcagaatcagaagatttggcagtacatttatatccaggagctgttactattcaaggtgttctcaggagaaaaactttgttaaaagaaggcaaaaagcctacacctgtgactgtgatttccggggaacagagggcccgggctgcgacaaggcatcaggccgctgcctctgccgccctggcttgaccgggccccgctgtgaccagtgccagcgaggctactgtaatcgctacccggtgtgcgtggcctgccacccttgcttccagacctatgatgcggacctccgggagcaggccctgcgctttggtagactccgcaatgccaccgccagcctgtggtcagggcctgggctggaggaccgtggcctggcctcccggatcctagatgcaaagagtaagattgagcagatccgagcagttctcagcagccccgcagtcacagagcaggaggtggctcaggtggccagtgccatcctctccctcag

SEQ ID NO: 562 - DNA, 241 bp, Homo sapiens
  misc_feature (124)..(124): second gene starts at position 124
atcatcatcatcatcttcaatagcttctccagtaaaatataacactgatcttgggattatacgctcacgtaaaaagtgaccaatttcgaagtctgcagcaaggatagcttcagcatcatcatcctgtaatcccagctactcgggaggctgaggcaggagaattgcttgaacccgggaggcagaggttgcagtgagccaagattgtgccactgcactccagcctgggcaacagagtaagacc

SEQ ID NO: 563 - DNA, 275 bp, Homo sapiens
  misc_feature (90)..(90): second gene starts at position 90
ctcctgaggattttcatttgtgtttctggaatacataaagccttttcggggctcactcacagattcatttgttttcctaccagccagcccgcgcccaccgcagtccagcgagtccccagcgcaagtgcaggcggccgcgcagggcgcccgcgggccggccgcggcggtcaccggctccagccgaagcaaaagcagccagagaaggagaaggcaaggcgagcggcgcggggccccgagccctccccggaccggccgcgccatcttgtctggagcgc

SEQ ID NO: 564 - DNA, 7685 bp, Homo sapiens
  misc_feature (961)..(961): second gene starts at position 961
agagcttctccatttttattacacaaaattgttaagttttcagcagtagggcttctcaaaacaccagctgcaggctattacctgaaaaagacaaggcagttatattaggttctcgtgtaaatatgaatatacaatcaagtcaagctcctgacaaattatacatcaaggatgtatatagttcaaagatattgtgctgttacctcccacctccccaaaactccaagaactagcacctgcagagaaaaggagaaatacagaaagagtcctgaagacagattagtagtcaaagcaaagacgccgcagggatttgaaccccgtcctggaaaccaggagtgccaaccaccagcatcttttgctttttttttttttaagctagaaaaaggccaaaaagcaaaacctgagaaaacaatacgtgttgttttctcaggaaaagaaaaaccttcatgaccctactgaagagcattggagatcagcttccgctaagatgctagcttggccaagtctgttatgttcacctgaaaaagtcttagcagagaatttttgcattcccacccaaaagccctctcagccactcaaatgcctatcttctccagtctacaagttacatgttcccacccagcattacagttcttgaacatgttatttctccacttactggtttaagttggttttagtcactggataagtattataatagagctacttagctgtggttttaatacccttctgttaacaatttgcaggcaaattaatggccttttctaacatagttcaacccaccaaagacctcgacaccatcgttaccttgaaaccgattatggatcatgcccacaaggatccaagctactggctgcatcgaggtgaggggtgaagggtctgtgctagatcaaaaggcacggggtggcgatgtggcagagaagttgcttgtggggagaccttgcttttaacaggcttctggaaaagctagggaaaagtggttgcccgctttccccctttccctccccttcaagcaccgcttgagatttgggctttattattaagagctgctataaaaacagcttgcttaaatgttaagagaagcccaggggtacttcaagcattccttcggatgcttcactccagaaagagggagttgaggcaagtcctcattactaataaaaatcaggtgaggctgacacttctcttgaccttaggataatagcgctttgttgtctctcctgccacaggaaggctccatggttgtcctactttaagccttcggtgcctttagtgaggggtacctgaaaaatcttaaaaaaaggcttagcgcccacctcacccctccacccccacgccaacacagtttgctcacatgccagttactccagcataaagctgaaatctattcaatactattgtcccataactgatctgactttgtatgtaaatacagaaaaagcttgttcacctgttttcctcattttgtccactggtgaattcaactggaagctccttctatagtctgaagaataccatctgaaagaactagtggttcccaatccccacatttaaaatggaatgtttggtttatttaaagtaaataggctattttttcttactgggtctggcttctctggcccttcgcatacgtgtgtctgctgagtgttcctgcatgtaagaattaagaccaagggaggggagagagaaacccacacataaacaatgcactaaagatcactgaactgtttaaacatttccacttgccagtttaatttcttgaagactgttgcttgtttggaatgtttcttgtcactgattttaaggttgcatctggaaaagactaaaggcttcagtcccctcccaccaccagaaatgaacaaaaagcattttacctaaaaatacaccagcaaaatgtactcagcttcaatcacaaatacgactgcttaaaactgcagaaatttcctcaacactcagcctttatcactcagctggattttttccttcaacaatcactactccaagcattggggaacacaacttttaatcatactccagtcgtttcacaatgcattctaatagcagcgggatcagaacagtactgcatttacttgccaacagaacagacagacctgaagtcaagacaactgcattctctgtgaagtctgtaaaaaaaaaaaaagctacaacaagtaagccccaccccctcctcccatccctccaaattccaggaaaaaaattttgagtatgctgataaactcactgcaaggtctcatacactcactagaacagaaggaagagccaagcactcatatgcaattcaaaatcctgaatggcttcatgaaggatgaaatgcctctgcaaaggaaaattctttaaaaccccacaggcaccccctcccttccctatataaggtcaatagtgtaaaacattgcctaccactctaagattgtaagcatttaaagttaacatgcaaactttggaaatgtgaaaaagtattactctaatcactgtcaatttatagacccctgactttctggaaataaaatgtgtaattaccttttactctgatcataatctcccacctgtctaagaggttatttattccttatttagagggcctctattgccatgtgcctggaattattatatgctcatcactttatgaagaataaaatttgtctttcctgccttaaagttacattcgttcttccgctcaaatcctgatctggtccattaaagagtgttcgcagacaaagtttctgaaagattagagaagaatcccccccaagattgccccaacactgaactacagacaaacactattttatttaaataaggagacagctttctaaaagtatacattctctaataaaaatagtttattattttgaatgatttaatggttttctacacaatttacatcacaacatgtaaattttagcagtaacatctgattctaacagcacatcatgctattcctttcatagagccttcagagattcaatgctaaacaaatttccttagttggcatcaaggcactgatcactttagaggcttttaagaaattatttaaagatgcaaatgcctctgagtgaagtgtactatcccatcactgaagcccacaggaacaagtcctacaattttaaaaaggctcgatggaaaaatttctcaatcctgaaatcccctagggaaggggtcaggagaaagtgccatggttgatatttaagaactccacagctcttaaaaataagcacttatccctaacatgcaatactgcagatgcaagttaaacttatctgttaacagctgcctgctgttttctgctcccagatgaaatgaagcaactcttctgataacgaagagatacctgtctgaggcaaacgaaacattggcacacagcacagcctcctcaatccacttgatcccaactcatctctcatttatttcggcttcttttattccaggattaatgtagtgtaacattttcatttcttttcgcttttattctgcttttgtaaaagcagtattttgagatggacattgcctcttcattgtatttctcatcaattcattatttttgtggttatagcttgacaagcaattaactttaaaatggtagattccgtaactttaaattggtagctttcatttgcttaaaattttttggcatatgcagataatgttctcatcagtagtaagaatctcagggttatgcttattccccaatggaggtatgacatataatcttttctgcctttacttatcaattcaccaaggagctgttttctctgcatctaggccatcatactgccaggctggttatgactcagaagatgttatctgaaaaaagtctatagaaaaaaaaaaagtttcccctccctcatcaacaaaagcccaccctctaagagacattcaagctgaactatcacaattcttaatcagttacaatttacaaacagataagtttaaaataaacaatttacaaaatttttgaagcataccttaacatcttgttttgcagttaaacaatggaaaagtatttctcctacactaaaaaaaaacttgcttacacacaactgaaaatagaatcttacttgataatacaaaagctaccatcagaagaaatcccttcaggatcattaagccacttcctttgctctgcagtttctatagtagttttaaattattattaaatcacctgaaaaaaattccaaaagagaaccacacactaccatatccaaacaacttttgcatttcccataattgtagttaatgtcagcccagtaggccagaccaacccccagttcaatactttccttccccaaaagctctatactttgaaggaaaacagatacagtatcaaattatgacactttccttgcccaaattaatgcactggtacacccagtggctcatatttaacttcccccagcttcccaattcaaactggggggaaaaaaactaaatcattgggagttacttgccaacttggaagttgatatttctttactttttccattctaagactttaagttctctggcatgagtttatctgcaatcataaactaaacaattacctaaacccaccccaccaatcccaaccgtaacaggccactgccaactaattgccaatatttgcccctcccctttaataaaacttttaagaagtcacattattggaaaacttaacttcaacatttggcctactcaagctcttctgaagttctcctgagatgactgaatatgaaccaaagctgcactgtgctgtacttttcagcttcaactgggaatactcttccaaggataaaagcagctccagtccctgaaggtgttcgtgccaacagcacagcggtacactccttctctaacccagtttgtcaatagtactatagcatctgtggaaaatcttagaaaaaaacattttctcccccaccctctctcttccctgttaagaccatcccaaaatgcttcaagtaaaaaataacaagtttaaggggttaagcacttttaaagtctgattaagggggtggggggaaaaaagagtaactaccagccatttctccaatggacatctcttccacagacctcaacgtgagaactgctctagtttctataaactgtaaacctgtggtggtctgattatcctgatattggattttcttgttttctgttacaccttgagtcatttgcctttaggattctagacagacctaagggaaaaagaactgaaaacatattttgcccccacccccacaaaaaaaaatactgaaaactcccccccgcctcagttacacatccaaactctacatttacaaaacgaattcagggtgaggaagtaaaaacaggtcatctattcacaaaactgaaatacttcattaccccaactaaacatacaaactgcttacagatttgctgaaattgtctcaatttggctatcaaattcatttggttttcctcaaattcgtgtaaaaaaaaaaaacccacaaacttgccatctactatttctccaggacttggcagtctgccctcaaaagcttcagacaagattcatgagtataagcctgaaaaagagaaacctacaacacccggaaatcggcctacgtccccatataaatccctttacacctcagtacgaaactcccccattatattagaaaataaataaaaggttaccataagtaagttccagaaaaacaacatattgccgacctcacggatttttaccaaccactcgctttccctgtggccttggcacactggcatgctggtctaggatcctctacgcacaacgcctgctcgcctcctccgtgtggttgccaagccaagccgcctgctaccttcatcaccaaattgcactcgctccttcctggaatcctttttcctagcttcaccaccaaatcgttagcgctccttccttcttcctagcttccttcaccaaatcgcactggctcctggactcttttcctatcttcaccacgaactgctgcttgctcgcttgctcctcagtcctagcttcatcaaacactggttcctggaatcctgtctgctgctgtcttcctagattcactgaatccacttctgtgtagcacctgggtcagctgtcaattaatgctagtcctcaggatttaaaaaataatcttaactcaaagtccaatgcaaaaacattaagttggtaattactcttgatcttgaattacttccgttacgaaagtccttcacatttttcaaactaagctactatatttaaggccttccaaattcttctaactcttccaaaagccttctgccttagttttttttaaattacaccagtccttttagtagctttttgatgtgatttttaaccaacttccccttctagcttcaagtattcttctaaattggttctggtctacgtaaacaccctcatcttctcaagctttaccttctaacttctgcaccaccagaaattaaattgatgggcttttaaaataaattggttaccaataatttcctcattttttcagtgctattttatccaatttttggctttatatttttctatcttctatacttctccaatacttgtcttagcttgtttttcattttctatctgaaactcttgacaatattttcattttctatcttgtttctatcttccaattttcttctaagtttgtacattttgcccttagctttttgtttcctagcttgtcttttttcttctgcttcctacttttcaggtttaaatttatcttttttcttctaaaagtatgtttttatcttctaatttccctatcttctctattcttttcttcgccttcccgtacttctgtcttccagttttccacttcaaacttctatcttctccaaattgtttcatcctaccactcccaattaatctttccattttcgtctgcgtttagtaaatgcgttaactaggctttaaatgacgcaattctccctgcgtcatggatttcaaggtcttttaatcaccttcgggttttttttttttttttatctaaaagtgcccaggtgggcttaaggctgccagactgcacgcacatctacagcaacaagggcttctattccatctacaacttggatcgggggaaaagggagatgtaggagaggaaggaaaaaagaggggaaaaatataccaccaaccctcccccacaaaaaaagggaaaaaaaaaatcccaccacagggagatctatgtgccaagcataatggaagagtgtgctccccaaacagatggttttgcacaggctaatgttctgctggttttccttagagacctattttgaaaaagtttaaaaagacaggagatttcaaaataattcaatcctggcagaaattcaaactccaaaactaggagcaaaatcatccttcactgaattaattccttttctctttctcttttcttaaacattttattcattttatagagagatttcttttttgtttgcttttgttccaatcattaggagagtggttgaggagtactgaatccatcactactttgatgacacaggtaatattccagattcacatttccaggtaccaagagttccctctaaatggcacaatcaagtcagccttcgtttacatttccttctactgaacacagcaatgcccattggtatctctgaagcgtaatcgcatcttaggtcggtatttctccaaataaagcagctgtttggaattgaacgctccccttcttttt

SEQ ID NO: 565 - DNA, 7214 bp, Homo sapiens
  misc_feature (257)..(257): second gene starts at position 257
ctttgatgttcacaagaagtgtcccctctgtgagttaatgtttcctcctaactatgatcagagcaaatttgaagaacatgttgaaagtcactggaaggtgtgcccgatgtgcagcgagcagttccctcctgactatgaccagcaggtgtttgaaaggcatgtgcagacccattttgatcagaatgttctaaattttgactagttactttttattatgagttaatatagtttagcagtaaaaaaaaaaaaaaaaaccgaaggtgattaaaagaccttgaaatccatgacgcagggagaattgcgtcatttaaagcctagttaacgcatttactaaacgcagacgaaaatggaaagattaattgggagtggtaggatgaaacaatttggagaagatagaagtttgaagtggaaaactggaagacagaagtacgggaaggcgaagaaaagaatagagaagatagggaaattagaagataaaaacatacttttagaagaaaaaagataaatttaaacctgaaaagtaggaagcagaagaaaaaagacaagctaggaaacaaaaagctaagggcaaaatgtacaaacttagaagaaaattggaagatagaaacaagatagaaaatgaaaatattgtcaagagtttcagatagaaaatgaaaaacaagctaagacaagtattggagaagtatagaagatagaaaaatataaagccaaaaattggataaaatagcactgaaaaaatgaggaaattattggtaaccaatttattttaaaagcccatcaatttaatttctggtggtgcagaagttagaaggtaaagcttgagaagatgagggtgtttacgtagaccagaaccaatttagaagaatacttgaagctagaaggggaagttggttaaaaatcacatcaaaaagctactaaaaggactggtgtaatttaaaaaaaactaaggcagaaggcttttggaagagttagaagaatttggaaggccttaaatatagtagcttagtttgaaaaatgtgaaggactttcgtaacggaagtaattcaagatcaagagtaattaccaacttaatgtttttgcattggactttgagttaagattattttttaaatcctgaggactagcattaattgacagctgacccaggtgctacacagaagtggattcagtgaatctaggaagacagcagcagacaggattccaggaaccagtgtttgatgaagctaggactgaggagcaagcgagcaagcagcagttcgtggtgaagataggaaaagagtccaggagccagtgcgatttggtgaaggaagctaggaagaaggaaggagcgctaacgatttggtggtgaagctaggaaaaaggattccaggaaggagcgagtgcaatttggtgatgaaggtagcaggcggcttggcttggcaaccacacggaggaggcgagcaggcgttgtgcgtagaggatcctagaccagcatgccagtgtgccaaggccacagggaaagcgagtggttggtaaaaatccgtgaggtcggcaatatgttgtttttctggaacttacttatggtaaccttttatttattttctaatataatgggggagtttcgtactgaggtgtaaagggatttatatggggacgtaggccgatttccgggtgttgtaggtttctctttttcaggcttatactcatgaatcttgtctgaagcttttgagggcagactgccaagtcctggagaaatagtagatggcaagtttgtgggttttttttttttacacgaatttgaggaaaaccaaatgaatttgatagccaaattgagacaatttcagcaaatctgtaagcagtttgtatgtttagttggggtaatgaagtatttcagttttgtgaatagatgacctgtttttacttcctcaccctgaattcgttttgtaaatgtagagtttggatgtgtaactgaggcgggggggagttttcagtatttttttttgtgggggtgggggcaaaatatgttttcagttctttttcccttaggtctgtctagaatcctaaaggcaaatgactcaaggtgtaacagaaaacaagaaaatccaatatcaggataatcagaccaccacaggtttacagtttatagaaactagagcagttctcacgttgaggtctgtggaagagatgtccattggagaaatggctggtagttactcttttttccccccacccccttaatcagactttaaaagtgcttaaccccttaaacttgttattttttacttgaagcattttgggatggtcttaacagggaagagagagggtgggggagaaaatgtttttttctaagattttccacagatgctatagtactattgacaaactgggttagagaaggagtgtaccgctgtgctgttggcacgaacaccttcagggactggagctgcttttatccttggaagagtattcccagttgaagctgaaaagtacagcacagtgcagctttggttcatattcagtcatctcaggagaacttcagaagagcttgagtaggccaaatgttgaagttaagttttccaataatgtgacttcttaaaagttttattaaaggggaggggcaaatattggcaattagttggcagtggcctgttacggttgggattggtggggtgggtttaggtaattgtttagtttatgattgcagataaactcatgccagagaacttaaagtcttagaatggaaaaagtaaagaaatatcaacttccaagttggcaagtaactcccaatgatttagtttttttccccccagtttgaattgggaagctgggggaagttaaatatgagccactgggtgtaccagtgcattaatttgggcaaggaaagtgtcataatttgatactgtatctgttttccttcaaagtatagagcttttggggaaggaaagtattgaactgggggttggtctggcctactgggctgacattaactacaattatgggaaatgcaaaagttgtttggatatggtagtgtgtggttctcttttggaatttttttcaggtgatttaataataatttaaaactactatagaaactgcagagcaaaggaagtggcttaatgatcctgaagggatttcttctgatggtagcttttgtattatcaagtaagattctattttcagttgtgtgtaagcaagtttttttttagtgtaggagaaatacttttccattgtttaactgcaaaacaagatgttaaggtatgcttcaaaaattttgtaaattgtttattttaaacttatctgtttgtaaattgtaactgattaagaattgtgatagttcagcttgaatgtctcttagagggtgggcttttgttgatgagggaggggaaactttttttttttctatagacttttttcagataacatcttctgagtcataaccagcctggcagtatgatggcctagatgcagagaaaacagctccttggtgaattgataagtaaaggcagaaaagattatatgtcatacctccattggggaataagcataaccctgagattcttactactgatgagaacattatctgcatatgccaaaaaattttaagcaaatgaaagctaccaatttaaagttacggaatctaccattttaaagttaattgcttgtcaagctataaccacaaaaataatgaattgatgagaaatacaatgaagaggcaatgtccatctcaaaatactgcttttacaaaagcagaataaaagcgaaaagaaatgaaaatgttacactacattaatcctggaataaaagaagccgaaataaatgagagatgagttgggatcaagtggattgaggaggctgtgctgtgtgccaatgtttcgtttgcctcagacaggtatctcttcgttatcagaagagttgcttcatttcatctgggagcagaaaacagcaggcagctgttaacagataagtttaacttgcatctgcagtattgcatgttagggataagtgcttatttttaagagctgtggagttcttaaatatcaaccatggcactttctcctgaccccttccctaggggatttcaggattgagaaatttttccatcgagcctttttaaaattgtaggacttgttcctgtgggcttcagtgatgggatagtacacttcactcagaggcatttgcatctttaaataatttcttaaaagcctctaaagtgatcagtgccttgatgccaactaaggaaatttgtttagcattgaatctctgaaggctctatgaaaggaatagcatgatgtgctgttagaatcagatgttactgctaaaatttacatgttgtgatgtaaattgtgtagaaaaccattaaatcattcaaaataataaactatttttattagagaatgtatacttttagaaagctgtctccttatttaaataaaatagtgtttgtctgtagttcagtgttggggcaatcttgggggggattcttctctaatctttcagaaactttgtctgcgaacactctttaatggaccagatcaggatttgagcggaagaacgaatgtaactttaaggcaggaaagacaaattttattcttcataaagtgatgagcatataataattccaggcacatggcaatagaggccctctaaataaggaataaataacctcttagacaggtgggagattatgatcagagtaaaaggtaattacacattttatttccagaaagtcaggggtctataaattgacagtgattagagtaatactttttcacatttccaaagtttgcatgttaactttaaatgcttacaatcttagagtggtaggcaatgttttacactattgaccttatatagggaagggagggggtgcctgtggggttttaaagaattttcctttgcagaggcatttcatccttcatgaagccattcaggattttgaattgcatatgagtgcttggctcttccttctgttctagtgagtgtatgagaccttgcagtgagtttatcagcatactcaaaatttttttcctggaatttggagggatgggaggagggggtggggcttacttgttgtagctttttttttttttacagacttcacagagaatgcagttgtcttgacttcaggtctgtctgttctgttggcaagtaaatgcagtactgttctgatcccgctgctattagaatgcattgtgaaacgactggagtatgattaaaagttgtgttccccaatgcttggagtagtgattgttgaaggaaaaaatccagctgagtgataaaggctgagtgttgaggaaatttctgcagttttaagcagtcgtatttgtgattgaagctgagtacattttgctggtgtatttttaggtaaaatgctttttgttcatttctggtggtgggaggggactgaagcctttagtcttttccagatgcaaccttaaaatcagtgacaagaaacattccaaacaagcaacagtcttcaagaaattaaactggcaagtggaaatgtttaaacagttcagtgatctttagtgcattgtttatgtgtgggtttctctctcccctcccttggtcttaattcttacatgcaggaacactcagcagacacacgtatgcgaagggccagagaagccagacccagtaagaaaaaatagcctatttactttaaataaaccaaacattccattttaaatgtggggattgggaaccactagttctttcagatggtattcttcagactatagaaggagcttccagttgaattcaccagtggacaaaatgaggaaaacaggtgaacaagctttttctgtatttacatacaaagtcagatcagttatgggacaatagtattgaatagatttcagctttatgctggagtaactggcatgtgagcaaactgtgttggcgtgggggtggaggggtgaggtgggcgctaagcctttttttaagatttttcaggtacccctcactaaaggcaccgaaggcttaaagtaggacaaccatggagccttcctgtggcaggagagacaacaaagcgctattatcctaaggtcaagagaagtgtcagcctcacctgatttttattagtaatgaggacttgcctcaactccctctttctggagtgaagcatccgaaggaatgcttgaagtacccctgggcttctcttaacatttaagcaagctgtttttatagcagctcttaataataaagcccaaatctcaagcggtgcttgaaggggagggaaagggggaaagcgggcaaccacttttccctagcttttccagaagcctgttaaaagcaaggtctccccacaagcaacttctctgccacatcgccaccccgtgccttttgatctagcacagacccttcacccctcacctcgatgcagccagtagcttggatccttgtgggcatgatccataatcggtttcaaggtaacgatggtgtcgaggtctttggtgggttgaactatgttagaaaaggccattaatttgcctgcaaattgttaacagaagggtattaaaaccacagctaagtagctctattataatacttatccagtgactaaaaccaacttaaaccagtaagtggagaaataacatgttcaagaactgtaatgctgggtgggaacatgtaacttgtagactggagaagataggcatttgagtggctgagagggcttttgggtgggaatgcaaaaattctctgctaagactttttcaggtgaacataacagacttggccaagctagcatcttagcggaagctgatctccaatgctcttcagtagggtcatgaaggtttttcttttcctgagaaaacaacacgtattgttttctcaggttttgctttttggcctttttctagcttaaaaaaaaaaaaagcaaaagatgctggtggttggcactcctggtttccaggacggggttcaaatccctgcggcgtctttgctttgactactaatctgtcttcaggactctttctgtatttctccttttctctgcaggtgctagttcttggagttttggggaggtgggaggtaacagcacaatatctttgaactatatacatccttgatgtataatttgtcaggagcttgacttgattgtatattcatatttacacgagaacctaatataactgccttgtctttttcaggtaatagcctgcagctggtgttttgagaagccctactgctgaaaacttaacaattttgtgtaataaaaatggagaagctct

SEQ ID NO: 566 - DNA, 3068 bp, Homo sapiens
  misc_feature (133)..(133): second gene starts at position 133
ctgggctccttctccatggtataagcaattcaccacattatctaataagttgatatccagtttttggctgaaatcaagcagctgacgagctgcatggtctgctaacattgtcataattgctggcatagattactgtaatcccagctacttgggaggctgaggcagaagaatcgtttgaacctggaggcagaggttgcagcgagccaagatcacgccattgcactccagcctgggtgacagggcaagactctgtctccaaaaaaaaaagaaaaaaggaaaaaagcctttcttgatgctgttccccatttctccactaaaacgcctgcttttcttaactccacaccgaaccaacctgaaatattttggcccagaatgccaacaagaattgaagaaaagatgctttacaaaaataacaatataaaagcaaattatattatcccttttatctccattcttacattaaaaaaaaaaaaaaaaatcggccggacgtggtggctcacgcctgtaatcccagcactttgggaagccaaggcgggcagatcacgaggtcaggagatcgagaccatcctggctaacacagtgaaaccccatctctactaaaaaaaaaaaaaaaaaaaaattagccgggcatggtggcgggcacctgtagtcccagctgcttgggaggctgaggcaggagaatggtgtgaacctgggagatggagcttgcagtgaaccaagatagcaccactgcactccagcatgggcgacagagcgagactccgtctcaaaaaaaaaaaaaaatctcccccaaataccagttgcaaagtccttgaaaacaaagggagtacaatagcagtatgatttagggcacactggacagtatgggtcactagcaaaattattatacttatagggagtaataatcccaaattgtgttcatggcccttcaaatcctttagcaacagattttctcccaaaatcaatggacttcataattatagattcccaaacctgctatctcttcttcctactcaaattatatttgctccagtgttaaactaaatactgctaatttgtcagcttatcccaatgtaggacagccaaaataactgtaaggagagctatctttgcagccatctcacttttcacattactttatccctccatggttaactgacattttgatattgataattcaagccaaggctacctgccttgtagactaagggggctactttgacaacagagttcaacagtattgtagacagctaacacctgtccttgaagagaagtgaaagaaaaagctaacaacattccgcagtctgaaaatatcttaacaaattagtttctactttctcatttctaaaagcttgaatctatcatctagttaacataagggatgattaaacactgaatgttcctctcaaaggtaaccattttgctttcttagaaggaggtagctatcaaaccaaaaaactggcagcatttggcattcttgacattttaattagagcagaaataaactactaaatattttatttctaagcaaaacagagctccagcataaatcctgtttgtctgagaaattcacaatacattttagaaatccaatggatacattcaaaatgttatctaataaataacaaggtcaggtctactccaaatctaagaatctgatttaaacataaggtgccaaaaaactaccagggctttttttttttggtggttataaacaatacttgatatttaagcaacacagtcacactgctttaaacttagttgcagagatctacaatttattattattttcagtgttagagctagagggtaattttttcaaagatggcactcaactccacttatttacctgtcaacaaatacagaactgaactgttagccataagcactttacaaacagactcaggaaactatgcagtagacaatgacatagcttaaccagactctgaaaaagagatacatattttgattcacacttgtacaaagagaacagtcatgtctgcatgacttaaggttccctaaacacaactgttttatgttttagacccctggagtgtgccagtttaccacatcagggaggaatcaagggatgtgtgtgctccttctaaagaaccaagggcaagtggggtgggggtggctacagggaacgctctgggcaaaagagctgcctcaggtttttgtgggaatgaaaattacttgttgcagttaagcaattcctagggtttatctagtttgaggttcaaaacaaaggagagaattatttccttcctcgagctcttcccaaagcaatatgcacatctcataatcaaatctcaagtagtacaaagagataatcaattatctaaaaatttaatttacatacatgttggcctggattaaaaacaaaaaagttagtttccataaatagcagactttagtgctgtatgacccaatgactaaaaataaaaccaggaagtttttactaaaagctcaaggataaaaatgaacactggctggctattgaactccacatctgacaataattactgacagtttaaaaatgtatatccaaaatataacctcaagaggaccaggtttatttgtccgacagagcagctcaaaatgttgaggcatcatttgtttggattatgatgggttattctcgaagtttatttatttagaaggggaaagtgattatagaaaaatacttgaaataatttgccaatgaagttgcagattctaacaataatccacatcttagatttttaagtgtgtagtttcatagtttaaacaaattctgtcaaagaactattcaatatactttatcactttaactttccatgaaaaccaaataaaaatcacatccgaatgatttacttctatgcttttatctgattgtatacatatgatgtactacgcatccaagtacaagaggcagttatcttctctgagaggtgcaagagttgttctttcatgaatgccctctaatagtgaaaccagcaatttttatatatgcattcatgtgcatatacatgtacttcaaaaagcaaagcgtcatctcttcgtccattgttaacttaatggtaaga

SEQ ID NO: 567 - DNA, 615 bp, Homo sapiens
  misc_feature (229)..(229): second gene starts at position 229
gttatattcccagaggatgtcagtcccaaggaccagtagctgccatcagtttggattctgaaaactaactggcatcaacactgggtgtagaaacatgcttgccttatgtatcagaggacatgctcagcagatccaagagatatatttggcaactttttctagaaaaggcacattgggtatcattcattacattcttgagtttttttgggtttttttttttttttttgaaagtatcacaccagaagtttattatggaacaatcacatatgttgactctcctttgaccctcactgcagtgcactttcattacttatcaatctgggggcgggaaaaaggggtgcagccagacaagagaatatacaggaaagaagcattgtatataagcctatgtatttctgtaatgctgctacagggggatacaaaatcaggtgccagcctccagaaaaaaagagattttttttcttccctcagtctcatttggtccctcggcgcttcctgaagtagcgattataggcagcattgtatccataaaccatggcgtagcgttcgcaaagtctgtagtcatcacaggcttccctattgagctcgtggacaggcttagagcgttctcggatc

SEQ ID NO: 568 - DNA, 4858 bp, Homo sapiens
  misc_feature (4480)..(4480): second gene starts at position 4480
gaggttcatcaagaacgaattgcattggaaaaccaattggaacaacttcgtccggtcactgtgttgtgacccccccatggttcaagtgacagtgggtgaccttgtctgccaagatctttcttttgaatgttttgaacccaactacttgtcatagatgtttgactgtgtcaaaagctgtgagcagcaaaatataatccatatgaccttttctcttgcacttcacttgtatgttttactgtggtggaaaaaatacttcaactgattatcacacttgaaatgctaattatcagtggaatttgtctcctattcttaagtacttctgcaaggtattagatgctgctccttaccaaaaatcagtcttctagcaaataaaaataacttagagcattatttatttaaagaatttatgttttctataaaaccttataaccaagaaccttcaggatgcttgtaaccaagtactttcaggatgctttttgtatgtatatcacatagagtaggttggtttcctgagtaattgggattccaactagatagtcattggtgtgaccataataaaaacaaaagctaaaataaaagcatcagatttagactggcgctgtgccctctaccactatatgccaaaaattgcttctctagtgccattttgatattatatctagctataaataatacatgactatcgttttctattgaatgtcaaagacttactgggtctttacacctctgtaaagtggaggttttggcaatgagctgtttaacttggccaagctaggctgtcaacccagacaactcagtcctttcatgtaaatttttgggcaagagaagtctgctttgactgccttgcctgaccaaattaaataaatagttgccagatctctacttttatcctgcatgggataatatatctgtaaatgcatgagtttggaaaccacccatcaaatatgaaaggctgatgagactgttaggattgataaacatttgttgtttgaacccagctatccaaactggggaagaaggggaaatggttgttaccaacaatctctagtagttattttaatctttattttaacctggattgcaaatgtatggggtatgaggagataatgaaagaaaagtggtcctcatgctggatatgtgactgttttgttctctgtaaagtgtattcttgggaagtgattggtttatatcagattcagaggagcccaattaactccagtgtaggtaatgtaaaacagtaagctcaaattgcagaagccagtatcctacagaaatttaagtagctactgcttctcctgaaagcccaagttgaaaatgggaccacaggggcacagggctactgaccctcacagggcatgccagcgttaacaccactttgagagaccaatggcaagaaatgctgtctcttgtgcattttactaatttccccattcttagggtagcagggtgggggtgtatagggtctttttgaagcagttttggataggtttgcaatatgtgggattcagcctttgatttcaatagagctgagagcttttagaacaagcaggcatttatttaatgtttccttagtccattggcaagctttatcaatagcttaatggcagaggataaaggctcaaacagatgatgttttttccacagaaaaacaaattgttgaatctattccgtgcatatttaaggattttgaattgattttgaaaatcatgaaacttgaactatttttctattccctttttttcttccccatttgctgccttttttgtttttgtgggggaagggttgggagtaagtttaaactcttccgaagattatgaatgggtcagcacaaatttttaggcaactgctttttccatgttctgagatctacgggctacaacaaattttatcagcagtgttttttgtttttttgagatggagacttgctctgtcgcccaggctggagcgcagtggcgcaatctcggctcactgcaacctccacctcctgggttcaagcaattcttgtgcctcagcctcccgagtagctgggattacaggcacccaccaccacgctcagctaatttttgtatttttagtagagatgggattttgtcatgttggctaggctagtctcgaattcctgacctcaagtgatccacccgccttggcctctcgaagtgctgggattacaggcgtgagccacccgcccggctatcagcactgttctgattgcagacgtttcacagcatgtttggcttttggtaaattcaatccaggaaagactagcatgtgcactttatctcataatcttccagtacatatgctctcagttgggatagcagttcatttccattaggcagacgtataaactaaggaatgttagtctgcagtattcattttaaaaatattgacatgcttttcccctcccctccatgaagtcagtgccagagtgagccagattgggaggttggggttttgtttggttggcttggttttcattaagggaaaaaacttgcattggacaatcaaattcccctgagtttcataatctcatcaatattttaagataggcgagcacacactaataatatctatgcctaccttcttgggtggactcaactgtaaccacagtttattagttgcttagaagtggatttttaaaaaacagttaaatgtgtgtgcataacacacaagtaatgacacactactattattattacctaagtagtgctcatcctctctttctgtgttttcttaggatgtgcactttaatttaggattgtaacgcctaataatatttctgtgagcctttaatgtgatttataagatggccgaattactgaaatcaccattatacctcttccataaaacgactccaaagttagacctgcctgttggggagaattctatagacagaaggtcaatgttgtccccatccataggggttgaattaccttgctgttaagtggtcttcccccattgggatcctacagtcccacagatgaaagcacagtagtagctgacagctggcttatttggtccctcggcatctctcgtatgtggcatattgcttttgccactttcctatccagcagacatcaaagcaaaactaaaaggtagatatctggaatgaatgtatatgttgtaattgaggcagatatttgccttaattggaaggatctaactgctttacaaatattaaacaagtgcttgggcatgattgggagaggaggcagcttagctggaagctgtgcccatcttactgtcactggagaataggatgtcagagctgggcaggactggtacccatcatttgcagtttgcatgtggggaaaccaaagccctaagaaacaacagttcctggcccaaaaaatccatagaaagaggtaactagtggcagatttggggcgccaacctgattttatggattttgagttagattctctaccctctatcaatactaaaaatagattaggagggtttttttttctgtttatcatgttgaatttcattgacttaattagtctttaaatttgaaaacatgttttagggagtttagttctagaaatttctcttagattgaagtgacagaatctgaaagaaaagaatatgattgagctatttgttttcctgaacacctcaccttttatgatgcaataagttactctgagtttcttggcagagtttttgacagctgttgctttcaatggattccattcctgtattccttatgggaggttgtttttaaaatagactactgcgattgaaatgaactcaatatgtagttaagttatagttttcttcaatgtatttttagttacttgggtcacaaatgttcaatttcagcatattttagggtgagtaatcaaaaatgtgaatttgcctttgatttcctaccactgtctgagctatcataaagcattctctttagttgtgatttgattctatagtctgtttctaaatgacatttgtctgtttcttaaatgatctcacagccatggtaataatagatgtgtactcagaagatcaataaggtaatattggaattcatgtgttttttgcaattaaggcaggcatttgccaatgtcttcttttaagcagtagttggaaacatctcaattacagtgtaacaccttagagctaaaaacatttgttcaacacaaactagaatcacaccttctcactagatatcaccaagggaatgtggttttaaaaataaaaagaaaacaatataacgtatcatggcaaccagagcttcccatattattgacaagtagggatcattaggttctggtttgaacattctgaatgtgaacaaaatgaaatagtagttaagaggtgttttcccactgtgtttaaagagaacactagtaattctggtttttctttctaactgctttactgtttcaagggtattcttttaaaactctgatttcaaaggatcagttgaatttatactttagttatgggtgttttgttactttttttttttttgtatcacaccagaagtttattatggaacaatcacatatgttgactctcctttgaccctcactgcagtgcactttcattacttatcaatctgggggcgggaaaaaggggtgcagccagacaagagaatatacaggaaagaagcattgtatataagcctatgtatttctgtaatgctgctacagggggatacaaaatcaggtgccagcctccagaaaaaaagagattttttttcttccctcagtctcatttggtccctcggcgcttcctgaagtagcgattataggcagcattgtatccataaaccatggcgtagcgttcgcaaagtctgtagtcatcacaggcttccctattgagctcgtggacaggcttagagcgttctcggatc

SEQ ID NO: 569 - DNA, 1535 bp, Homo sapiens
  misc_feature (134)..(134): second gene starts at position 134
cagcacaagccagcgaggaggcagtgtcatttcgccgtgaacgcagcacatttaggcgccaggcagtacggcgccggcacaatgcagggagtaaccctacccctcctacattgctcatcggatcacccctaaggtaaagaagcagctttgaatctgagcttcatatcgaaagaagagatgaaaaataccagttggattagaaagaactggcttcttgtagctgggatatctttcataggtgtccatcttggaacatactttttgcagaggtctgcaaagcagtctgtaaaatttcagtctcaaagcaaacaaaagagtattgaagagtgaagtaaaataaatatttggaattactaatttgtcattaaatcattctatgctgattagcttcataaacattgaactttttgattttatagccacaatgctgcatattcatactttaattcctaaagaataatttttaatgttaaaacgtgataatgcaataaatagaaaaatgtggtttacaaaataaaaacggtcttcactagttaccacctgaagtaagatgtctcgtttggaagctaagaagccatcattgtgtaagagtgaaccactgacaactgagagagtcaggaccacactttctgtcttgaaaagaattgtaacatcatgctatggcccctcaggtaggctgaagcagctgcacaatggctttggaggttacgtgtgtacaacctcacagtcctcagctctgctcagtcaccttttggtcacacatcccattttaaagatcctgacagcctccatacagaatcatgtgtcaagcttcagtgattgtggcttattcacagctattctttgctgcaacctgattgaaaatgttcagagattaggcttgacacccaccactgtcattagattaaataaacatcttttgagtctttgcatcagttatctcaagtctgagacctgtggttgtcgaatcccagtggactttagtagtactcagatcctcctttgtttggtgcgtagtatattaacaagtaaacctgcctgtatgctcaccagaaaggaaacagagcatgtcagtgctttgatcctgagagcctttttgcttacaattccagaaaatgctgaaggccacatcattttaggaaagagtttaattgtacctttaaaaggtcaaagagttatagattccactgtattacctgggatactcattgaaatgtcagaagttcaattaatgaggctattacctatcaaaaaatcaactgccctcaaggtggcactcttttgtacaactttatccggagacacttctgacactggagaaggaactgtggtggtcagttatggggtttctcttgaaaatgcagtcttggaccagctgcttaacctaggaaggcagctaatcagtgaccacgtagatcttgtcctgtgccaaaaagttatacatccatctttgaagcagtttctcaatatgcatcgtattattgccatagacagaattggagtgactctgatggaacccctgactaaaatgacag

SEQ ID NO: 570 - DNA, 970 bp, Homo sapiens
  misc_feature (478)..(478): second gene starts at position 478
ttatctttatcctccttgattcaaaaatacaatttattttaaaaacaaaaagagggaatggatgcagaagcccgtctgggctttccgtggagtcgccccttcccaatggcgatggccgctccctgtggcctcagcttcctccgtggaatgaaggggtccaggtgacaccttcctcgaagggtgggcgtgggcctgaggctcccaagtcggccaggggctcggcctggctcagaagaggtgcttcacatcaacagtggtacggggtggccgctgggccctgggtagcgtggggtaggggtcgggggaagtcgctgtagggcaggctgaaggggtagaggggtctgtaacgtgagtcctgccagagcagcttgtcctccaggaaggcgacggtgggcagcgtcaggaccagcgtctggtgcttgagcatgctgtgcacatttaggcctgggggcggggtgggggcggggcggggggccgccgcgaccctcccggcgcctgctagacctgagcgtcttccgggaccgcggctttgtgctttacgccgtggccgcctcggtcatggtgctggggctcttcgtcccgcccgtgttcgtggtgagctacgccaaggacctgggcgtgcccgacaccaaggccgccttcctgctcaccatcctgggcttcattgacatcttcgcgcggccggccgcgggcttcgtggcggggcttgggaaggtgcggccctactccgtctacctcttcagcttctccatgttcttcaacggcctcgcggacctggcgggttctacggcgggcgactacggcggcctcgtggtcttctgcatcttctttggcatctcctacggcatggtgggggccctgcagttcgaggtgctcatggccatcgtgggcacccacaagttctccagtgccattggcctggtgctgctgatggaggcggtggccgtgctcgtcgggcccccttcgggag

SEQ ID NO: 571 - DNA, 2711 bp, Homo sapiens
  misc_feature (692)..(692): second gene starts at position 692
agacgagttgtactgctgtcacaggaaatggacgctggattacaagcatggcagctcaggcagcagaagttgcaggaagaacaaaggaagcaggaaaatgctcttaaacccaaaggggcttcactgaagagcccacttccaagtcaataaaaagcaactcctgcctcccttcctcaccctgtctctggatttcttttctatcacctagatgcttcatccagccagaagatagccttcacgttccccatctgtcttcagagaaaaagagctgggacaccaagaacaagctgttagatcactgcctgggaggcttggcttagtactctcatctctggttccattccagttcagctaagtcttgctttaaaatttttacctcctagctgggtgcggtggctcacgcctgtaatcccagcactttgggaggctgaggcgggcagatcacaagatcaggagttcgagaccagcctggccaacccagcctggtcaacatggtgaaaccctgtccctactaaagatacaaacaattagccgggcgtggtggggtgcgcttgtaatcccagctactcaggaggctgaggcaggagaatcgcttaaactcgggaggtagaggttgcagtgagccaaggtcacaccattgcactccaacctgggcgacagggcgagactccgtctcaaaaaaaaaaaaaaaaaaaaagactgcacatcctcaaaggagatcttcaaagcactgtcacccaaacagcagaacttggtcacatgggaccatttctgaaaatctcggcccatctctgtttctctggtaattcattttataaaacatgcttccatgtgaattctttaagtgcagaaaaacaacagaaaatgaacagagcacgtgggcaagaaaccgcatccctcaggcttctgccacacatgatggttctgcgggctgtgattgccaagtcctgtgttttccacactgagcagtgagtagcagctgccactgtcactaccccctccccagcccagccagctaaggagctgggtctggtccccaccagcttctccatggcctgtgagctaagaataggtttcacgtttttaaatagttaaaaaaaaaatctaagtttcttgacacagaacaatatatgtcattcagatttctgtgtctaaaagttgtactagacacagccacatctctgtactatttatggcagagaccatacagcccacagagccaacagtgtttactccctggctgtctatgaaaacatctgcccaccgctgagacagatgatcctgttcctgcaggactgaagaagcctcagttcagatgctgctggggctcctgggacaagcacagcccgagacacacttgcttcataaactgtatttcagtacttttcctcccccttgtccctagtttctaatttctcagtggacaaatggacaaaccatctctgtttgaatttgaatacacagatacatgcaagatatcttacaagaaacaatgcacatccttctactttctctttcagctctgctgacaagctcaatcacggtgtcattttactgccaccacgcccgaaagtacaccaaatgtaaagcagaggcagacgagacaagatgcaggctccaccagaggccactccagcttcgcgaccaacacccttggctgccaggcagcggtagccaggcaatgggatagaaggcaaagaaaatacgagggacagaacccatcagacaccggcagacactgcatttactccagactgagatgacagacacaccgtatgagctgcagcacaactctcctccgctgcgcccactgccagccaccagcagacaccaaggcacccagaggagccaggcacacagggcgggcagcaacataaacggcacccattaaaaagcaagactcgctcttgagactaaaggagaagttacctaaatttctgtataaactcagtaattcattcactttactagtattacatttatgaaattcacctttgtggaaaaaggagcgggagagggataagaaaatgcctgtttctagaaaaccgcgagatgcttccacgtgcagcttgatgctgttacctgcagaacagacacgcttgaaaacgcgacgtagtgtccgtacttccgaagctaggaggctgcttcacagccgctgagaaaatggaggtgaagagttccatactctccgtattttaacactaaaacaccaacagaaaggcatctgcaaggccctctgtcccgcacactacacctctgtgtccagcttactgctttcatggacccataatcttacagcaggtaggggcctttccacaccgagtgctggggaacgccaggcagcggtcactctgtgctgtgaggcccccgttgcacccccatgtcatgacacaagagatgttctggtgacgggtgtacgctgctcctcccacccagagcacacccctcatctcatccatcttcaaagcagctccaggagcctccccgtccgtgtggtccatcccgacccgatgggtcccaggtgcagaggggccacatctgcatgggaggtggtgtcaccaggccggggaggcggcgggagacttgggggaggggggggccagggaggatcactttgtgaggcttgccaatgcattgcctttgtttttctgaccagctgcagataaggctactcgtattccaggaactgtttgtgatagaacagcaagtac

SEQ ID NO: 572 - DNA, 249 bp, Homo sapiens
  misc_feature (127)..(127): second gene starts at position 127
tgcaaacaaatactttttaatgggtttagtttttttttttattttttacaaatatactggagaatcatgcaatgctgccagcattggatgcaatccggggccacaagtctgcacactcctttgctactggtcctgctgatgatgaagcccctgatgctgaaaccactgctgctgcaaccactgcaaccactgctgctcctaccactgcaaccaccgctgcttctaccactgctcgtaaagacattccag

SEQ ID NO: 573 - DNA, 3419 bp, Homo sapiens
  misc_feature (2564)..(2564): second gene starts at position 2564
taacaagcaaggaatgttttattgtgtacattttctcaaaaaaaaaaacccacaaaaacagaacccacaaataggagcaaagaacagttttctagcatctctgggatacacagggcaccatatcttatagaaacatagctagtacaagaacaaagtgtactaattaacattaccccttgcttccccagtcaaaaaaggctatagagaaaaacactttaaattgtactctaatacaaatttgttgcacaattaaacttcaacttactcaaagagttattgtattgtaaactgcagaaaatagaataggcattcaataaatctgctcacaattaacaattaagcaatagacacttgaataaatatagcatgtattacttatttgttaagccttacacttacgatgagcagatggtttatcactatatagtaacagattttttttacactttaggagataccatatccaataacggaagtagaagtactttaacgaaaactgattttagaaaaatatctccttgggtctgagctactatggtatttattacatatttgggtcagtttcaccagtttaaaaatataggtactaacaaactgaattctttcatgggagaacaaagtaatacattctagagcaatagtatttctttatatcctttaggtagcaggacagagctaggacatagtaaagagatttacgatgtaatgaataatttgtttctacctaatgctataggggtattgctatcatttgaactaagaaagaacaattttaaaacttgtttataatgaagaatcggcatttccttaccacatatatactagatgtaaatataaggatcttctctaatagtctgtattccttaatccctatctgtacaaattagcctgcatattcaggaatggaacaaccagtaaactgttacttgaagaactaatttaaatgatccatttaagagaaatgcagtcaaaataaggcaataaccatcagcctatctgtacttttcttctgtgcctactcagtaaaattgagaaaataatttttgcccacttctataaaaatatcaccccatttgctacctagcatatgagagagacaagactagcctgtcacgtttgtctctaaaaagaaaaatgataggcctggtggagagcaagctatatggaaacatcagcctttccttttctaagatacgtcactccaattcttccttaaatataaacttcctccttgatttatattaaccccttaggaggcactataataactttatgttcccatggaacatagggtttttcaagaatttcttaaaataaaaaaggtttgaaagctatggagtaaactcagcagctgtgatattccgttcaatctaccacagatgtcaaacggtcacattttacagaagtcaaaggaaaacaaaaccacagttctgcactcttccacagggcaaggaattgatcatattctattttcctttcaggaattcataaaatccctaggatagcacctttgtatgggctgaaccattaactgaactaaaattaatacaggaagcttaacattcaacattgtgcttgaacaaaacttaccactactcaatttttcttccaaactatgttagtaatatacattttgcaaagagtctagaaagtttttaaaagaaatctctttaggtgatgtaacacgaaaactctaaggaacaacaaaacccttcagtcttatttctgaagacaagtctatgtttaatgcagatcattccagtacatgatgtgcgtgaccccctttcctttccttacgtgtgtcacacagccattaagacattttagtttgatcgcctccttaaacctttcagtccctctaagacatcattataaaacaaatttagtcctttagttttatcatatggaatgaccctattgtcctggtatgatcccaacacagtgatgcagtactgaggttttttttttttaatcaatatctattagtaagattagcaaagatactgttgctatttttatatttgtcctttaaaaaggtaggcccttctccacttacttccatatccctagagaaatagatatatgtactgttgtcaaaaaaaatcaaacacacaaatactggaatattaaaagacaggctcctcatttcttctcttcctcatcctggtacacagtgcccaaaagctttagaaatgccattatgaacaatagcttttgctagttgttaggaaagcaatttatgagttgggaattattgtggaagacttgatggatgattatagctctgggtcactaacttctttttatgaaaacatgaataatactagttataactcaaagtcaaaatagtgtaaaagctgtggagtgcttttgtagggggtatattaaattgccagaatattgcagaggctcatcttggaacaagaagtagaatgctgtttcagttaagaggactgggctgtttcaggcaacagactgatcatttcgcatcacagtggtggctgggttttccatcagtcattactaatggcaatgagaaaaagtcaggcggcttgtgtgactcacaactccgtgtccttcctaaagtttcgggaagcagggttgtctaatatgcacatttcttattttggtcatatttttactttagtgtcactcaccttttacaaagtgactttgtactcatttagggctctatcggaaatgcttccattttgccttttctacagttaggccaattttgaaatatataaattctatgcaacatttatgttgagttaccaatggaagccaaaagttctcttcccaaactgccaagaatgatacaggccataattgaaatgggaataccttttaagtttcattaggggtggggtgggagtgggacaggaacaagacttgcctagatctttgttgtatcttggggacttttactttgttgtttgatgcttaaacttcaaaattctctgtattcaaatttgattgtggcgaatctacttcaaaaaggaaaaataatccaactttgtggatattaaatggaaggtttgctgttttgatctagttgtttccagtggagcagttttatgaaatatgttctataagatgtacattttttcattgtaacatagaaattgtaaataattgattaaagtgctgcattttgatgaattttttctagccatttttaaagagaaaactaggaattgagtattttgtgtacggtatgtttccatcctccctccccttcctcctcccctcctctctctctcttcctacctatttaattttcatttgtcatgaggtttttggatttgccaatgatctgctggacatcatgccccatgtcatagagaataaagctgatgattgtaccagtcttaaattattcatgattcaataaaattgatgcttatttattcaga

SEQ ID NO: 574 - DNA, 202 bp, Homo sapiens
  misc_feature (42)..(42): second gene starts at position 42
ctgttcccaggccttccattccagggatgtcgtccccaaaccttataaaacacatcaggcacgtactgctcactgctagactccttggcgtagccaagctccggggcgtccttgcatggcagcaaacactcatcacggaccagtgccatacactgattggacacctggtacccttcaaagtggacttggttgtcaggaccac

SEQ ID NO: 575 - DNA, 324 bp, Homo sapiens
  misc_feature (197)..(197): second gene starts at position 197
catgttgtgaatgaggttggtgagggtccagacgacagggacactcacaaacgggatgctcagcagcacgatgtggaggagaccgatggccagcacgtaggagagccagatgccacggctgttcatcacccgcgtgttggggttcacctcgctgtgcgctgtgcccacattcatcctgctgcccctctctgctgttgtgttagatgaaagatgccatcacaggcactaatatgagataaaaaagcattccccaggccctgcccattgtgagctcctttcacaaggccagcaatatccaccacatttagaaaggcaggaattttg

SEQ ID NO: 576 - DNA, 265 bp, Homo sapiens
  misc_feature (138)..(138): second gene starts at position 138
taaaaggcaatcgcaaatgtgagttgaactgccaggcaatgggctaccgcttctatgtacggcaagctgagaaagtcatcgatggcaccccctgtgaccagaacggcacggccatctgtgtgtctgggcagtgcaaggtgttccatgagcaaggcatcctgttcggctaccgccatccacagagttctgccactgcctgcatcctcagccttttccaaatgaccaatgagactctcaacatttggactcacttgctgcccttctg

SEQ ID NO: 577 - DNA, 265 bp, Homo sapiens; identical to SEQ ID NO: 576
  misc_feature (138)..(138): second gene starts at position 138

SEQ ID NO: 578 - DNA, 4869 bp, Homo sapiens
  misc_feature (2553)..(2553): second gene starts at position 2553
ttcaggccggaataaaggtttattgtgctggtgcattatatctcagcacctggagagctgtgcagaggttgggggagccccagatggagggatgggggagaggacctcctgccagagcctccctaaagcaggacggagcccaggctccctgtcgaggactgacgaatattgtggacacaggctgccagacaatgtgtgagcaacagggggtggccagggcccccctgctccaggctgggcgtcagaaacccttccccagcccctcggacttccccagggtggaggtcccctcaaacacagcccctcagcttctaggctgctttggaggccagacaggaagagttccattcattcaacctgatcccagcagcagtagcgggatgagaaactcacccccaggccgggggtgcttggagagcgcttgagaggatttaaatgccctataccccacatccctaatcctggaccaactagaaacagggggccaccttcaggaaaattaagagcagtattttccagagtgggtgctgcaggattttaccctgtagctgttttaaaaagtagtttgggccgggcacggtggctcacgcctgtaatcccagcactttgggaggcagaggcaggtggatcacctgaaggtcaggagttccagaccagcctggccaacatggtgaagccccatctctactaaaaatacaaaatttagctgggcgcagtggtgggcacctgtaatcccagctactgaggcgggagaatcgcttgaacctgggaggcggattgcactgagccaagattgcaccaagattgcaccactgcactccagcctgggtgacagaccgagactccgtctcaaaaaaaaaaatcttgtttccgtagagtgcctcggggaacctagtttgggaaatgctcatttagggacctgtcgtaatgtgtgcaggggtcctctcacagaagtgtcctaattaaccacacacacttctgctgctggagctctgagcacaggcagaatgacactaaaatattcagcattgaaaggacacaagaagggaaccatttgcagtttcaaaatactgcttcacgccaggctgcatgttgccttacgaacgctgggcaccttggcgtctctcatccaaactcttccaaaactcccacttattctttgctcccttgatggaaaagcagtgatgtttgccccacaaatgacctgtgacatatgattcccaattaatgtggctgatttagtggactgttttttgtttttatagagatgggtctcacaatgttgccagggctggtttggaactcctggtctcaagtgatgtccgcacttggcctcccaaaatgctgagattacaggtgtgagcctccacacccagccttgagggatgttttatcctggctgtcacagggacacgtgccctccctcactttgtcaggggagctgtgctgtaggatgtagccctttggggctgctgaggtgaaggatgatggcacttggtaagattcctccggggcaccggggaccagcatttctgcctgctgtagaatcagcacatgctgggattggcaccacagggaggccaaggagggagtgtcaggaagcagtcagggctgaaggccttttcatacacggggaggtgaccacttgggggcccgacagtcagggctggcagcccgggaggactgttagacactggggtggacactgctgcaagcacaggggctttcggggggacccactggtccctgggcttcctgggctaacaagagagacccttccagctccccttggccctcaccggccaccacagccccctcaaggacccctgagcacggctcctcctgcgcctctggtgtctccactgggaccccatgtccctggacttcctggtccccctcctggctgcccttctcctcttcctctgcgcccctgccctccaccatcctggctccgtccccaccgcccagtgcagccctggtgggggacttgaggttctgggtggcggccaagatgtcggcctggagctgccgggaggaatccagggcttcctcgggcctgctgtcgggggctctgtcggggacctcactgaaggcccgggggcccccggcccggtcactctggtccacgtacttcttcttggggaaggacgatgggtaataggccgaggccttctgcttctgccgggtgatgaccgcggcacagacgatgaacatcagcagaaaggccagggagcccaccacagcaatcagcatcacgtactggcggaagaagtccactatcccatccaggaagttggtggggggtgatgggccccccagggttatgggctggggccccatcgatgtggggctgagggccggggtccagggtggcgggaggctcggggaggaggccgacgagccctcggcctccccactacccgccacatcctccaggaacgtggccttcaggggcacagagcgggcgtcggtagcaggcacagaccccaggagcagcaacagaaggatgaggaggctgggggctgccgccgaaaccatggtgcccccaggacctgaggtcaggagttcaagaccagcctggccaacatgacgaaaccccatctctactaaaaagacaaaaaattagctgggcatggtggcatatacctgtaaccccaactacttgggtggctgaggcaggagaattgtttgaacctgggaggcggaggctgcagtgagctgggattacaccattgcattccagcctgggcaacagagcaagactgtctcaaaaaacaaaacgaaacaaaaaaagaaagttattcttagtaaggaacttcttgtttaatagcatttttgtttattttaaaaagtgatcagaagtagtaaactatctttgaggaaatactgtaaccccagaatatttcctcttgacttctttttgtaacaaggataatttagggatttataaagttgtaaggatttcactgtttttggactgcctataataatagcacattaaccttcacataataagaaatctggacaagttcagttacacagtatgatgaatacttgaattaggaacattgtggaaaatttgctttagagaatcaaggcagtagtttggtatttggtgcttattaaaaatgtggtttgttttgaactggaagcaagttgaccaaggacttatgactaatgtgatgctaagttccacttggccccttttaaaaacgtgtatgtgccttttgaagatacacaaaacactgaggattttagttttgaaatcaaagactattaaaggagctgtacagaggtaaaaaaataaatgtggaacattattaacttactttgtgtctaggaacaatggattttgtatctgatttaaaatgccaacactgttttgtctctgttcattttttctgtgaggatacttaaggttattattcctgtctgtttcctgtactcccctagtcatgagcacttgaagtacaaggtgtctccccctaggtgcaattaggttgtttctttgtttttagtttcaattctatgtgcatagcaggaatgctccacaggaatggcttctgacaataatctgtcctgttgattttgttttccttgcccatgacttgaacaactgtgttttaaagtactgtagtctagtaggtaactttgtggcaaaaattttcaatataatacattctgaaacaatagttgctgccttgcaaaggtaatctctcattttaaaattggacagtattaatgaaggggaaatatacaatttatttctattgagtggtagaactatatgtctggtcccttgctgctcttgtttaggccactatcatagatatatttcaaatattgtactactcagtgttaagtattgaatgactgtttccctttccttcaaggcctagagtatattctgaaaatttaggaatgaggaagaaatcttaatacttccttccttaacatacaacatgagtcccgagaataattgatagtagcaagagaaaactatgtcagtaacatgttgctttgtataaaaatcttatttataaatgtgaagctttttgatgccatcaaaacttattaaaaaataggatttacttttttctaattctgacctaagaaaaataatgagaacaagctgttgcaagctcttttgtagtctattgaatattttatagatattcaaaatttcctacaaactataattttttccatgatttagcagtgagtgattttctagctttggctcttattaggtattgtaaatagtagggttatatcgatatcagcttttgtgatggcattgtggtcatcagcttcatgacattttacccatttgcagtgatcctgtgtaaaactgccaaggaaagtaattacctgtaggagtttgctgagcttgaagagtgaaaactgttgtgaatgagcctgatcataaaacggaccaggccattcattattcctcaagtgttaatatactgacttatgcagtattcaaaccatctagtgcaatgtttttgtttttgttttttttttggtaacacaggtgcagtgtattatagaaaaaataaaaactacaatcattagcagttttaatactgctgtgtcagttttgtaaaaaatgtacattatgtcttttgacatgttgaattttaaactagggaaatgacattgtaaatcatagtagcctcttttaatttaatatgaaaaatgccactatattgaaagtacttaatgtattgtatatatttctctactttggttctagctattttatatgattgacatgttatttaaaagataactgccttgaacttttggagacttgtactgtaaataaagaaatcttaacaataaactcagaatctacttactcca

SEQ ID NO: 579 - DNA, 1484 bp, Homo sapiens
  misc_feature (1264)..(1264): second gene starts at position 1264
tcgtttcattttctccattttatttgtcaatataaaaatactcaaatatttacaacaaataaatacgcggggacacaataagttacactgttaggagccctcctcctagggctggaagagagtatgccattgtccacagcaggcccaccctctcccttctctcccctcacacagcctttcccagccctgtacaggaagaaggcaagtataaaataccactgaaccccggggccaagtgggaggccccacccacccttccccccaaacacacaggaggctccatctccctccccccaccctgaaaacattcacagccctaggagcaggactaggcccaccccaagccctgcactccctctgaaggggcacagcaccctgtccaccccacctccatatgtacatcgctgcccgacactcggggcagtgggggtaggagagacaaagtgatacgaccccttccccttcatagctccaatgactcaccaggaggacccaggccaagggaagacttgacagaaacaggaaggctatgccacaagcgcgcacgcgcgtgcacacacacatacacacacacacaaacacatgtgcaaatacagacaaacacacatcttgaaacttctgccttgaaaagttttggcggctggggtcccgcgtgtctgtgattcacagagaggaggaagatgccttctgcgaggctggtgccctggtgagccacaccaagtggcagtgcccgtgctgagcagagcaggtcctcatggccgggtgggtgctgggcagtatctgtcccagacagagcaggtgcccgtgccatgtccctgaggtagctggtgcctgtgcaaaagtaggagctacacctcccacgcttcccgccgacgcggtgggggttcccctcatactgatgactcctcggggttggagtcgggcagtggctggcgttgctgcagtttgcgtctcagttcatccgcgagctcaggcagggggtgcccgagccctccccggtcctcccctcctagttgtaagcgcacgtaaccattggcatttgagttccgcccaccccccaggtgaagccgagttggagaaggcagaggctggcctgggatgcctggaggtggcgaagggggccccccaccgggctggcaccgggcatgcccaggtactatcttaagggagccatctgaatagtagtaaccgacaggatcccaaagtttctcatctggttcaggacagggccggaaggggggactggtgggctccttgggcagcaagaagggtgtgaaccttcctggggctgctgtggacttgcctgctgtgtcggagaaggacatccaggatctgaagtttggggtcgagcaggatgttgatatggtgtttgcgtcattcatccgcaaggcatctgatgtccatgaagttaggaaggtcctgggagagaagggaaagaacatcaagattatcagcaaaatcgagaatcatgagggggttcggag

SEQ ID NO: 580 - DNA, 1368 bp, Homo sapiens
  misc_feature (200)..(200): second gene starts at position 200
gcctccttccccgccggccgcgctccggagcctccgggccgcggtggagcgagggcccaggcgaggcgagggccgggcggcgggcgccgggccccgcggccggcacgacggagcccccgtacggccggcggcagcggttggcggcggcccccggcccccggcgcgggaagcggcggcggggcggcggcggcggtggcggcccggcgggcggctgaggaggcggaggaggcccgggtgcaggcggagcgtgaggcggcgcagtcccggcggcaggtggaagaggccgagcggctgaagcagtcggcagaggagcaggcacaggcccgggctcaggcacaggcggctgcagagaagctgcgcaaggaggccgagcaagaggcggcgcggcgggcacaggcggagcaggcggccctgcggcagaagcaggcagctgacgcggagatggagaagcataagaaattcgccgagcagacgctgcggcagaaggcgcaggtggagcaggagctgacaacactgcggctgcagctggaggagaccgaccaccagaagaacctgctggacgaggagctgcagcggctgaaggcggaggccacggaggccgcacgccagcgcagccaggtggaggaggagctcttctcggtgcgcgtgcagatggaggagctgagcaagctcaaggcacgcatcgaggctgagaaccgcgcactcatcttgcgtgacaaggacaatacgcagcgcttcctgcaggaggaggctgagaagatgaagcaggtggcggaggaggccgcgcggctgagtgtggcggcccaagaggctgcgcgactgcggcagctggcagaggaggacctggcacagcagcgggccttggcagagaagatgctcaaggagaagatgcaggcggtgcaggaggccacgcgactcaaggctgaggcggaactgctgcagcagcagaaggagcttgcgcaggagcaggcgcggcggctgcaggaggacaaggagcagatggcgcagcagctggcggaggagacgcagggcttccagcggacgctggaggccgagcggcagcggcagctggagatgagcgctgaggctgagcgcctcaagctgcgtgtggccgagatgagccgagcccaggcccgcgctgaggaggacgcccagcgcttccggaagcaggcggaggagatcggtgagaagctgcaccgcacggagctcgccacccaggagaaggtgaccctggtgcagacactggagatccagcgacagcagagtgaccatgatgccgagcgcctgcgggaggccatcgctgagctggagcgtgagaaggagaagctccaacaggaggccaaactgctgcagctcaagtctgaggag

SEQ ID NO: 581 - DNA, 6237 bp, Homo sapiens
  misc_feature (133)..(133): second gene starts at position 133
cgagcagctgatgcagctgtacagtgcgcgccagcggcggcggctgaaccggggcctgcggcggaagcagcactccctgctgaagcgcctgcgcaaggccaagaaggaggcgccgcccatggagaagccggagccggtggcgtcaaagctgccgcggcgggagccggcccgggagccggtgcgcgagccggtgcgggagccagcggtagagccggagccgctgacgctgtaggggctgtagtagcccttggtggactgcgcggcagcctccagcagccgcagccccgtgccctcctccaccatgctgcggtccagcgcgtccttataggagatcttgagcttggtcttagggcaggtgaggtacttggagtaggcgcccacgtcacgcagcttctgtgcggtgcgggcgtccaccgtgccgcgctgcagggcctcgtccaggggcacgcggcccggcgtgtcgggctcgatcaagccgccggtcaggtactgcacctccaggaagcgctggccggcctcgtagtagagccagcccttcttcagggcctgggcggccgacatcttggtcttggtgcgtgggtcctcgaagccgcagaaggccttctgggccaggttgatgcggtccaccatgatcttgtccaccaggcccttgttgacggcgtcggtgacagggaagcgctcaccggtgctggggtcgatgatgcccccggtgcaggcctgcgcctccagcagccgctgccccgtgatgttatccaccaggttccggtgcatggcctcggtgatggacaccttctccagcgtctccgtgtccaggatgccagccacggggcccgtctcctcagtggggtctgaccaggaggccagctgggtcctggagacggcggggctgatggggtaggaggaggaggatcccaccgaggaggaacgggagcggaaaccaccggcgttgcccgagagcatgtcggcgaactcggtgatggagagcgtgccggcgcggtactggtccagtgccgagcggtcgatgaggttcttggcgatggcatcatcgatgtcgtactggcgcccggagcggcggtcgatgatcatggacttgaccacgccgtccgaggaggagatggtgatctcctcccactcgcactcctgctcggacagctccaggtacgtctggtggtcaatcaggcccttgcggtaggcctcgtacactgacatctccttgcccgtctcggggtccacgatgaccactcggcgcttgcgcacggaggacttggaggacgtcttccgctcccgcttcttctccttcagcggcaagagacacaggcccgtctgggggtcagtgatacaacgctccatcagctgcaggtaggtgaggttctcctccgtgttagggtcaaagaagcccttggtgtcgtccgaggggtcggtcaggatctcgttcatctcctcatcgaagaggccgcgcttgtaggccacctccacgggcagccggtggctctcctcagggtcgatgatgccgcccgtggcgatctgggcctccagcaggcggatgccatggtccttcaggatcaggcccttcttcatggcctggaagagggagatgagcttcccagagtaggggtccttgtacccagtgacggcgcgctcggccgacagcagcttgtccttgaactcggggcccacaatgcccatacgcacagcctcctccaccgtcagcttcagtcccttgatggggtcgatgacgtaaccggtggccgcctgcgcctccaggagctcaaaggctgtgccggggcggatgatgcccttcttcatggcctggtacaccgagagccgttccttggtggcgtccacgaagacaccagcgatgcagctggtgccttccaggaacttctgcaagttcttggtgacctcctcgatggaggtcaggccctcccgcagctgcagcgccgtggcctcgtccatgacctgcgagcgcaccagctcctccatggtgatctgcttccgcaggccacggaaggtcagcttgcgggcgtccgacagtggcaggagcagctggccggtgccgtcgtcacgacggcaccgcctgagcagctgcgtgtagctgaggcgctcgtcggtggacgggtccacgtagctgcgcacctcgctgggctctgacagctggtcgtgcgtgtccttgttgaggtagccacgctggtaagccacctccaggggaaggtggaagcccaggcgggggtccacgatgccgccggtggccagctgggcatccagcagccgcagggcctcctcagtagggatcagctccttcttcatggcctggaagagcgagatggtctgctcggtgtaggggtcacggtagccggtgaccgcccgctcagccgagagcaggcggtcgtgcagctcgggccccacgaggcccttccgcacagcctcatccacagtcagccgctcccccttcaccgggtccagcaggaagcctgtggctgcctgtgcctccagcagcaggcgggccacctcggcactcagcagccctttcttgagagcctggtagatgctcagtgtctgcctggaaccgggcaggtagacaccagccacggagcccgtgccatagaggtagcaccaggcggactccgcctcgagagcctcacggaggctcctggtgccctcccggagcaggttgtaggtctcgagagagatgatccgagcctcgaacaggtcctcagccgtgaggcggcggcgcacgtagtcgtaggaggccagaccctgctggcggatgatctctgtcttctcaatgatctcgatgatgatgatgatcatgcgttccttggtcacccggccggcctggaagtcagccatcagctgggcccgctgctcctcggggatcaggtccgactgcatcacctcccacagggacatggtggagccgccgtggctgccgccgccgggaatgtcgatctgtgtctcttcaaatgcccttcttgtctcctcctcagtgtacacctgcgtggtctccaccacctcagccttctccgcccctttcagtggcagaaggcgcaagcccgtctcggggtcctccacgcaccgctccagcagctgcctgtacgtgaggttctcatgcgtgttggggtcaaagaagcccttggtgtcgtcgctggggtccgccaggacgcggttcatctcctcactgaagtagccgcgctggtaggccacgtccacaggcacgcggtggctgtgcacggggtcgatgatgccgcccgtggcgatctgggcctccagcaggcggatgccgtgctgccggagaaccaggcccttctgcatggcctggaagagggagatggtgctgcccgagtaggggtctctgtagccggtgacggccttctcggcagacagcagctgctcgtgaagctcggggcccaccacgcccgccttcacggcctcgtggacatacaggcgctggttccgcacggggtccaccaggaagccagtggccgcctgcgcctccagcaggagcgcagccgttgtggctctcagcaggccccggcgcatggcctcgtagatggacaccttctccttggtgtcctccaggtagatgccggcgaggcagccactgccctgcagcagcgtccgcacggagcccagctccgaaaggtccttgaccgtcgtcttgccgtccttgagctgctcaaactgggctctgctgaggaccccggaagccaggagctcgctggctggcacaggggcacggaggccgctgaaggacagcctctcctgccgcagggtctccacctcctccacgatggtaatgagaatcttgatgaccttctccacggtgaccttgcccgtgcggaactgacgcaacagctcctgccgctgctccgcagtgaagtactcagagctgatgagctcccacaccgtcaccgtcctgcccttgaagccacccacggggacctcaaccggggtcttttcaaaggtctcacgggcctgcagctctgagtagagctcctcctgccgggcccgagcagccttttctgagagcggcagcaggctcagcccggtcagctggtcgggccggcaccgctgctggagctcgccgtaggtggccggctcccctgtgctggggtcactgtaggccttggcgtcggcccttggtgccgacagggccctgctggtctcctcatccaggcagcctcgggcgcaggcgacatccaggggcacgcggtggctcttgctggggtccacgatgccgcccgtggacagctgggcgtccaacaggcgcaggccctgctcccggggaatgaggcccttcttcagggcctggaacagggagacgctctgccctgtgtaggggtccctgtaccctgtcacagccttctcggctgatagcagcttctcatgaaactcggggcccaccaggccagcacgcactgcctcgtccacggtcagccgggcgctggtggcggggtcgatgatgtgcccggtgccggcctgggcttccaacagggccacggccatgtcggatggcagcaggtctttcttcagggcattgtagatactcagcttctgccccgcctcctccagccatacacccgcgatgacgttggcaccccggagagcccgccgcacagtgtccacctcggctacgtctcgcacagagcgctcacctcgctgcagctgctggtagagctcgcggtcgatgaccctgctctccagcagctcggcggctggcaccaggctgcgcaggccctcaaagcaaagccggcccttctgctcctgctcctccaccaccgtgatgatgatcttgatgatcttctccactgtgatccggcccgtgcggaactgccgcagcaggtcccgccgctgctctgccgtgaagtattccgagttgatgatctcccaaatggtcaccgtcttgccctggaacttgccgaacggcgcagacacggtggccttctcaaagacgtcccgggcctcggagtcagtgtagaccagctccccgcccttggcagccttatccgtgagtggcagaaggcacaggcccgtctcggggtcctccacgcagcgctccagtagctgcaggtacgtgaggttctcgtgcgtgttggggtcaaagaagcccttggtgtcgtcgctggggtccgccaggacgcggttcatctcctcgtcgaagtagccgcgccggtaggccacgtccacgggcacgcggtggctgtgcacggggtcgataacgccgcccgtggcgatctgggcctccagcaggcggatgccgtgctcccggacgatgaggcccttctgcatggcttggaagagagagatctgctggccagtgtaggggtccttgtagccagtgacggcgcgctcggccgacagcagcttgtggtgcagctcggggcccaccacaccctccttcacagcctcgttgacggtcagccgccggttccgcacagggtccagcaggaagcctgaggccgcctgcgcctccagcaggatgagggccgtgccgggactcagcagctgcctctgcagggcggcgtaaacactcagcttctcattggtggccttcagcaacagccctgcgatactgctgcggccctgcaggtagtggcgcacgtcttcccgccgtgcgagctcgtccaccgtggtgtggccctgcgccaaccgctgcagctcctccgcactcaggatgccggcctcctgcagcctctgagctgacaccttccgccgcaggccatcgaagctgtgctccggctctgcctctgccgcggggccatcaagtgcatcccggccattgggcagggtctttgtggcagccacctgcgaggcagtgacctcctctgagtgcgccagcgcggcccggtgctgctcctccaggagctgcagctgctcacgcagcctctggttctcctcagccagcagctcctcctgctgccgccgctgctgctccagctgctgcagctcctcctgcttgcgccgcacgccctcctcggcctcatgctgccgccgccgcgcctcctccatgctggccaccagccgctgccgttcctgctccatctgctgctgctgccgctgctgctcctcacgcagctgctgtgccttggccacctcgtcctggaagagctgctccagcttggccttctcctgctcgatgaagcgctcccgctgtagcaggctgtccttttcagagaggaagctttgctgcagggcctgcgtctcctgcagcagctgctcctgctgcaccgtctgcat

SEQ ID NO: 582 - DNA, 3990 bp, Homo sapiens
  misc_feature (3639)..(3639): second gene starts at position 3639
tacatttaactttttattactttttaaaaatccaaattcagataaattaacacactaggttagaacctcaattgtatttgatacattatatactggatttctattactaaaaagccagttggaatatggcctatacgaaccaaagagtgtatacaaaatggaagtggtcatcaggcaataattgtttccttggaactctgcaccgactgtccatgctctgtggggacttacacattcaagtttgacagttgaaaaaccaactggagctgcttttccaagaatgttctgttgtccttcaaatagaattccatgttatttctttcttgccttaagctcttatatctttcaaatgacctaagctgatgaactggagtaaacacaaactgctgcagttatcaattagcaagcctagttcaccaatacttcaaaataaacagacttcacaagtttatttccattcctaacagtggaataataacttaattttgtttacttttgtctttgtagatttctgtctgcagctccagtaagaatgccaaatcagatggcttttaggaaatgctcataggagagaactagagttattcctcacactgaatttaagtcttaccagatttctgcaggttcatatgttaacgttctgatctagcctacctgtaagtctagtttatttctgtacacacttccaaatactcttcataaattttcacttctgactgaaatataacaccttgattgatagtttcataactatagaattttagtgaagatataaaacattaatgaatacttgtgttttaatacatcactactcctatttattacatgttccaataaaccaatagaatgaagcactaagacacggtgaaatctaaacttaaaacccagatggaactgccatatagattacaaatgggtctccccaccacagaattcatatacaaaagcccttcggtatgtagcttttcctgaacaaatacattaatacactttttgttttttacatttgtaaaaattcaaggttttaataacatttctttgcaagacatttggtataaggtggttaataaatattaggaaacaaacactgtaccaaaatggatatgacttgtgaataaaccctaaataaagtggcttttggaagaactggattttgcagcaaccaactttataaagaggtccatccactctcaatggaaaacacccaagcataccattcactaggttcggatatcaccataatataatgaattctaagagtatggggtttgatttatgggcaaccccagtacaatctaggagcccaacatgatgaaaaatactaaaagaatgcttcaccatccctcaggccattacatttccaccttatcctactcttgtattaggatatatgtatacaaatgtcaactactaatgtagttaaatttcaggagaagcatgcttaaagatacacaaggaatgtttagccttagtttttgatagtattatccaaagtgtgagttgaaagaaattaagcaaataatgttaacaaacgaaagacagatacacagcattagtgggggtataaaaacctcacctttcaattaacttgaataatgttctattttctattctacaactgagcgctagggagctaaactatttgtgaattacatcttctttaagaagacacacacacacgcacacacatacatacacttattcaacccctctatgcagccaaaaaccaatacaagtccttttctaaaagactttaaaggtgattaatattcatttaatgctcttaatgtatttggaaatcagaaaattatttttcaccacagattccaaagaacttcaaatagagctcaatttagtagaaagaattggtgtacctgaaagcatttaacccacacattttcaataaaccctacatcttacctgcaagattcatatcatgagaaacaaatttcattttattaagacaaaaccttactgtccaatttatactcccatcagacagactatgtattggtatgttaaaagtacttttgaataaaagtggtgagaaagaaaccaaaaaagtactttatatatagttaaaaggttacataatataggcaactaaatattaacttttagtttcttttttataagatcttaaaggcaagtaagaaggaagagaaaatggaagtaccaataaattatatttaatataccattttggcttcagaagaggatttacctacagcttctgatcaaatttgttggatcatatcaatcatacttaagtggtaagaaatcatacttttcaccttttaaaggacttacatgtcacaatataggatgtagagtccatcaatagataggtacatattttgtaatgaaaacatcttgtgtaactattaattgcatgattttcatattaaggtttaaatacaggtgttttgagtctttctaaaaataacaatataaagtattgttttaggtggtcatttgcatagcaaactattaaactagaaactcagtggttctaggaaaacttcatattatgaatagttccagaaaaatgtattcaaatcacttctcttacaaaactgtaacctttatttgttgatccaacagtacgttaaccacttttaccccatccccactttacacggtacaccaacctgaacagattttgtgccacaatttcattcaaagggtttgtcattcactttatgattgtgctggataatctagatgtaagcaagtctggagattttaaaatacgggtcccctgtatgagagtagcatagtttatagcatacttttaaaaatggcattcggtaattttgccttctggacagaaagatatcttcaaattgcaaacacatctatttccacaaaacaatttggtcaggaaattttatttgaacattctaaagcaataatgctttagatgttacttaagtgtcccagacaggattaacaaaattaagtgtctctaaattacaaatttggctcctgtaggagtctcagaaaataaacagaagaaaacaacccccctcccaaaagaagtatgacacacacattttgaagaaaccccaatgtttcatgcaatggtaggcaagatgtaaaagcccacccaaatcacacatttctacaccaatcatcataagaaaaaagtactctgtagtcgatctgtacatccaaatgcatttgggaatctacacctacgttacattatttaatgttatatacatttattacccaccccccttgtttttaataatttcttatgtaaaaccttcattcaaacccaaaagatttaagactaacttggggggaaaaaagataatcactttagacattcagttaaaatgtagtttatctaaatctcaaaatgtttaataaaaacaagtatcttctccatttaacactttgctttctaactgtacagtaaattgcattgtagagagtacacttctgtcttcaaactgtatcttctttggatggaattaagatgtaactgtatagttttaagataaataaatgggaagttggtccaactaagatgacagcagatatattacatgcaggatttaatattttctaattctctcttttaaaaaaaaggatgctgttggattgggaaaaaaaaaaagtcaaaaaagccattatctctccatgggaagctaagttataaaaataggtgcttggtgtacaaaactttttatatcaaaaggctttgcacatttctatatgagtgggtttactggtaaattatgttattttttacaactaattttgtactctcagaatgtttgtcatatgcttcttgcaatgcatattttttaatctcaaacgtttcaataaaaccatttttcagatataaagagaattacttcaaattgagtaattcagaaaaactcaagatttaagttaaaaagtggtttggacttgggaacaggactttatacctcttttactgtaacaagtactcattaaaggaaattgaatgaaatt

SEQ ID NO: 583 - DNA, 5612 bp, Homo sapiens
  misc_feature (831)..(831): second gene starts at position 831
ttcatttgaaaactttttcaattttctaatttaatagaaataaccaaaacaatgtggctttcaaacaagggtttaaaactaatctaatacaacttctacaacacattccagagcattataacaagaattatttacaggcagctaatgtattaaataaccatgaaaagaaaaaacttgcttttattacacaccagcaaaaacacaggaacgaaacaattagaaactgcaaccttgttttaaaaaattaaatatgattatttagagaatacgataccacagaaacagcactttttaagaatcatattgaagggcagttaactatgtgcaaaaataatagtactagtagtaataataataatgaggggaggagaccaattgaaatactggaagcaaggaactagtaaggctgtgaatttaaccctttcgtgtgtaggtatgtctacataaaaaattaacaggctttcaaattgcacaaatctttttttataggcttatgtatatgtttcactgtgttttaaaatgtagtagatgcctacatttttcagaacaaggagcagacatgcattccatccttaagattgaaatttaggccacacttgaaagggaatattgcagtggcacttacaaaatcattttggtgccttcccacacataaatttggtgaatttaaaagaggagcatttttaattttaaagatcactttctagaaaagggctaaacttaactttgtacactttgtagtttgatatgacaaatatatccaaattaacttatttttgaagatagttttgtttcttcgatacaataaaaaatatataaaggaccacataggcaaacacaaggaactaagatgaaagaaatgctatacatgcattttgaccaagtaaaagaaaccattatattcaagagtacgtgttgaatctgaaatgtctatgtaaactgtggcatataaatttttttccttaaaaaagtaccttcaatttttttactcaaacacttacttttaaaaaaatatgcaactttccccaatttttaaaataaaatgccacaatatagtgtcattacttccagcatacatttaaatttcttaatttttaaaagatagactgggtgatatgcatacaaactttcctataaaatcaccatccaggagaggattctgacatgctattaggcaacagactcaaagcagtgttattgctttatcaaggaggagattaactgtgagggaaaaaaaattaaatatccaggtccggtacatgatcaaactgtattacaccttgaaaatcttgagtcaccttcagcagatcattaacatagatggtacagaaattaagaattcatggtatgaattaagaatctgttttaactaagggagttgggtgcgtggattttttataaaactactcactgatccgatgctgagtatgcaaataagcagtgctgattttgacaagaaatgagatttttatatttcacatgttgtacatgaatgggggtggatatgggacgtaaaagccaagggagacggggccacagcatctactcccattttggatagtaagagaccatttaataacatacagtaggccacaatccaagggcatagttggaagacctgaatctattatcttattaacactaatcactaataattacatggcaggatacctgctgaggtaattgataaatctacaatttgcacacttataaaccttttacttctatttaaaagcattatttatttcaattaactaaaaattccaaaacttatcacaaaaaatgagacaactgacttagcattacctaaaattcccttatgttaagatacagaagtcagaaagtaccaacttgttgatccaaaaataataatttcaatagtggatccaatgccttatcatttctctgtagtaatggtttgatgtttccatatagagcacgacctacaatctaaccatactttagaactttcacatgctttgcctcataaagcaattccttcactcagtgaattggctgagccaagtgctgaaaacacaaatttaggtcagcggaacagactgagcaacactttgttcttagttttctgatggaagaagtaaattgaagtacagcaaaaactttaaaagcttttaagaaaacattattatgtggacttttctccaaatcttctaaaatactgccatttaaaaaacaaatacaaatgtgagagagtataaaaacaaactgccttcagggactgacagatacaattttgtctttttaaaacataaactaataggaaaacatatatctaaatatcaatttaagtttttatactttttaaccataggtatattagagctgaaaaaatcagcttagaaacacaacgatcagtgtgcaagaaaaaagctttaataaaaaatctaaagtgaataccttaatttaatggtggtatgttgatagctattaatagtaattcctcagcagtatacattatcttaacagaagtggaggctattaaatgttgacaaaaaagtggcttttaaattgctttaaccaatcttaaaaccaaaaaaacctaaaaactctatctaacatgtaattttaaggaaacacaattattttttaaggccccaaatactgaaaaatatttacttaaaatgtttctcccctcagttggcagaatctatttatgactcattatctacaatttttttaaaaggatccatttgaagagcaatacaaaatattagaactcaaaggcctgacaaaatgaagttatactgctgctattcctcactttccaaaaatgtgcccttagatatatgtctacttacaaactgaaatcatggattttgtgaaaaaagagggaaattggcataggcataagtatttttaaataattttctccctcttattaaaaaacatttttaggaatttaaaatttgagtaaaatgtttcaacagtttggtatattttcaacggcttaaattattttttaaaaattgaaagaaaagtgaaaaggaagccaggaataaagtaaatcaatagtaataataaaatcaatactctttaaatacacaaccagaaagcctgaatcatattcctgtttacccccaccccttgttaagaaaagaaaaacaacccaaaggaatttgtataataatttctttagagcactttatttgattcaatatgcattaaaaaatattgacctcttagacaattacgtgaaataattttctgagtagtctactctctgaactgcttaaatgaatttttaaaaaggcaaataaatgatttgccacaaatctgctgacttctgaaaaatatctaacagcaaattcttctattttggtctctgaatattctaatgtgtccatacaaaagtaggactaaaatctttaatcaaacaaaagagaagcctgtaacagtgtagaacacacattttgaatctgagcatcacaaatgaagaaaagaaaaatgaaccagagccaagttggtttatcggcctcgggtgctgtaattggggtggtaaaggtgggtttactccagtaaccattcaagtggggattggctcattttcaggatttacttacaggtctcttctaagtcctttaagcccccagtccatgcaaatgtcccacttggtggacagatgagtaatctaaccccaccgggtttatttcaatatttcgatatttcaataataagctgcttctgaagattttttgagaagtctgttctctattaaaataagatagaacctcaaaatatgaatgtgaacattagaaatagacagcatatattacaaatccattcttgataggaacattagtaagaatacacattagcttaaaaaacaggctcagcaaatgttgctgatctgccaaaagttttagttcactatttacaaataagacaaagtgaaatacagaaaattttacacatttggtagttgacagatactgtttgccaatagtggtctatcagaaaactgacatgaaggaagactggaaaagagccagttgtcaccttctcaaatttaaatgtacagaaaactagattaattttgaaacaaacattctgcctttcatgggaataactgtatgatcacatgatttgattgggaagtacaattgtgaggaagtgttttctggaaacaactactataactctaaataatccactaatgaaaagttaccatttttgtttcagtagaccattgaagttgattaaatgataactagtggtagtgtttcctaaaccctaagtatgagtagaaaataaaaccattgctgagttctttatatcaatttaaaaactaagacccaacagcataaaaatgagaaaaaacataatggcatgattcaatgcaaatctgcactgacattaaagtagaatctgagctacttgggtttttaactagaaaacaacctgatatgtatgtgtgtgaagggggagggttaaaagttgttttaataactgtgcgacctagtccaaaaagaaaatttatcaagtgacacgagtctcaagtatttactcgtataccaagtatcctgcaccaatcaatagcacacaatcatcaatatttgccatttctaacaatcagagaatcatctccattagaacagaaatcctcaaatcatttcacttttgctttttgctttgaaacttgcaaacagacttctctccccctttcttgacaagaatgtgtttctgtccattatttcaatctaatactgtgtaaaagctatcagcttcttcaaggaggtgcccactgtaggcaggatattccagcaacacttaaaagttttctgggttttttgtgttttttttttttttttcattcaatttcctttaatgagtacttgttacagtaaaagaggtataaagtcctgttcccaagtccaaaccactttttaacttaaatcttgagtttttctgaattactcaatttgaagtaattctctttatatctgaaaaatggttttattgaaacgtttgagattaaaaaatatgcattgcaagaagcatatgacaaacattctgagagtacaaaattagttgtaaaaaataacataatttaccagtaaacccactcatatagaaatgtgcaaagccttttgatataaaaagttttgtacaccaagcacctatttttataacttagcttcccatggagagataatggcttgcgtgcattttatgtatccataacatacatacaaggctcggtcttttcaatgggataacagttcacaactcttcgatttgaattgtaatgaatctggtgacaaggatttttctctaatggattccaaagttagccagaacttttaatgtcaagatgaaaaagggtgtaaggtgttatattttcttcaattcctttaccacaggaggctaactccacaatttccctcatgtttctcattcagaaaaaaaaatattaaatttgtgttcagaattatttgatgattgcttctttgtgctgatgtttcagttcctgaagtcaacttggctctcacaattttctaaggtcaggttattgacttagggttgtataaacatttttttctggtttttggattttcactgagaacgaccttcccttaatcgtcttctagatc

SEQ ID NO: 584 - DNA, 314 bp, Homo sapiens
  misc_feature (162)..(162): second gene starts at position 162
cttgagagggtttacatttgttctgtgatttactggacggcttgcctggagtgcaggttgcgggaggattcgacagcttctcttccattttggcttccttcacatactggcacgatttccccaacagcacgatgctattaagtactttcagggatatcaacaccatgaggaagacgcctccggtgttggagacacagcctcgggtggtcggggtggcatgcctgtcatagccgcacacgccacacagtaagcccaggtagtaaaaaatcacgatgagggtcagcagagagcagatgaccaggccacccagccac

SEQ ID NO: 585 - DNA, 334 bp, Homo sapiens
  misc_feature (183)..(183): second gene starts at position 183
aagagtctgcgggaccggcagctgtacttcatctcccagcgggccgagcgctgaaggcagcggcgcggcgcctttgtggtagcagtggccccgcgcggaggaagttccggtgtccgcggcgctgggtcggtggcggaggctgaggagaaggaggagcgggccgtggaggcttcgccgcctagacatctgactgttggtgtgagaccagtgctcctggtggtgtgccctgagccatggaggcgcctttgcagacagagatggtggagctggtgcccaatggcaaacactcagaggggctgctcccggtcatcacccccatggcaggcaaccagag

SEQ ID NO: 586 - DNA, 897 bp, Homo sapiens
  misc_feature (739)..(739): second gene starts at position 739
tcaggtgtttgcaactgcgttttattgaaagaaagagtggaggggttaacatggggcccacctcacaacccactcttcacccccaaaatcacgcagggatgggactcaggaaagggaagcatgtgtgtgttgaataggagccctaactgtagttacttctttcacagcagggaaggaagagggaagaggcagctgtggagaggatgaggttgagggaggtggggtatctcgctgctctgaccttaggtagagtcctccacagaagcatcaaagtggactggcacatatgggctcccttcacaggccacaatgatgtgtctctccttcgggctggtccggtatgcacagttggggtacctggagccgtttgtcaggcggcagtctgtgatgtgcatgctggagttgctcttgtagcagttgccctgcccgttcttgcaggtgaccttttcctggaaacagacattctggacatctaccaggggctcgtgcacaaaggtgttcactggtttgcaccgcccctgtgtcatattccggcgcctcatcatttggttacagtaggtggagctgctgctgggggaactgtctgagtccatatgctgccgctggaatttcttggcccgggattccttgcccagggaaggctggacccagcccagcaccagcagtatcaggacaagcagaaggagccggacaagagacttctccagagccatggtggcctcactttcccagaaaagcccttgctgggaaacaggagccaaggggcttggagtgtcctcttccagtggccggagagactggacccctgtctttcctgggggtggtggaatcttgaatattttgtccatttggcccacatgttccagaagatgggaggccccatgctctgcaatgaac

SEQ ID NO: 587 - DNA, 547 bp, Homo sapiens
  misc_feature (387)..(387): second gene starts at position 387
ctgatatggcggcggcggctcctgatccggctccgtcccctcgccaaagctagcccggtcggactgagactcgtgaagcagggagatgtcatccgaggtgggggatttgaggcagttccccatcttccggagctggggtgcgtgatctgggggaggagaaagcagcggtggggtcgttcgcacactccgcggtccgcctcggttggcgaggtggggtcgggcgacaggccggggatcaggcggaggcgactccaccgccccacggtgccgccgaggggccgctcatgccagcccccggggttgggggatcaaggctgggccgcgggctccgctggggtcgcggcgttcgcctcctgcgaggcagcgatgggggggggggggcggggggggcgccgtgggaggcttctggatggccgaggtgcagaagctcaagatggagcacaggcttccccagttctgctcacactgaacctgcacgctgtgggtgatggcctccttcacctcctccccacaggtcagcagcaagttcacgaggtccacgtagggt

SEQ ID NO: 588 - DNA, 88 bp, Homo sapiens
  misc_feature (65)..(65): second gene starts at position 65
cttgtactgtagcgtgcgcggctcaatcatctccaggggccgcccgttcaccttgatgagaccaatgaaatcgccaatgccaactccc

SEQ ID NO: 589 - DNA, 348 bp, Homo sapiens
  misc_feature (62)..(62): second gene starts at position 62
cttgtactgtagcgtgcgcggctcaatcatctccaggggccgcccgttcaccttgatgagaccattgagcaggagaagcggagtgaaatttcctaagatcctggaggatttcctacccccgtcctcttcgagaccccagtcgtgatgtggaggaagagccacctgcaagatggacacgagccacaagctgcactgtgaacctgggcactccgcgccgatgccaccggcctgtgggtctctgaagggacccccccccaatcggactgccaaattctccggtttgccccgggatattatagaaaattatttgtatgaataatgaaaataaaacacacctcgtggcatggc

SEQ ID NO: 590 - DNA, 392 bp, Homo sapiens
  misc_feature (282)..(282): second gene starts at position 282
cttggagatgagctcgtcatgattggccaggtgtgctctgcagtggatacagctgtacgttcggtgacagttcggcagatacgcttggaaagttttggactttgtcattttcaccatctctcctgggcactcctcactcagctcagggctggttctggaagaaccgtggctctgctggcctctctgacaaaagcaacactggaaaatgcacgcaagagccgtcgttgtccaggagggcgtgtggcactgtccacacagctgggacgagagaaaaacgtaacctgtagtgacagtcagctcgaacacagagtttccactcgtgctggaaaacccaccactcctctttccattcttcgaagaccttccgtagtaatcgctgctcatagtaaaat

SEQ ID NO: 591 - DNA, 105 bp, Homo sapiens
  misc_feature (49)..(49): second gene starts at position 49
ctccatgaagtccttcctctggctggagacccgcagggccgccgggagccgcgaggagccgagagaggaccacagaccaatccccgccccgcgcggcgtctgagc

SEQ ID NO: 592 - DNA, 4822 bp, Homo sapiens
  misc_feature (553)..(553): second gene starts at position 553
ggccaggggcgggtccgcagctggcggcgccggggcccggggcggaggctgtggcagcagctgcagcggcggcggcggcggcagcgccaggagctgctacagcagaggcggaggttgctcctgtacgcgtacgggccgctcggccggagccgcagcccggaggcgccgggcggtgcgctgggagctgctggtgctgctgctgctgctgctgcccaccctccgccgcccgggcccccgctgccgcccgggccccggctgccgtctgcgcccccgtcgaccccgcccgcgagtgcgccccagccaggacgccgcccccggccgggtctccacttcttggccgcaccttccatgacagcgcccgcgagaagatggctgcgaagggcgcgcacggctcctacctgaaggtggagagcgagctggagcgctgccgcgccgagggccactgggaccgcatgccggagctggtccggcagctgcagacgctgagcatgcccggcggcggaggtaacaggcgaggcagcccgagcgcagcgttcacctttccggacaccgattttataatcaatggataaagtgggaaaaatgtggaataacttcaaatacaggtgtcagaatctcttcggtcatgagggaggaagccgtagtgaaaatgtggacatgaactccaacagatgtttgtctgtcaaagagaaaaacatcagcataggagactcaactcctcagcaacaaagcagtcccttaagagaaaatattgccttacaactgggattaagcccttcgaagaattcttcaaggagaaatcaaaattgtgccacagaaatccctcaaattgttgaaataagcatcgaaaaggataatgattcttgtgttaccccaggaacaagacttgcacgaagagattcctactctcgacatgctccatggggtgggaagaaaaaacattcctgttctacaaagacccagagttcattggatgctgataaaaagtttggtagaactcgaagtggacttcaaaggagagagaggcgctacggcgtaagttctgtacacgacatggacagtgtttccagcagaactgtaggaagtcgctctctaagacagaggttgcaggatactgtgggcttgtgttttcccatgagaacttacagcaagcagtcaaagcctctcttttccaataaaagaaaaatccatctctctgaattaatgcttgagaaatgcccttttcctgctggctcagatttagcccaaaaatggcatttgattaaacagcatacagctcctgtgagcccacattcaacattttttgatacatttgatccatctttggtttctacagaagatgaagaagataggcttagagagagaaggcggcttagtattgaagaaggggttgatccccctcccaatgcacaaatacatacatttgaagctactgcacaggttaatccattatataaactgggaccaaaattagctcctggaatgactgaaataagtggggacagttctgcaattccacaagctaattgtgactcggaagaggatacaaccaccctgtgtttgcagtcacggaggcagaagcagcgtcagatatctggagacagccatacccatgttagcagacagggagcttggaaagtccacacacagattgattacatacactgcctcgtgcctgatttgcttcaaattacagggaatccctgttactggggagtgatggaccgttatgaagcagaagcccttctcgaagggaaacctgaaggcacgtttttgctcagggactctgcgcaagaggactacctcttctctgtgagcttccgccgctacaacagatccctgcatgcccgaattgagcagtggaatcacaactttagtttcgacgcccatgacccgtgtgtatttcactcctccactgtaacgggacttttagaacattataaagatcccagttcgtgcatgttttttgaaccattgcttactatatcactaaataggactttcccttttagcctgcagtatatctgtcgcgcggtaatctgcaggtgcactacgtatgatggaattgatgggctccctctaccctcaatgttacaggattttttaaaagagtatcattataaacaaaaagttagagttcgctggttggaacgagaaccagtcaaggcaaagtaaactctccggtccccaaaggttgttaactaggtccgctttcatgtgcatcagacagtacacctatagcaagcacacgtagcagtgttaggctttttcatacagtatgtaagcttagtgttagtatctgtcagatgctacctgctgttacttattcagataaacatggtgcctattggaacaatagcggatagagctacaggtgttcagtaagactacaaaaacattttgcctatttcgctaacagtttggtttttaatggctgtggtatttgagtgaggcaactctggggcatttgttatgaagaattctatttcttactgaagaacaaattattaatattggatgagtatttcaacagtgtgactaatgtttgaaattattttttctaagagtttttctataaccttccaaaagtcgtgatgtttgtagttactataaatcaagctttggaagtccaaaaagaataaaagactgccttccttttagaaaaaaatgcaattttctggccacaagggcatagtgcagttcacttacgtgttgatgtagtttataatcagacgccttttctcttctgcaaaaggtactgttaagtaaaccagattttctaaataggcattcttaaaatttcagacttacaaagctagtagtagaattttattgaaaggcctaggtattaattttttaaatgagtgctttaacttaaaacaggcgtttggaatagctgctgcaatgtagtcttgtgtgtgatttttttttaagttgatgtgcagtctaattgttgtttcataaaagttggatctgttcctatgcccaggatgattttgtgaaccgtgaagtacgtgagactagaagacgcccaaacaagtcagataatagtaactacaatggttgctgatgttgagattattgttgaactataattaataatttggatggcagaatttatctcttttttgtaaactctcataactgaattgcttaagtataatttatagaatttcagtgcagttcattcttaatggaaaatctgaaacctaaattgcagatttaaaaggtactgtacaaccattatatctgtaaataacttagcacctttttgtcacttagaataatatgtactactacttgagtgagcgcttttggaagttatatcaagttctagtgtttgcttcttagtaactgaactgaatttacagttctgtcctagacattttgcactaaagtagccgaatccactctcatgtcttttcgttaatgtgctctgtaccactggtgagtgctccatagtttccttacctgctgctacagaatgttattttacatccctatggctattgccaaggctacaaaaaaggaaagctatatttgtatgcaacactaaccttttgactgctaatgtatgtttctgcttgctgtgccttgttatggctgctttttttgtgctaataaagtatgtttggtgttctccttgtatatctgctgttttatacatttgcaacaatttctcttgtaaatggaatggtttggggtttttaaataagcattaactaacaacctttctatagttaatgcagagttaatgaacagtctaatattgacttatcagaataagctaactctaaatttaatgctctacatcttatcagtcataattatatatactgtggaacagtatctgtagttactgcaaattactgtacagtttaggttataacagaaaactgacagagaagtaataaacctattgatttctctgcttataaatgaaagattgaaactatccaatgacatattatagtaaatgagtatctgtaacctcccactgcatcagaagcaggttaaatgaagtcttgtgaatttgtaatagatcagtaccatttattggtttggggaccatcttaattaaaaataaatgcccaaaatgtagaactttaaccaaagacttgtcccttttaaagcaaaatggggattgaagggacttataatttctgttgtttctaattaaagtccctgaagatcatataccaaagtgtttgagaacttcatccaaacctactttaaagcattatgtgcaattaagttgttatgacataattatattgcctaattgttgggtcttttttcttgagcttataatgtacctggaaaataaacctcttgagaaaaagaaaagttcatactgattattggaaaaggactatatatgtgagcaagattgtgttttagagaggaaacttgaaactccaagaaagcacttgatgtttttatatgcttgtagcaaattgatgttctaactgtagttttatagaaagtattaatgcttttatgtatttcaaaactttcatatgttaaatggaaattgttttaaatgtgtttgagtttatgtaagcatgtatacactgtgctaaaagtcacatgtttcagtttgtgtataatattaatatgcaatttttggtttaaatttttgtcttaaaatattagtggcttacattttaaaaaagaaaaatcaccagcatgaacttgcacctaagtctatattcactgtgtccttttctgaatcccattgtagcctgtcaactaaatttgagtgttaacggtctttttaaagtgcatttaaatacaaaccaggaatttctttagaagttga

SEQ ID NO: 593 - DNA, 1262 bp, Homo sapiens
  misc_feature (286)..(286): second gene starts at position 286
ctgttgattaatcgtcaagaacaccctcggcagcccgaaagatggtggcgcggcggccaaagccatgaaccgtcttctgttgtttgcagagttgatcttggattattgcgggggggagagaaaaaggtctttcctgcatcccccccctttccctcccccacccttattaaaaaagagagagagagagagagagagagaaagagaaaggaaatagagcaaggatgtgcccggtgccgggtgggagaggggagggggtgttgttttttgtttaaaaaaaaaaaaaaggggagggtgaagaaaaggaggaacatgctaaaaaccttatgacaatcatccaaatgtgaggaaagaacaaccgattcaccaactccactttttctattttacaactttctacatctcactcttgattttggccttcctggctgaaacagcctggcagtccctagagcccctgagaagagccctggttctccaaaagacagaggaggagaagccctgcaggatgcgctgaccacttcccagagaactgacagtccgtgctcccaaaagtttgaaccaacagcctaatgtgaaaagaaactgcactgaaaggtaaaggaggaaatggtgatgaactgggcttatgtgagaatgtctatattttcataacacagccccagaatctttctctcagttacagcctcaggcaaaccacgttctggttggtgggttctgcagggatctctcccaccactgagcctctagtcccaaaaccatccttgacaacatcgtgtgtctgttacttccctttgcccacctccaggccacctggggaagcccacaggcagccaagaccctgaaatgaaatgaacacaaagtctgactcggtaagtattagtttcaaacagaacactaaagagaaaagttgaagctgcaatgtgtgtttaaggcagagcccagcagatccgtgtccacccatgtgccaataagacaatgggcaaagctacaaatggcaagagaaaaatgggactattaatgcgtgtggaaaaggccttaatagttaagttacagctaagaatgtcatgtcttgggttagaattttcatttttagcaccgttaatgtattcacttaaatctatgttagcaccttgtctccaggcagaacaacaaaccatccaaacattttaaacattgggggaaacacgaaggggagggttaaagagagaatccggtactgtggaaggagtggatttagatcacaagatccttgtcgatatcct

SEQ ID NO: 594 - DNA, 303 bp, Homo sapiens
  misc_feature (93)..(93): second gene starts at position 93
atttgcaaggcccgatgtagtccaggtggagcttgtggcccttcttggtgccctccagggtgcactttgtggcaaagaagtggcaggaagaggggagggggtgttgttttttgtttaaaaaaaaaaaaaagaaataggaaggcgagagagcaatcgagaggacgcgaggtctggagaaaccagcagcaccaaaaaagaggacgctagagattgcagtaagatcgggtctttatcagaaatgttatcgcttgtcaggacctcagtctccgcgcattacgtcagtttcaagacaccaacactatt

SEQ ID NO: 595 - DNA, 446 bp, Homo sapiens
  misc_feature (377)..(377): second gene starts at position 377
ggacgcggtagtggccagcgagagtgtcaggcctggggttttctgtgtccttccctgggtcagggacgagccagtgacttgactcttgggcgctaagcttgggagggagcgcaggaggccgctgtccttcctttccggttcacgtcacccttctctccctctgttgctccacctgcagccacttggacggctccgggactgattgcctggggcaggggtggcagtcgaggccgccggggccgaggtgaggctgcagctctccgggcggcggtagcgctggggaggaggaggagagaagatggcgtcggagctagagccagaggtgcaggccatcgaccggagcttgctggaatgttcggccgaggagattgcgggggcctttgaactggccacaggtgactatttgtttgaacctcattcaggggaagagtacactcgagatgaag

SEQ ID NO: 596 - DNA, 4685 bp, Homo sapiens
  misc_feature (3390)..(3390): second gene starts at position 3390
gcatggagagtagaaaactgatttctgctacagacattcagtactctggcagtctgctgaactccttgaatgagcaacgtggccatggactcttctgtgatgttaccgttattgtggaagaccgaaaattccgggctcacaagaatattctttcagcttctagtacctacttccatcagctcttctctgttgctgggcaagttgttgaactgagctttataagagcagagatctttgcagaaattctcaattatatctatagttctaaaattgttcgtgttagatcagatttgcttgatgagttaattaaatcagggcagttattaggagtgaaatttatagcagagcttggtgtcccattgtcacaggttaaaagcatctcaggtacagcgcaggatggtaatactgagcctttacctcctgattctggtgacaagaaccttgtaatacagaaatcaaaagatgaagcccaagataatggggctactataatgcctattataacagagtctttttcattatctgccgaagattatgaaatgaaaaagatcattgttaccgattctgatgatgatgatgatgatgtcattttttgctccgagattctgcccacaaaggagactttgccgagtaataacacagtggcacaggtccaatctaacccaggccctgttgctatttcagatgttgcacctagtgctagcaataactcgccccctttaacaaatatcacacctactcagaaacttcctactcctgtgaatcaggcaactttgagccaaacacaaggaagtgaaaaattgttggtatcttcagctccaacacatctgactcccaatattattttgttaaatcagacaccactttctacaccaccaaatgtcagttcttcacttccaaatcatatgccctcttcaatcaatttacttgtgcagaatcagcagacaccaaacagtgctattttaacaggaaacaaggccaatgaagaggaggaggaggaaataatagatgatgatgatgacactattagctccagtcctgactcggccgtcagtaatacatctttggtcccacaggctgatacctcccaaaataccagttttgatggatcattaatacagaagatgcagattcctacacttcttcaagaaccactttccaattccttaaaaatttcagatataattactagaaatactaatgatccaggcgtaggatcaaaacatctaatggagggtcagaagatcattactttagatacagctactgaaattgaaggcttatcgactggttgcaaggtttatgcaaatatcggtgaagatacttatgatatagtgatccctgtcaaagatgaccctgatgaaggggaggccagacttgagaatgaaataccaaaaacgtctggcagcgagatggcaaacaaacgtatgaaagtaaaacatgatgatcactatgagttaatagtagatggaagggtctattatatctgtattgtatgcaaaaggtcatatgtctgtctgacaagcttgcggagacattttaacattcattcttgggagaagaagtatccgtgccgttactgtgagaaggtatttcctcttgcagaatatcgcacaaagcatgaaattcatcacacaggggagcgaaggtatcagtgtttggcctgtggcaaatctttcatcaactatcagtttatgtcttcacatataaagtcagttcatagtcaagatccttctggggactcaaagctttatcgtttacatccatgcaggtctttacaaatcagacaatatgcatatctttccgatagatcaagcactattcctgcaatgaaggatgatggtattgggtataaggttgacactggaaaagaacctccagtagggaccactacatctactcagaacaagccaatgacctgggaagatatttttattcagcaggaaaatgattcaatttttaaacaaaatgtaacagatggcagtactgagtttgaatttataataccagagtcttactaaactcctttgaaatactagaaagttttgttttggatgatggggcaggggtttcagaagatctgtaaaacaaattaaggtgcgaacaagttaatttgatctgccacattatctgaaggaagtgtagtgggatttttgttgataatttttagaagcaaattttcctgaaagttttgagtagaggtgagaccccctccccaagtatctgtttatatagttagttttcagctcatttaaaagaggcaaaaattaaaagcttggagagatagtttcctgaatagaatttgaagcagtctgaatgttctttgaaaataactggagttattagcataccctagtacatcttacagctttccccttccatgttagcactttactgctgaattctcaattttcttaacattgagacaataaatgtgtgttttgtcttgtatatggcataaagagtaaataagttttagagttgttctggaaaatgtcagaataagtcagtacttgggttgtgtaatctgctagtccaagcgaacagcaacctcctgctaccctccctctatgaaaatagccatgcagacaagtctctcatctgaagaacaaattagatttagctaattagaattaatcctggctttcattgccatagtctgtaaaagactttggtggctagaccactttataccttcgcagtgtggtctctgggggcaaaaaactaatgaaaacaatctctgtaatggcagataggaggagatgaaaagttctgttgcatggatttttaattctctggctaccacatagtagagaatggaatgaagatttccttttggcttcttaaggttaaaaatattcccatgaacatgaaaattttcaaattttgaatctgaaagccaccaaatgtatctttatgtataaatccttgtaaatgatagattccatgggtgagactttacatattttgggtgggaggctactggcatatatttttaaatgttcatattgcgtagaatctccactaggaagtctttatttgaaatagttgaatcagtgatctagtattttcctttcggcaagatttgttaggtttttaccccttctaaaataagttttattccatctgcaaattgctgcaatattatagtaatcagaaactacataaggaatgttatataggcttgtcagttcccatttttcttgacaacaataaataccacttttaaaaatgacacatatttaaacacttagaaaataaagttaacacttactgaagtgctagtactaaactgtgctagtactaaaagaaaacaggttggaacatacatatagcctagcatttataacagaattgttgaacgtctgtaaatgatttttttttttttttttgatacttgcctaacatgcatgtgctgtaaaaatagttaacagggaaataacttgagatgatggctagctttgtttaatgtcttatgaaattttcatgaacaatccaagcataattgttaagaacacgtgtattaaattcatgtaagtggaataaaagttttatgaatggacttttcaactactttctctacagcttttcatgtaaattagtcttggttctgaaacttctctaaaggaaattgtacattttttgaaatttattccttattccctcttggcagctaatgggctcttaccaagtttaaacacaaaatttatcataacaaaaatactactaatataactactgtttccatgtcccatgatcccctctcttcctccccaccctgaaaaaaatgagttcctattttttctgggagagggggggattgattagaaaaaaatgtagtgtgttccatttaaaattttggcatatggcattttctaacttaggaagccacaatgttcttggcccatcatgacattgggtagcattaactgtaagttttgtgcttccaaatcactttttggtttttaagaatttcttgatactcttatagcctgccttcaattttgatcctttattctttctatttgtcaggtgcacaagattaccttcctgttttagccttctgtcttgtcaccaaccattcttacttggtggccatgtacttggaaaaaggccgcatgatctttctggctccactcagtgtctaaggcaccctgcttcctttgcttgcatcccacagactatttccctcatcctatttactgcagcaaatctctccttagttgatgagactgtgtttatctccctttaaaaccctacctatcctgaatggtctgtcattgtctgcctttaaaatccttcctctttcttcctcctctattctctaaataatgatggggctaagttatacccaaagctcactttacaaaatatttcctcagtactttgcagaaaacaccaaacaaaaatgccattttaaaaaaggtgtattttttcttttagaatgtaagctcctcaagagcagggacaatgttttctgtatgttctattgtgcctagtacactgtaaatgctcaataaatattgatgatgggaggcagtgagtcttgatgataagggtgagaaactgaaatcccaaacactgttttgttgcttgttttattatgacctcagattaaattgggaaatattggcccttttgaataattgtcccaaatattacattcaaataaaagtgcaatggag

SEQ ID NO: 597 - DNA, 3199 bp, Homo sapiens
  misc_feature (627)..(627): second gene starts at position 627
atggcgggagggcactgcggcagcttccccgcggcggcggccggcagcggcgagatcgtccaactgaacgtaggggggaccagatttagtacctcaagacaaactcttatgtggattccagattcttttttttccagtttgctgagtgggagaatttcaacacttcgagatgaaactggtgctatatttattgatagagatccagcagcatttgcacccattttaaattttcttcggacaaaagaactagacttaaggggagtgagtattaatgttctcaggcatgaagcagaattttacgggatcactccattagtaagaaggcttctcttatgtgaagaattggagcgttcctcttgtggcagtgtcctttttcatggttacttgcccccaccaggtattcctagtcgtaaaataaacaacacagtcagatctgctgattctaggaatggtctaaattctacagaaggtgaagcccggggaaatggtacacagcctgttctctctggaacgggagaagaaactgttaggctaggatttcctgtggatccacgaaaggtgctaatagtagctggccatcacaactggattgtagctgcatatgcccattttgctgtgtgttacagcaaaagaagattttagtgaagcaggaaactacctaaaaggatatgttatcactggaatttattctgaagaagatgttttgctactgtcaaccaaatatgctgcaagtcttccagccctgctgcttgccagacacacagaaggcaaaatagagagcatcccactagctagcacacatgcacaagacatagttcaaataataacagatgcactactggaaatgtttccggaaatcactgtggaaaatcttcccagttatttcagacttcagaaaccattattgattttgttcagtgatggcactgtaaatcctcagtataaaaaagcaatattgacactggtaaagcagaaatacttggattcatttactccatgctggttaaatctaaagaatactccagtggggagaggaatcttgagggcatattttgatcctctgcctccccttcctcttcttgttttggtgaatctgcattcaggtggccaagtatttgcatttccttcagaccaggctataattgaagaaaaccttgtattgtggctgaagaaattagaagcaggactagaaaatcatatcacaattttacctgctcaagaatggaaacctcctcttccagcttatgattttctaagtatgatagatgccgcaacatctcaacgtggcactaggaaagttcccaagtgtatgaaagaaacagatgtgcaggagaatgataaggaacaacatgaagataaatcggcagtcagaaaagaaccgattgaaactctgagaataaagcattggaatagaagtaattggtttaaagaagcagaaaaatcatttagacgtgataaagagttaggatgctcaaaagtgaactaattttatagggctgtggtttccaaaatttttttggcatgatagacttaatttatttccttaaagaataatattaaatcatttcaagtttgcagactagtgccatccaatagaattataatataagtcacatattttatttaaaattttctagtaactacattaaacaaagtaaaagtgagcagggcaaaataattttgatattacttttcacccagtagtatacccaaaatagcgaaatatagaaattattaatgagatattttacatccttttttgtaccaagtcttctaaatgcagtacatattttatacttactgcatttcttacttccgagtagccatatttcaagtgttccttgccacatgtggcctgtgactactgtattggacagttcagtactagacaaaaactagcataattaacttagttctagccatgatttctatttggattaaaattaaactctaatcacagttaactccacagtgcattcatgcagctgacagttatatttgttttattggagtcatgatattaaaatcagcgtttgtcaacctcaggggatatttagcaattgtcgggagacatttttgatgtcatgactagggcagttattgacatttagtgagtagaggccagggatcctgctaaataacctgcattggacagcgccccacaacaaagaattatcctgcccgaaatggtagtcgtgccaaggctgagtaaccttgtgttaaaagtaacctgtggcagactaggtttccagaatttcctggttctgctcacgtatcatgtttgaaaaaattttggctattaaagatatgtattagatggtcttatcctgattattacctggatacaacttgatcttttctaatattttcagaaagtgatgggataaccctagaagaggactcagaatgatatttatattttaagtgagtcttaaaacctcctcttatttctacaagttatatggctaaatttcagattgaacagggattcagcattctgccatctcctcatggaaagagaggctccctcatctgaagcgtctctgaaatctacccttgcaagcttcagacaaatcagttgatctccctgagccacacggcctcattctgtgagggagggaaagattagccaaagagttaattttcattccaaatcacttagctgttagactgatctgtttgtagcagttgtttgtctcatttttgctctgtgcattttttgagacatttgttgagaatattctatttggtgctctactgtatttttctttttaatatctacttgatatcttgttctttaaattttcttcacatatggtttgcctgatacaactgatttttataactgaaatttaaggaatctaacagctaaaactcagtaagtgcatatatttccttataacatagacccgttgctactctcagcaccctctcctcaattttttttcctgtagcatgtgatgcctgattaaactcattttcatttgcttttatttctaatatgggaacaatgagagtgaactctaaatataggttgtagtaataaaacatcattagcctaattattagaaaatgctaattaagtaccagcacatagaaacatgaaattgcttagtcattgtacctttgtcagcaattttgacagtcattaatgtttgtcataattttaaataaagtgtctgggtttcagaataccttc

SEQ ID NO: 598 - DNA, 3199 bp, Homo sapiens; identical to SEQ ID NO: 597
  misc_feature (627)..(627): second gene starts at position 627

SEQ ID NO: 599 - DNA, 32765 bp, Homo sapiens
  misc_feature (140)..(140): second gene starts at position 140
atggcagggccacgccccagcccatgggccaggctgctcctggcagccttgatcagcgtcagcctctctgggaccttggcaaaccgctgcaagaaggccccagtgaagagctgcacggagtgtgtccgtgtggataaggactgcgcctactgcacagacgagatgttcagggaccggcgctgcaacacccaggcggagctgctggccgcgggctgccagcgggagagcatcgtggtcatggagagcagcttccaaatcacagaggagacccagattgacaccaccctgcggcgcagccagatgtccccccaaggcctgcgggtccgtctgcggcccggtgaggagcggcattttgagctggaggtgtttgagccactggagagccccgtggacctgtacatcctcatggacttctccaactccatgtccgatgatctggacaacctcaagaagatggggcagaacctggctcgggtcctgagccagctcaccagcgactacactattggatttggcaagtttgtggacaaagtcagcgtcccgcagacggacatgaggcctgagaagctgaaggagccctggcccaacagtgacccccccttctccttcaagaacgtcatcagcctgacagaagatgtggatgagttccggaataaactgcagggagagcggatctcaggcaacctggatgctcctgagggcggcttcgatgccatcctgcagacagctgtgtgcacgagggacattggctggcgcccggacagcacccacctgctggtcttctccaccgagtcagccttccactatgaggctgatggcgccaacgtgctggctggcatcatgagccgcaacgatgaacggtgccacctggacaccacgggcacctacacccagtacaggacacaggactacccgtcggtgcccaccctggtgcgcctgctcgccaagcacaacatcatccccatctttgctgtcaccaactactcctatagctactacgagaagcttcacacctatttccctgtctcctcactgggggtgctgcaggaggactcgtccaacatcgtggagctgctggaggaggccttcaatcggatccgctccaacctggacatccgggccctagacagcccccgaggccttcggacagaggtcacctccaagatgttccagaagacgaggactgggtcctttcacatccggcggggggaagtgggtatataccaggtgcagctgcgggcccttgagcacgtggatgggacgcacgtgtgccagctgccggaggaccagaagggcaacatccatctgaaaccttccttctccgacggcctcaagatggacgcgggcatcatctgtgatgtgtgcacctgcgagctgcaaaaagaggtgcggtcagctcgctgcagcttcaacggagacttcgtgtgcggacagtgtgtgtgcagcgagggctggagtggccagacctgcaactgctccaccggctctctgagtgacattcagccctgcctgcgggagggcgaggacaagccgtgctccggccgtggggagtgccagtgcgggcactgtgtgtgctacggcgaaggccgctacgagggtcagttctgcgagtatgacaacttccagtgtccccgcacttccgggttcctctgcaatgaccgaggacgctgctccatgggccagtgtgtgtgtgagcctggttggacaggcccaagctgtgactgtcccctcagcaatgccacctgcatcgacagcaatgggggcatctgtaatggacgtggccactgtgagtgtggccgctgccactgccaccagcagtcgctctacacggacaccatctgcgagatcaactactcggcgatccacccgggcctctgcgaggacctacgctcctgcgtgcagtgccaggcgtggggcaccggcgagaagaaggggcgcacgtgtgaggaatgcaacttcaaggtcaagatggtggacgagcttaagagagccgaggaggtggtggtgcgctgctccttccgggacgaggatgacgactgcacctacagctacaccatggaaggtgacggcgcccctgggcccaacagcactgtcctggtgcacaagaagaaggactgccctccgggctccttctggtggctcatccccctgctcctcctcctcctgccgctcctggccctgctactgctgctatgctggaagtactgtgcctgctgcaaggcctgcctggcacttctcccgtgctgcaaccgaggtcacatggtgggctttaaggaagaccactacatgctgcgggagaacctgatggcctctgaccacttggacacgcccatgctgcgcagcgggaacctcaagggccgtgacgtggtccgctggaaggtcaccaacaacatgcagcggcctggctttgccactcatgccgccagcatcaaccccacagagctggtgccctacgggctgtccttgcgcctggcccgcctttgcaccgagaacctgctgaagcctgacactcgggagtgcgcccagctgcgccaggaggtggaggagaacctgaacgaggtctacaggcagatctccggtgtacacaagctccagcagaccaagttccggcagcagcccaatgccgggaaaaagcaagaccacaccattgtggacacagtgctgatggcgccccgctcggccaagccggccctgctgaagcttacagagaagcaggtggaacagagggccttccacgacctcaaggtggcccccggctactacaccctcactgcagaccaggacgcccggggcatggtggagttccaggagggcgtggagctggtggacgtacgggtgcccctctttatccggcctgaggatgacgacgagaagcagctgctggtggaggccatcgacgtgcccgcaggcactgccaccctcggccgccgcctggtaaacatcaccatcatcaaggagcaagccagagacgtggtgtcctttgagcagcctgagttctcggtcagccgcggggaccaggtggcccgcatccctgtcatccggcgtgtcctggacggcgggaagtcccaggtctcctaccgcacacaggatggcaccgcgcagggcaaccgggactacatccccgtggagggtgagctgctgttccagcctggggaggcctggaaagagctgcaggtgaagctcctggagctgcaagaagttgactccctcctgcggggccgccaggtccgccgtttccacgtccagctcagcaaccctaagtttggggcccacctgggccagccccactccaccaccatcatcatcagggacccagatgaactggaccggagcttcacgagtcagatgttgtcatcacagccaccccctcacggcgacctgggcgccccgcagaaccccaatgctaaggccgctgggtccaggaagatccatttcaactggctgcccccttctggcaagccaatggggtacagggtaaagtactggattcagggtgactccgaatccgaagcccacctgctcgacagcaaggtgccctcagtggagctcaccaacctgtacccgtattgcgactatgagatgaaggtgtgcgcctacggggctcagggcgagggaccctacagctccctggtgtcctgccgcacccaccaggaagtgcccagcgagccagggcgtctggccttcaatgtcgtctcctccacggtgacccagctgagctgggctgagccggctgagaccaacggtgagatcacagcctacgaggtctgctatggcctggtcaacgatgacaaccgacctattgggcccatgaagaaagtgctggttgacaaccctaagaaccggatgctgcttattgagaaccttcgggagtcccagccctaccgctacacggtgaaggcgcgcaacggggccggctgggggcctgagcgggaggccatcatcaacctggccacccagcccaagaggcccatgtccatccccatcatccctgacatccctatcgtggacgcccagagcggggaggactacgacagcttccttatgtacagcgatgacgttctacgctctccatcgggcagccagaggcccagcgtctccgatgacactggctgcggctggaagttcgagcccctgctgggctggacctggctggccgggacctgactgactacctcatgaagatcctcaccgagcgcggctacagcttcaccaccacggccgagcgggaaatcgtgcgtgacattaaggagaagctgtgctacgtcgccctggacttcgagcaagagatggccacggctgcttccagctcctccctggagaagagctacgagctgcctgacggccaggtcatcaccattggcaatgagcggttccgctgccctgaggcactcttccagccttccttcctgggcatggagtcctgtggcatccacgaaactaccttcaactccatcatgaagtgtgacgtggacatccgcaaagacctgtacgccaacacagtgctgtctggcggcaccaccatgtaccctggcattgccgacaggatgcagaaggagatcactgccctggcacccagcacaatgaagatcaagatcattgctcctcctgagcgcaagtactccgtgtggatcggcggctccatcctggcctcgctgtccaccttccagcagatgtggatcagcaagcaggagtatgacgagtccggcccctccatcgtccaccgcaaatgcttctaggcggactatgacttagttgcgttacaccctttcttgacaaaacctaacttgcgcagaaaacaagatgagattggcatggctttatttgttttttttgttttgttttggttttttttttttttttggcttgactcaggatttaaaaactggaacggtgaaggtgacagcagtcggttggagcgagcatcccccaaagttcacaatgtggccgaggactttgattgcacattgttgtttttttaatagtcattccaaatatgagatgcgttgttacaggaagtcccttgccatcctaaaagccaccccacttctctctaaggagaatggcccagtcctctcccaagtccacacaggggaggtgatagcattgctttcgtgtaaattatgtaatgcaaaatttttttaatcttcgccttaatacttttttattttgttttattttgaatgatgagccttcgtgcccccccttcccccttttttgtcccccaacttgagatgtatgaaggcttttggtctccctgggagtgggtggaggcagccagggcttacctgtacactgacttgagaccagttgaataaaagtgcacaccttaaaaatgaaccgccgagaccgcgtccgccccgcgagcacagagcctcgcctttgccgatccgccgcccgtccacacccgccgccagctcaccatggatgatgatatcgccgcgctcgtcgtcgacaacggctccggcatgtgcaaggccggcttcgcgggcgacgatgccccccgggccgtcttcccctccatcgtggggcgccccaggcaccagggcgtgatggtgggcatgggtcagaaggattcctatgtgggcgacgaggcccagagcaagagaggcatcctcaccctgaagtaccccatcgagcacggcatcgtcaccaactgggacgacatggagaaaatctggcaccacaccttctacaatgagctgcgtgtggctcccgaggagcaccccgtgctgctgaccgaggcccccctgaaccccaaggccaaccgcgagaagatgacccagatcatgtttgagaccttcaacaccccagccatgtacgttgctatccaggctgtgctatccctgtacgcctctggccgtaccactggcatcgtgatggactccggtgacggggtcacccacactgtgcccatctacgaggggtatgccctcccccatgccatcctgcgtctggacctggctggccgggacctgactgactacctcatgaagatcctcaccgagcgcggctacagcttcaccaccacggccgagcgggaaatcgtgcgtgacattaaggagaagctgtgctacgtcgccctggacttcgagcaagagatggccacggctgcttccagctcctccctggagaagagctacgagctgcctgacggccaggtcatcaccattggcaatgagcggttccgctgccctgaggcactcttccagccttccttcctgggcatggagtcctgtggcatccacgaaactaccttcaactccatcatgaagtgtgacgtggacatccgcaaagacctgtacgccaacacagtgctgtctggcggcaccaccatgtaccctggcattgccgacaggatgcagaaggagatcactgccctggcacccagcacaatgaagatcaagatcattgctcctcctgagcgcaagtactccgtgtggatcggcggctccatcctggcctcgctgtccaccttccagcagatgtggatcagcaagcaggagtatgacgagtccggcccctccatcgtccaccgcaaatgcttctaggcggactatgacttagttgcgttacaccctttcttgacaaaacctaacttgcgcagaaaacaagatgagattggcatggctttatttgttttttttgttttgttttggttttttttttttttttggcttgactcaggatttaaaaactggaacggtgaaggtgacagcagtcggttggagcgagcatcccccaaagttcacaatgtggccgaggactttgattgcacattgttgtttttttaatagtcattccaaatatgagatgcgttgttacaggaagtcccttgccatcctaaaagccaccccacttctctctaaggagaatggcccagtcctctcccaagtccacacaggggaggtgatagcattgctttcgtgtaaattatgtaatgcaaaatttttttaatcttcgccttaatacttttttattttgttttattttgaatgatgagccttcgtgcccccccttcccccttttttgtcccccaacttgagatgtatgaaggcttttggtctccctgggagtgggtggaggcagccagggcttacctgtacactgacttgagaccagttgaataaaagtgcacaccttaaaaatgaaccgccgagaccgcgtccgccccgcgagcacagagcctcgcctttgccgatccgccgcccgtccacacccgccgccagctcaccatggatgatgatatcgccgcgctcgtcgtcgacaacggctccggcatgtgcaaggccggcttcgcgggcgacgatgccccccgggccgtcttcccctccatcgtggggcgccccaggcaccagggcgtgatggtgggcatgggtcagaaggattcctatgtgggcgacgaggcccagagcaagagaggcatcctcaccctgaagtaccccatcgagcacggcatcgtcaccaactgggacgacatggagaaaatctggcaccacaccttctacaatgagctgcgtgtggctcccgaggagcaccccgtgctgctgaccgaggcccccctgaaccccaaggccaaccgcgagaagatgacccagatcatgtttgagaccttcaacaccccagccatgtacgttgctatccaggctgtgctatccctgtacgcctctggccgtaccactggcatcgtgatggactccggtgacggggtcacccacactgtgcccatctacgaggggtatgccctcccccatgccatcctgcgtctggacctggctggccgggacctgactgactacctcatgaagatcctcaccgagcgcggctacagcttcaccaccacggccgagcgggaaatcgtgcgtgacattaaggagaagctgtgctacgtcgccctggacttcgagcaagagatggccacggctgcttccagctcctccctggagaagagctacgagctgcctgacggccaggtcatcaccattggcaatgagcggttccgctgccctgaggcactcttccagccttccttcctgggcatggagtcctgtggcatccacgaaactaccttcaactccatcatgaagtgtgacgtggacatccgcaaagacctgtacgccaacacagtgctgtctggcggcaccaccatgtaccctggcattgccgacaggatgcagaaggagatcactgccctggcacccagcacaatgaagatcaagatcattgctcctcctgagcgcaagtactccgtgtggatcggcggctccatcctggcctcgctgtccaccttccagcagatgtggatcagcaagcaggagtatgacgagtccggcccctccatcgtccaccgcaaatgcttctaggcggactatgacttagttgcgttacaccctttcttgacaaaacctaacttgcgcagaaaacaagatgagattggcatggctttatttgttttttttgttttgttttggttttttttttttttttggcttgactcaggatttaaaaactggaacggtgaaggtgacagcagtcggttggagcgagcatcccccaaagttcacaatgtggccgaggactttgattgcacattgttgtttttttaatagtcattccaaatatgagatgcgttgttacaggaagtcccttgccatcctaaaagccaccccacttctctctaaggagaatggcccagtcctctcccaagtccacacaggggaggtgatagcattgctttcgtgtaaattatgtaatgcaaaatttttttaatcttcgccttaatacttttttattttgttttattttgaatgatgagccttcgtgcccccccttcccccttttttgtcccccaacttgagatgtatgaaggcttttggtctccctgggagtgggtggaggcagccagggcttacctgtacactgacttgagaccagttgaataaaagtgcacaccttaaaaatgaaccgccgagaccgcgtccgccccgcgagcacagagcctcgcctttgccgatccgccgcccgtccacacccgccgccagctcaccatggatgatgatatcgccgcgctcgtcgtcgacaacggctccggcatgtgcaaggccggcttcgcgggcgacgatgccccccgggccgtcttcccctccatcgtggggcgccccaggcaccagggcgtgatggtgggcatgggtcagaaggattcctatgtgggcgacgaggcccagagcaagagaggcatcctcaccctgaagtaccccatcgagcacggcatcgtcaccaactgggacgacatggagaaaatctggcaccacaccttctacaatgagctgcgtgtggctcccgaggagcaccccgtgctgctgaccgaggcccccctgaaccccaaggccaaccgcgagaagatgacccagatcatgtttgagaccttcaacaccccagccatgtacgttgctatccaggctgtgctatccctgtacgcctctggccgtaccactggcatcgtgatggactccggtgacggggtcacccacactgtgcccatctacgaggggtatgccctcccccatgccatcctgcgtctggacctggctggccgggacctgactgactacctcatgaagatcctcaccgagcgcggctacagcttcaccaccacggccgagcgggaaatcgtgcgtgacattaaggagaagctgtgctacgtcgccctggacttcgagcaagagatggccacggctgcttccagctcctccctggagaagagctacgagctgcctgacggccaggtcatcaccattggcaatgagcggttccgctgccctgaggcactcttccagccttccttcctgggcatggagtcctgtggcatccacgaaactaccttcaactccatcatgaagtgtgacgtggacatccgcaaagacctgtacgccaacacagtgctgtctggcggcaccaccatgtaccctggcattgccgacaggatgcagaaggagatcactgccctggcacccagcacaatgaagatcaagatcattgctcctcctgagcgcaagtactccgtgtggatcggcggctccatcctggcctcgctgtccaccttccagcagatgtggatcagcaagcaggagtatgacgagtccggcccctccatcgtccaccgcaaatgcttctaggcggactatgacttagttgcgttacaccctttcttgacaaaacctaacttgcgcagaaaacaagatgagattggcatggctttatttgttttttttgttttgttttggttttttttttttttttggcttgactcaggatttaaaaactggaacggtgaaggtgacagcagtcggttggagcgagcatcccccaaagttcacaatgtggccgaggactttgattgcacattgttgtttttttaatagtcattccaaatatgagatgcgttgttacaggaagtcccttgccatcctaaaagccaccccacttctctctaaggagaatggcccagtcctctcccaagtccacacaggggaggtgatagcattgctttcgtgtaaattatgtaatgcaaaatttttttaatcttcgccttaatacttttttattttgttttattttgaatgatgagccttcgtgcccccccttcccccttttttgtcccccaacttgagatgtatgaaggcttttggtctccctgggagtgggtggaggcagccagggcttacctgtacactgacttgagaccagttgaataaaagtgcacaccttaaaaatgaaccgccgagaccgcgtccgccccgcgagcacagagcctcgcctttgccgatccgccgcccgtccacacccgccgccagctcaccatggatgatgatatcgccgcgctcgtcgtcgacaacggctccggcatgtgcaaggccggcttcgcgggcgacgatgccccccgggccgtcttcccctccatcgtggggcgccccaggcaccagggcgtgatggtgggcatgggtcagaaggattcctatgtgggcgacgaggcccagagcaagagaggcatcctcaccctgaagtaccccatcgagcacggcatcgtcaccaactgggacgacatggagaaaatctggcaccacaccttctacaatgagctgcgtgtggctcccgaggagcaccccgtgctgctgaccgaggcccccctgaaccccaaggccaaccgcgagaagatgacccagatcatgtttgagaccttcaacaccccagccatgtacgttgctatccaggctgtgctatccctgtacgcctctggccgtaccactggcatcgtgatggactccggtgacggggtcacccacactgtgcccatctacgaggggtatgccctcccccatgccatcctgcgtctggacctggctggccgggacctgactgactacctcatgaagatcctcaccgagcgcggctacagcttcaccaccacggccgagcgggaaatcgtgcgtgacattaaggagaagctgtgctacgtcgccctggacttcgagcaagagatggccacggctgcttccagctcctccctggagaagagctacgagctgcctgacggccaggtcatcaccattggcaatgagcggttccgctgccctgaggcactcttccagccttccttcctgggcatggagtcctgtggcatccacgaaactaccttcaactccatcatgaagtgtgacgtggacatccgcaaagacctgtacgccaacacagtgctgtctggcggcaccaccatgtaccctggcattgccgacaggatgcagaaggagatcactgccctggcacccagcacaatgaagatcaagatcattgctcctcctgagcgcaagtactccgtgtggatcggcggctccatcctggcctcgctgtccaccttccagcagatgtggatcagcaagcaggagtatgacgagtccggcccctccatcgtccaccgcaaatgcttctaggcggactatgacttagttgcgttacaccctttcttgacaaaacctaacttgcgcagaaaacaagatgagattggcatggctttatttgttttttttgttttgttttggttttttttttttttttggcttgactcaggatttaaaaactggaacggtgaaggtgacagcagtcggttggagcgagcatcccccaaagttcacaatgtggccgaggactttgattgcacattgttgtttttttaatagtcattccaaatatgagatgcgttgttacaggaagtcccttgccatcctaaaagccaccccacttctctctaaggagaatggcccagtcctctcccaagtccacacaggggaggtgatagcattgctttcgtgtaaattatgtaatgcaaaatttttttaatcttcgccttaatacttttttattttgttttattttgaatgatgagccttcgtgcccccccttcccccttttttgtcccccaacttgagatgtatgaaggcttttggtctccctgggagtgggtggaggcagccagggcttacctgtacactgacttgagaccagttgaataaaagtgcacaccttaaaaatgaaccgccgagaccgcgtccgccccgcgagcacagagcctcgcctttgccgatccgccgcccgtccacacccgccgccagctcaccatggatgatgatatcgccgcgctcgtcgtcgacaacggctccggcatgtgcaaggccggcttcgcgggcgacgatgccccccgggccgtcttcccctccatcgtggggcgccccaggcaccagggcgtgatggtgggcatgggtcagaaggattcctatgtgggcgacgaggcccagagcaagagaggcatcctcaccctgaagtaccccatcgagcacggcatcgtcaccaactgggacgacatggagaaaatctggcaccacaccttctacaatgagctgcgtgtggctcccgaggagcaccccgtgctgctgaccgaggcccccctgaaccccaaggccaaccgcgagaagatgacccagatcatgtttgagaccttcaacaccccagccatgtacgttgctatccaggctgtgctatccctgtacgcctctggccgtaccactggcatcgtgatggactccggtgacggggtcacccacactgtgcccatctacgaggggtatgccctcccccatgccatcctgcgtctggacctggctggccgggacctgactgactacctcatgaagatcctcaccgagcgcggctacagcttcaccaccacggccgagcgggaaatcgtgcgtgacattaaggagaagctgtgctacgtcgccctggacttcgagcaagagatggccacggctgcttccagctcctccctggagaagagctacgagctgcctgacggccaggtcatcaccattggcaatgagcggttccgctgccctgaggcactcttccagccttccttcctgggcatggagtcctgtggcatccacgaaactaccttcaactccatcatgaagtgtgacgtggacatccgcaaagacctgtacgccaacacagtgctgtctggcggcaccaccatgtaccctggcattgccgacaggatgcagaaggagatcactgccctggcacccagcacaatgaagatcaagatcattgctcctcctgagcgcaagtactccgtgtggatcggcggctccatcctggcctcgctgtccaccttccagcagatgtggatcagcaagcaggagtatgacgagtccggcccctccatcgtccaccgcaaatgcttctaggcggactatgacttagttgcgttacaccctttcttgacaaaacctaacttgcgcagaaaacaagatgagattggcatggctttatttgttttttttgttttgttttggttttttttttttttttggcttgactcaggatttaaaaactggaacggtgaaggtgacagcagtcggttggagcgagcatcccccaaagttcacaatgtggccgaggactttgattgcacattgttgtttttttaatagtcattccaaatatgagatgcgttgttacaggaagtcccttgccatcctaaaagccaccccacttctctctaaggagaatggcccagtcctctcccaagtccacacaggggaggtgatagcattgctttcgtgtaaattatgtaatgcaaaatttttttaatcttcgccttaatacttttttattttgttttattttgaatgatgagccttcgtgcccccccttcccccttttttgtcccccaacttgagatgtatgaaggcttttggtctccctgggagtgggtggaggcagccagggcttacctgtacactgacttgagaccagttgaataaaagtgcacaccttaaaaatgaaccgccgagaccgcgtccgccccgcgagcacagagcctcgcctttgccgatccgccgcccgtccacacccgccgccagctcaccatggatgatgatatcgccgcgctcgtcgtcgacaacggctccggcatgtgcaaggccggcttcgcgggcgacgatgccccccgggccgtcttcccctccatcgtggggcgccccaggcaccagggcgtgatggtgggcatgggtcagaaggattcctatgtgggcgacgaggcccagagcaagagaggcatcctcaccctgaagtaccccatcgagcacggcatcgtcaccaactgggacgacatggagaaaatctggcaccacaccttctacaatgagctgcgtgtggctcccgaggagcaccccgtgctgctgaccgaggcccccctgaaccccaaggccaaccgcgagaagatgacccagatcatgtttgagaccttcaacaccccagccatgtacgttgctatccaggctgtgctatccctgtacgcctctggccgtaccactggcatcgtgatggactccggtgacggggtcacccacactgtgcccatctacgaggggtatgccctcccccatgccatcctgcgtctggacctggctggccgggacctgactgactacctcatgaagatcctcaccgagcgcggctacagcttcaccaccacggccgagcgggaaatcgtgcgtgacattaaggagaagctgtgctacgtcgccctggacttcgagcaagagatggccacggctgcttccagctcctccctggagaagagctacgagctgcctgacggccaggtcatcaccattggcaatgagcggttccgctgccctgaggcactcttccagccttccttcctgggcatggagtcctgtggcatccacgaaactaccttcaactccatcatgaagtgtgacgtggacatccgcaaagacctgtacgccaacacagtgctgtctggcggcaccaccatgtaccctggcattgccgacaggatgcagaaggagatcactgccctggcacccagcacaatgaagatcaagatcattgctcctcctgagcgcaagtactccgtgtggatcggcggctccatcctggcctcgctgtccaccttccagcagatgtggatcagcaagcaggagtatgacgagtccggcccctccatcgtccaccgcaaatgcttctaggcggactatgacttagttgcgttacaccctttcttgacaaaacctaacttgcgcagaaaacaagatgagattggcatggctttatttgttttttttgttttgttttggttttttttttttttttggcttgactcaggatttaaaaactggaacggtgaaggtgacagcagtcggttggagcgagcatcccccaaagttcacaatgtggccgaggactttgattgcacattgttgtttttttaatagtcattccaaatatgagatgcgttgttacaggaagtcccttgccatcctaaaagccaccccacttctctctaaggagaatggcccagtcctctcccaagtccacacaggggaggtgatagcattgctttcgtgtaaattatgtaatgcaaaatttttttaatcttcgccttaatacttttttattttgttttattttgaatgatgagccttcgtgcccccccttcccccttttttgtcccccaacttgagatgtatgaaggcttttggtctccctgggagtgggtggaggcagccagggcttacctgtacactgacttgagaccagttgaataaaagtgcacaccttaaaaatgaaccgccgagaccgcgtccgccccgcgagcacagagcctcgcctttgccgatccgccgcccgtccacacccgccgccagctcaccatggatgatgatatcgccgcgctcgtcgtcgacaacggctccggcatgtgcaaggccggcttcgcgggcgacgatgccccccgggccgtcttcccctccatcgtggggcgccccaggcaccagggcgtgatggtgggcatgggtcagaaggattcctatgtgggcgacgaggcccagagcaagagaggcatcctcaccctgaagtaccccatcgagcacggcatcgtcaccaactgggacgacatggagaaaatctggcaccacaccttctacaatgagctgcgtgtggctcccgaggagcaccccgtgctgctgaccgaggcccccctgaaccccaaggccaaccgcgagaagatgacccagatcatgtttgagaccttcaacaccccagccatgtacgttgctatccaggctgtgctatccctgtacgcctctggccgtaccactggcatcgtgatggactccggtgacggggtcacccacactgtgcccatctacgaggggtatgccctcccccatgccatcctgcgtctggacctggctggccgggacctgactgactacctcatgaagatcctcaccgagcgcggctacagcttcaccaccacggccgagcgggaaatcgtgcgtgacattaaggagaagctgtgctacgtcgccctggacttcgagcaagagatggccacggctgcttccagctcctccctggagaagagctacgagctgcctgacggccaggtcatcaccattggcaatgagcggttccgctgccctgaggcactcttccagccttccttcctgggcatggagtcctgtggcatccacgaaactaccttcaactccatcatgaagtgtgacgtggacatccgcaaagacctgtacgccaacacagtgctgtctggcggcaccaccatgtaccctggcattgccgacaggatgcagaaggagatcactgccctggcacccagcacaatgaagatcaagatcattgctcctcctgagcgcaagtactccgtgtggatcggcggctccatcctggcctcgctgtccaccttccagcagatgtggatcagcaagcaggagtatgacgagtccggcccctccatcgtccaccgcaaatgcttctaggcggactatgacttagttgcgttacaccctttcttgacaaaacctaacttgcgcagaaaacaagatgagattggcatggctttatttgttttttttgttttgttttggttttttttttttttttggcttgactcaggatttaaaaactggaacggtgaaggtgacagcagtcggttggagcgagcatcccccaaagttcacaatgtggccgaggactttgattgcacattgttgtttttttaatagtcattccaaatatgagatgcgttgttacaggaagtcccttgccatcctaaaagccaccccacttctctctaaggagaatggcccagtcctctcccaagtccacacaggggaggtgatagcattgctttcgtgtaaattatgtaatgcaaaatttttttaatcttcgccttaatacttttttattttgttttattttgaatgatgagccttcgtgcccccccttcccccttttttgtcccccaacttgagatgtatgaaggcttttggtctccctgggagtgggtggaggcagccagggcttacctgtacactgacttgagaccagttgaataaaagtgcacaccttaaaaatgaaccgccgagaccgcgtccgccccgcgagcacagagcctcgcctttgccgatccgccgcccgtccacacccgccgccagctcaccatggatgatgatatcgccgcgctcgtcgtcgacaacggctccggcatgtgcaaggccggcttcgcgggcgacgatgccccccgggccgtcttcccctccatcgtggggcgccccaggcaccagggcgtgatggtgggcatgggtcagaaggattcctatgtgggcgacgaggcccagagcaagagaggcatcctcaccctgaagtaccccatcgagcacggcatcgtcaccaactgggacgacatggagaaaatctggcaccacaccttctacaatgagctgcgtgtggctcccgaggagcaccccgtgctgctgaccgaggcccccctgaaccccaaggccaaccgcgagaagatgacccagatcatgtttgagaccttcaacaccccagccatgtacgttgctatccaggctgtgctatccctgtacgcctctggccgtaccactggcatcgtgatggactccggtgacggggtcacccacactgtgcccatctacgaggggtatgccctcccccatgccatcctgcgtctggacctggctggccgggacctgactgactacctcatgaagatcctcaccgagcgcggctacagcttcaccaccacggccgagcgggaaatcgtgcgtgacattaaggagaagctgtgctacgtcgccctggacttcgagcaagagatggccacggctgcttccagctcctccctggagaagagctacgagctgcctgacggccaggtcatcaccattggcaatgagcggttccgctgccctgaggcactcttccagccttccttcctgggcatggagtcctgtggcatccacgaaactaccttcaactccatcatgaagtgtgacgtggacatccgcaaagacctgtacgccaacacagtgctgtctggcggcaccaccatgtaccctggcattgccgacaggatgcagaaggagatcactgccctggcacccagcacaatgaagatcaagatcattgctcctcctgagcgcaagtactccgtgtggatcggcggctccatcctggcctcgctgtccaccttccagcagatgtggatcagcaagcaggagtatgacgagtccggcccctccatcgtccaccgcaaatgcttctaggcggactatgacttagttgcgttacaccctttcttgacaaaacctaacttgcgcagaaaacaagatgagattggcatggctttatttgttttttttgttttgttttggttttttttttttttttggcttgactcaggatttaaaaactggaacggtgaaggtgacagcagtcggttggagcgagcatcccccaaagttcacaatgtggccgaggactttgattgcacattgttgtttttttaatagtcattccaaatatgagatgcgttgttacaggaagtcccttgccatcctaaaagccaccccacttctctctaaggagaatggcccagtcctctcccaagtccacacaggggaggtgatagcattgctttcgtgtaaattatgtaatgcaaaatttttttaatcttcgccttaatacttttttattttgttttattttgaatgatgagccttcgtgcccccccttcccccttttttgtcccccaacttgagatgtatgaaggcttttggtctccctgggagtgggtggaggcagccagggcttacctgtacactgacttgagaccagttgaataaaagtgcacaccttaaaaatgaaccgccgagaccgcgtccgccccgcgagcacagagcctcgcctttgccgatccgccgcccgtccacacccgccgccagctcaccatggatgatgatatcgccgcgctcgtcgtcgacaacggctccggcatgtgcaaggccggcttcgcgggcgacgatgccccccgggccgtcttcccctccatcgtggggcgccccaggcaccagggcgtgatggtgggcatgggtcagaaggattcctatgtgggcgacgaggcccagagcaagagaggcatcctcaccctgaagtaccccatcgagcacggcatcgtcaccaactgggacgacatggagaaaatctggcaccacaccttctacaatgagctgcgtgtggctcccgaggagcaccccgtgctgctgaccgaggcccccctgaaccccaaggccaaccgcgagaagatgacccagatcatgtttgagaccttcaacaccccagccatgtacgttgctatccaggctgtgctatccctgtacgcctctggccgtaccactggcatcgtgatggactccggtgacggggtcacccacactgtgcccatctacgaggggtatgccctcccccatgccatcctgcgtctggacctggctggccgggacctgactgactacctcatgaagatcctcaccgagcgcggctacagcttcaccaccacggccgagcgggaaatcgtgcgtgacattaaggagaagctgtgctacgtcgccctggacttcgagcaagagatggccacggctgcttccagctcctccctggagaagagctacgagctgcctgacggccaggtcatcaccattggcaatgagcggttccgctgccctgaggcactcttccagccttccttcctgggcatggagtcctgtggcatccacgaaactaccttcaactccatcatgaagtgtgacgtggacatccgcaaagacctgtacgccaacacagtgctgtctggcggcaccaccatgtaccctggcattgccgacaggatgcagaaggagatcactgccctggcacccagcacaatgaagatcaagatcattgctcctcctgagcgcaagtactccgtgtggatcggcggctccatcctggcctcgctgtccaccttccagcagatgtggatcagcaagcaggagtatgacgagtccggcccctccatcgtccaccgcaaatgcttctaggcggactatgacttagttgcgttacaccctttcttgacaaaacctaacttgcgcagaaaacaagatgagattggcatggctttatttgttttttttgttttgttttggttttttttttttttttggcttgactcaggatttaaaaactggaacggtgaaggtgacagcagtcggttggagcgagcatcccccaaagttcacaatgtggccgaggactttgattgcacattgttgtttttttaatagtcattccaaatatgagatgcgttgttacaggaagtcccttgccatcctaaaagccaccccacttctctctaaggagaatggcccagtcctctcccaagtccacacaggggaggtgatagcattgctttcgtgtaaattatgtaatgcaaaatttttttaatcttcgccttaatacttttttattttgttttattttgaatgatgagccttcgtgcccccccttcccccttttttgtcccccaacttgagatgtatgaaggcttttggtctccctgggagtgggtggaggcagccagggcttacctgtacactgacttgagaccagttgaataaaagtgcacaccttaaaaatgaaccgccgagaccgcgtccgccccgcgagcacagagcctcgcctttgccgatccgccgcccgtccacacccgccgccagctcaccatggatgatgatatcgccgcgctcgtcgtcgacaacggctccggcatgtgcaaggccggcttcgcgggcgacgatgccccccgggccgtcttcccctccatcgtggggcgccccaggcaccagggcgtgatggtgggcatgggtcagaaggattcctatgtgggcgacgaggcccagagcaagagaggcatcctcaccctgaagtaccccatcgagcacggcatcgtcaccaactgggacgacatggagaaaatctggcaccacaccttctacaatgagctgcgtgtggctcccgaggagcaccccgtgctgctgaccgaggcccccctgaaccccaaggccaaccgcgagaagatgacccagatcatgtttgagaccttcaacaccccagccatgtacgttgctatccaggctgtgctatccctgtacgcctctggccgtaccactggcatcgtgatggactccggtgacggggtcacccacactgtgcccatctacgaggggtatgccctcccccatgccatcctgcgtctggacctggctggccgggacctgactgactacctcatgaagatcctcaccgagcgcggctacagcttcaccaccacggccgagcgggaaatcgtgcgtgacattaaggagaagctgtgctacgtcgccctggacttcgagcaagagatggccacggctgcttccagctcctccctggagaagagctacgagctgcctgacggccaggtcatcaccattggcaatgagcggttccgctgccctgaggcactcttccagccttccttcctgggcatggagtcctgtggcatccacgaaactaccttcaactccatcatgaagtgtgacgtggacatccgcaaagacctgtacgccaacacagtgctgtctggcggcaccaccatgtaccctggcattgccgacaggatgcagaaggagatcactgccctggcacccagcacaatgaagatcaagatcattgctcctcctgagcgcaagtactccgtgtggatcggcggctccatcctggcctcgctgtccaccttccagcagatgtggatcagcaagcaggagtatgacgagtccggcccctccatcgtccaccgcaaatgcttctaggcggactatgacttagttgcgttacaccctttcttgacaaaacctaacttgcgcagaaaacaagatgagattggcatggctttatttgttttttttgttttgttttggttttttttttttttttggcttgactcaggatttaaaaactggaacggtgaaggtgacagcagtcggttggagcgagcatcccccaaagttcacaatgtggccgaggactttgattgcacattgttgtttttttaatagtcattccaaatatgagatgcgttgttacaggaagtcccttgccatcctaaaagccaccccacttctctctaaggagaatggcccagtcctctcccaagtccacacaggggaggtgatagcattgctttcgtgtaaattatgtaatgcaaaatttttttaatcttcgccttaatacttttttattttgttttattttgaatgatgagccttcgtgcccccccttcccccttttttgtcccccaacttgagatgtatgaaggcttttggtctccctgggagtgggtggaggcagccagggcttacctgtacactgacttgagaccagttgaataaaagtgcacaccttaaaaatgaaccgccgagaccgcgtccgccccgcgagcacagagcctcgcctttgccgatccgccgcccgtccacacccgccgccagctcaccatggatgatgatatcgccgcgctcgtcgtcgacaacggctccggcatgtgcaaggccggcttcgcgggcgacgatgccccccgggccgtcttcccctccatcgtggggcgccccaggcaccagggcgtgatggtgggcatgggtcagaaggattcctatgtgggcgacgaggcccagagcaagagaggcatcctcaccctgaagtaccccatcgagcacggcatcgtcaccaactgggacgacatggagaaaatctggcaccacaccttctacaatgagctgcgtgtggctcccgaggagcaccccgtgctgctgaccgaggcccccctgaaccccaaggccaaccgcgagaagatgacccagatcatgtttgagaccttcaacaccccagccatgtacgttgctatccaggctgtgctatccctgtacgcctctggccgtaccactggcatcgtgatggactccggtgacggggtcacccacactgtgcccatctacgaggggtatgccctcccccatgccatcctgcgtctggacctggctggccgggacctgactgactacctcatgaagatcctcaccgagcgcggctacagcttcaccaccacggccgagcgggaaatcgtgcgtgacattaaggagaagctgtgctacgtcgccctggacttcgagcaagagatggccacggctgcttccagctcctccctggagaagagctacgagctgcctgacggccaggtcatcaccattggcaatgagcggttccgctgccctgaggcactcttccagccttccttcctgggcatggagtcctgtggcatccacgaaactaccttcaactccatcatgaagtgtgacgtggacatccgcaaagacctgtacgccaacacagtgctgtctggcggcaccaccatgtaccctggcattgccgacaggatgcagaaggagatcactgccctggcacccagcacaatgaagatcaagatcattgctcctcctgagcgcaagtactccgtgtggatcggcggctccatcctggcctcgctgtccaccttccagcagatgtggatcagcaagcaggagtatgacgagtccggcccctccatcgtccaccgcaaatgcttctaggcggactatgacttagttgcgttacaccctttcttgacaaaacctaacttgcgcagaaaacaagatgagattggcatggctttatttgttttttttgttttgttttggttttttttttttttttggcttgactcaggatttaaaaactggaacggtgaaggtgacagcagtcggttggagcgagcatcccccaaagttcacaatgtggccgaggactttgattgcacattgttgtttttttaatagtcattccaaatatgagatgcgttgttacaggaagtcccttgccatcctaaaagccaccccacttctctctaaggagaatggcccagtcctctcccaagtccacacaggggaggtgatagcattgctttcgtgtaaattatgtaatgcaaaatttttttaatcttcgccttaatacttttttattttgttttattttgaatgatgagccttcgtgcccccccttcccccttttttgtcccccaacttgagatgtatgaaggcttttggtctccctgggagtgggtggaggcagccagggcttacctgtacactgacttgagaccagttgaataaaagtgcacaccttaaaaatgaaccgccgagaccgcgtccgccccgcgagcacagagcctcgcctttgccgatccgccgcccgtccacacccgccgccagctcaccatggatgatgatatcgccgcgctcgtcgtcgacaacggctccggcatgtgcaaggccggcttcgcgggcgacgatgccccccgggccgtcttcccctccatcgtggggcgccccaggcaccagggcgtgatggtgggcatgggtcagaaggattcctatgtgggcgacgaggcccagagcaagagaggcatcctcaccctgaagtaccccatcgagcacggcatcgtcaccaactgggacgacatggagaaaatctggcaccacaccttctacaatgagctgcgtgtggctcccgaggagcaccccgtgctgctgaccgaggcccccctgaaccccaaggccaaccgcgagaagatgacccagatcatgtttgagaccttcaacaccccagccatgtacgttgctatccaggctgtgctatccctgtacgcctctggccgtaccactggcatcgtgatggactccggtgacggggtcacccacactgtgcccatctacgaggggtatgccctcccccatgccatcctgcgtctggacctggctggccgggacctgactgactacctcatgaagatcctcaccgagcgcggctacagcttcaccaccacggccgagcgggaaatcgtgcgtgacattaaggagaagctgtgctacgtcgccctggacttcgagcaagagatggccacggctgcttccagctcctccctggagaagagctacgagctgcctgacggccaggtcatcaccattggcaatgagcggttccgctgccctgaggcactcttccagccttccttcctgggcatggagtcctgtggcatccacgaaactaccttcaactccatcatgaagtgtgacgtggacatccgcaaagacctgtacgccaacacagtgctgtctggcggcaccaccatgtaccctggcattgccgacaggatgcagaaggagatcactgccctggcacccagcacaatgaagatcaagatcattgctcctcctgagcgcaagtactccgtgtggatcggcggctccatcctggcctcgctgtccaccttccagcagatgtggatcagcaagcaggagtatgacgagtccggcccctccatcgtccaccgcaaatgcttctaggcggactatgacttagttgcgttacaccctttcttgacaaaacctaacttgcgcagaaaacaagatgagattggcatggctttatttgttttttttgttttgttttggttttttttttttttttggcttgactcaggatttaaaaactggaacggtgaaggtgacagcagtcggttggagcgagcatcccccaaagttcacaatgtggccgaggactttgattgcacattgttgtttttttaatagtcattccaaatatgagatgcgttgttacaggaagtcccttgccatcctaaaagccaccccacttctctctaaggagaatggcccagtcctctcccaagtccacacaggggaggtgatagcattgctttcgtgtaaattatgtaatgcaaaatttttttaatcttcgccttaatacttttttattttgttttattttgaatgatgagccttcgtgcccccccttcccccttttttgtcccccaacttgagatgtatgaaggcttttggtctccctgggagtgggtggaggcagccagggcttacctgtacactgacttgagaccagttgaataaaagtgcacaccttaaaaatgaaccgccgagaccgcgtccgccccgcgagcacagagcctcgcctttgccgatccgccgcccgtccacacccgccgccagctcaccatggatgatgatatcgccgcgctcgtcgtcgacaacggctccggcatgtgcaaggccggcttcgcgggcgacgatgccccccgggccgtcttcccctccatcgtggggcgccccaggcaccagggcgtgatggtgggcatgggtcagaaggattcctatgtgggcgacgaggcccagagcaagagaggcatcctcaccctgaagtaccccatcgagcacggcatcgtcaccaactgggacgacatggagaaaatctggcaccacaccttctacaatgagctgcgtgtggctcccgaggagcaccccgtgctgctgaccgaggcccccctgaaccccaaggccaaccgcgagaagatgacccagatcatgtttgagaccttcaacaccccagccatgtacgttgctatccaggctgtgctatccctgtacgcctctggccgtaccactggcatcgtgatggactccggtgacggggtcacccacactgtgcccatctacgaggggtatgccctcccccatgccatcctgcgtctggacctggctggccgggacctgactgactacctcatgaagatcctcaccgagcgcggctacagcttcaccaccacggccgagcgggaaatcgtgcgtgacattaaggagaagctgtgctacgtcgccctggacttcgagcaagagatggccacggctgcttccagctcctccctggagaagagctacgagctgcctgacggccaggtcatcaccattggcaatgagcggttccgctgccctgaggcactcttccagccttccttcctgggcatggagtcctgtggcatccacgaaactaccttcaactccatcatgaagtgtgacgtggacatccgcaaagacctgtacgccaacacagtgctgtctggcggcaccaccatgtaccctggcattgccgacaggatgcagaaggagatcactgccctggcacccagcacaatgaagatcaagatcattgctcctcctgagcgcaagtactccgtgtggatcggcggctccatcctggcctcgctgtccaccttccagcagatgtggatcagcaagcaggagtatgacgagtccggcccctccatcgtccaccgcaaatgcttctaggcggactatgacttagttgcgttacaccctttcttgacaaaacctaacttgcgcagaaaacaagatgagattggcatggctttatttgttttttttgttttgttttggttttttttttttttttggcttgactcaggatttaaaaactggaacggtgaaggtgacagcagtcggttggagcgagcatcccccaaagttcacaatgtggccgaggactttgattgcacattgttgtttttttaatagtcattccaaatatgagatgcgttgttacaggaagtcccttgccatcctaaaagccaccccacttctctctaaggagaatggcccagtcctctcccaagtccacacaggggaggtgatagcattgctttcgtgtaaattatgtaatgcaaaatttttttaatcttcgccttaatacttttttattttgttttattttgaatgatgagccttcgtgcccccccttcccccttttttgtcccccaacttgagatgtatgaaggcttttggtctccctgggagtgggtggaggcagccagggcttacctgtacactgacttgagaccagttgaataaaagtgcacaccttaaaaatgaaccgccgagaccgcgtccgccccgcgagcacagagcctcgcctttgccgatccgccgcccgtccacacccgccgccagctcaccatggatgatgatatcgccgcgctcgtcgtcgacaacggctccggcatgtgcaaggccggcttcgcgggcgacgatgccccccgggccgtcttcccctccatcgtggggcgccccaggcaccagggcgtgatggtgggcatgggtcagaaggattcctatgtgggcgacgaggcccagagcaagagaggcatcctcaccctgaagtaccccatcgagcacggcatcgtcaccaactgggacgacatggagaaaatctggcaccacaccttctacaatgagctgcgtgtggctcccgaggagcaccccgtgctgctgaccgaggcccccctgaaccccaaggccaaccgcgagaagatgacccagatcatgtttgagaccttcaacaccccagccatgtacgttgctatccaggctgtgctatccctgtacgcctctggccgtaccactggcatcgtgatggactccggtgacggggtcacccacactgtgcccatctacgaggggtatgccctcccccatgccatcctgcgtctggacctggctggccgggacctgactgactacctcatgaagatcctcaccgagcgcggctacagcttcaccaccacggccgagcgggaaatcgtgcgtgacattaaggagaagctgtgctacgtcgccctggacttcgagcaagagatggccacggctgcttccagctcctccctggagaagagctacgagctgcctgacggccaggtcatcaccattggcaatgagcggttccgctgccctgaggcactcttccagccttccttcctgggcatggagtcctgtggcatccacgaaactaccttcaactccatcatgaagtgtgacgtggacatccgcaaagacctgtacgccaacacagtgctgtctggcggcaccaccatgtaccctggcattgccgacaggatgcagaaggagatcactgccctggcacccagcacaatgaagatcaagatcattgctcctcctgagcgcaagtactccgtgtggatcggcggctccatcctggcctcgctgtccaccttccagcagatgtggatcagcaagcaggagtatgacgagtccggcccctccatcgtccaccgcaaatgcttctaggcggactatgacttagttgcgttacaccctttcttgacaaaacctaacttgcgcagaaaacaagatgagattggcatggctttatttgttttttttgttttgttttggttttttttttttttttggcttgactcaggatttaaaaactggaacggtgaaggtgacagcagtcggttggagcgagcatcccccaaagttcacaatgtggccgaggactttgattgcacattgttgtttttttaatagtcattccaaatatgagatgcgttgttacaggaagtcccttgccatcctaaaagccaccccacttctctctaaggagaatggcccagtcctctcccaagtccacacaggggaggtgatagcattgctttcgtgtaaattatgtaatgcaaaatttttttaatcttcgccttaatacttttttattttgttttattttgaatgatgagccttcgtgcccccccttcccccttttttgtcccccaacttgagatgtatgaaggcttttggtctccctgggagtgggtggaggcagccagggcttacctgtacactgacttgagaccagttgaataaaagtgcacaccttaaaaatgaaccgccgagaccgcgtccgccccgcgagcacagagcctcgcctttgccgatccgccgcccgtccacacccgccgccagctcaccatggatgatgatatcgccgcgctcgtcgtcgacaacggctccggcatgtgcaaggccggcttcgcgggcgacgatgccccccgggccgtcttcccctccatcgtggggcgccccaggcaccagggcgtgatggtgggcatgggtcagaaggattcctatgtgggcgacgaggcccagagcaagagaggcatcctcaccctgaagtaccccatcgagcacggcatcgtcaccaactgggacgacatggagaaaatctggcaccacaccttctacaatgagctgcgtgtggctcccgaggagcaccccgtgctgctgaccgaggcccccctgaaccccaaggccaaccgcgagaagatgacccagatcatgtttgagaccttcaacaccccagccatgtacgttgctatccaggctgtgctatccctgtacgcctctggccgtaccactggcatcgtgatggactccggtgacggggtcacccacactgtgcccatctacgaggggtatgccctcccccatgccatcctgcgtctggacctggctggccgggacctgactgactacctcatgaagatcctcaccgagcgcggctacagcttcaccaccacggccgagcgggaaatcgtgcgtgacattaaggagaagctgtgctacgtcgccctggacttcgagcaagagatggccacggctgcttccagctcctccctggagaagagctacgagctgcctgacggccaggtcatcaccattggcaatgagcggttccgctgccctgaggcactcttccagccttccttcctgggcatggagtcctgtggcatccacgaaactaccttcaactccatcatgaagtgtgacgtggacatccgcaaagacctgtacgccaacacagtgctgtctggcggcaccaccatgtaccctggcattgccgacaggatgcagaaggagatcactgccctggcacccagcacaatgaagatcaagatcattgctcctcctgagcgcaagtactccgtgtggatcggcggctccatcctggcctcgctgtccaccttccagcagatgtggatcagcaagcaggagtatgacgagtccggcccctccatcgtccaccgcaaatgcttctaggcggactatgacttagttgcgttacaccctttcttgacaaaacctaacttgcgcagaaaacaagatgagattggcatggctttatttgttttttttgttttgttttggttttttttttttttttggcttgactcaggatttaaaaactggaacggtgaaggtgacagcagtcggttggagcgagcatcccccaaagttcacaatgtggccgaggactttgattgcacattgttgtttttttaatagtcattccaaatatgagatgcgttgttacaggaagtcccttgccatcctaaaagccaccccacttctctctaaggagaatggcccagtcctctcccaagtccacacaggggaggtgatagcattgctttcgtgtaaattatgtaatgcaaaatttttttaatcttcgccttaatacttttttattttgttttattttgaatgatgagccttcgtgcccccccttcccccttttttgtcccccaacttgagatgtatgaaggcttttggtctccctgggagtgggtggaggcagccagggcttacctgtacactgacttgagaccagttgaataaaagtgcacaccttaaaaatgaaccgccgagaccgcgtccgccccgcgagcacagagcctcgcctttgccgatccgccgcccgtccacacccgccgccagctcaccatggatgatgatatcgccgcgctcgtcgtcgacaacggctccggcatgtgcaaggccggcttcgcgggcgacgatgccccccgggccgtcttcccctccatcgtggggcgccccaggcaccagggcgtgatggtgggcatgggtcagaaggattcctatgtgggc

SEQ ID NO: 600 - DNA, 32765 bp, Homo sapiens; identical to SEQ ID NO: 599
  misc_feature (140)..(140): second gene starts at position 140

SEQ ID NO: 601 - DNA, 1256 bp, Homo sapiens
  misc_feature (242)..(242): second gene starts at position 242
atggcggcctcctggaggctgggctgtgatccgcggctgctgcgttatcttgtgggcttccccggccgccgaagcgtagggctggtgaagggggctcttgggtggtctgtaagccgcggagctaattggagatggtttcacagcacgcagtggcttcggggtgatcccattaagatactaatgccatcactgtctcctacaatggaagaaggaaacattgtgaaatggctgaaaaaggaaggtggtgctccaaattactaccccaacagctttggtgctccggaacaacagccttctgccctggagcacagcatccaatattctggagaagtgcggagattcaacactgccaatgatgataacgttactcaggtgcgggcattctatgtgaacgtgctgaatgaggaacagaggaaacgtctgtgtgagaacattgccggccacctgaaggatgcacaaattttcatccagaagaaagcggtcaagaacttcactgaggtccaccctgactacgggagccacatccaggctcttctggacaagtacaatgctgagaagcctaagaatgcgattcacacctttgtgcagtccggatctcacttggcggcaagggagaaggcaaatctgtgaggccggggccctgcacctgtgcagcgaagcttagcgttcatccgtgtaacccgctcatcactggatgaagattctcctgtgctagatgtgcaaatgcaagctagtggcttcaaaatagagaatcccactttctatagcagattgtgtaacaattttaatgctatttccccaggggaaaatgaaggttaggatttaacagtcatttaaaaaaaaaatttgttttgacggatgattggattattcatttaaaatgattagaaggcaagtttctagctagaaatatgattttatttgacaaaatttgttgaaattatgtatgtttacatatcacctcatggcctattatattaaaatatggctataaatatataaaaagaaaagataaagatgatctactcagaaatttttatttttctaaggttctcataggaaaagtacatttaatacagcagtgtcatcagaagataacttgagcaccgtcatggcttaatgtttattcctgataataattgatcaaattcatttttttcactggagttacattaatgttaattcagcactgatttcacaacagatcaatttgtaattgcttacatttttacaataaataatctgtacgtaagaac

SEQ ID NO: 602 - DNA, 1211 bp, Homo sapiens
  misc_feature (197)..(197): second gene starts at position 197
atgcaatcaggcggcgctgagggcagcccgggggcggggcgaacggggcgggggccggggtctggtaaggccccgccggctgagatatccagcggcgcacctgacttcccgggaggtgatcccattaagatactaatgccatcactgtctcctacaatggaagaaggaaacattgtgaaatggctgaaaaaggaaggtggtgctccaaattactaccccaacagctttggtgctccggaacaacagccttctgccctggagcacagcatccaatattctggagaagtgcggagattcaacactgccaatgatgataacgttactcaggtgcgggcattctatgtgaacgtgctgaatgaggaacagaggaaacgtctgtgtgagaacattgccggccacctgaaggatgcacaaattttcatccagaagaaagcggtcaagaacttcactgaggtccaccctgactacgggagccacatccaggctcttctggacaagtacaatgctgagaagcctaagaatgcgattcacacctttgtgcagtccggatctcacttggcggcaagggagaaggcaaatctgtgaggccggggccctgcacctgtgcagcgaagcttagcgttcatccgtgtaacccgctcatcactggatgaagattctcctgtgctagatgtgcaaatgcaagctagtggcttcaaaatagagaatcccactttctatagcagattgtgtaacaattttaatgctatttccccaggggaaaatgaaggttaggatttaacagtcatttaaaaaaaaaatttgttttgacggatgattggattattcatttaaaatgattagaaggcaagtttctagctagaaatatgattttatttgacaaaatttgttgaaattatgtatgtttacatatcacctcatggcctattatattaaaatatggctataaatatataaaaagaaaagataaagatgatctactcagaaatttttatttttctaaggttctcataggaaaagtacatttaatacagcagtgtcatcagaagataacttgagcaccgtcatggcttaatgtttattcctgataataattgatcaaattcatttttttcactggagttacattaatgttaattcagcactgatttcacaacagatcaatttgtaattgcttacatttttacaataaataatctgtacgtaagaac

SEQ ID NO: 603 - DNA, 1256 bp, Homo sapiens; identical to SEQ ID NO: 601
  misc_feature (242)..(242): second gene starts at position 242

SEQ ID NO: 604 - DNA, 32765 bp, Homo sapiens
  misc_feature (615)..(615): second gene starts at position 615
atgtcgacctcgtccttgaggcgccagatgaagaacatcgtccacaactactcagaggcggagatcaaggttcgagaggccacgagcaatgacccctggggcccatccagctccctcatgtcagagattgccgacctcacctacaacgttgtcgccttctcggagatcatgagcatgatctggaagcggctcaatgaccatggcaagaactggcgtcacgtttacaaggccatgacgctgatggagtacctcatcaagaccggctcggagcgcgtgtcgcagcagtgcaaggagaacatgtacgccgtgcagacgctgaaggacttccagtacgtggaccgcgacggcaaggaccagggcgtgaacgtgcgtgagaaagctaagcagctggtggccctgctgcgcgacgaggaccggctgcgggaagagcgggcgcacgcgctcaagaccaaggaaaagctggcacagaccgccacggcctcatcagcagctgtgggctcaggcccccctcccgaggcggagcaggcgtggccgcagagcagcggggaggaggagctgcagctccagctggccctggccatgagcaaggaggaggccgaccaggaggagcggatccgtcgcggggatgacctgcggctgcagatggcaatcgaggagagcaagagggagactgggggcaaggaggagtcgtccctcatggaccttgctgacgtcttcacggccccagctcctgccccgaccacagacccctgggggggcccagcacccatggctgctgccgtccccacggctgcccccacctcggacccctggggcggcccccctgtccctccagctgctgatccctggggaggtccagcccccacgccggcctctggggacccctggaggcctgctgcccctgcaggaccctcagttgacccttggggtgggaccccagcccctgcagctggggaggggcccacgcctgatccatggggaagttccgatggtggggtcccggtcagtgggccctcagcctccgatccctggacaccggccccggccttctcagatccctggggagggtcacctgccaagcccagcaccaatggcacaacagccgggggattcgacacggagcccgacgagttctctgactttgaccgactccgcacggcactgccgacctccgggagcagcgcaggagagctggagctgctggcaggagaggtgccggcccgaagccctggggcgtttgacatgagtggggtcaggggatctctggctgaggctgtgggcagccccccacctgcagccacaccaactcccacgccccccacccggaagacgccggagtcattcctggggcccaatgcagccctcgtcgacctggactcgctggtgagccggccgggccccacgccgcctggagccaaggcctccaaccccttcctgccaggcggaggcccagccactggcccttccgtcaccaaccccttccagcccgcgcctcccgcgacgctcaccctgaaccagctccgtctcagtcctgtgcctcccgtccctggagcgccacccacgtacatctctccccttggcgggggccctggcctgccccccatgatgcccccgctcctggctctcctggtgaacaaggtccctctggagcctctggtcctgctggtccccgaggtccccctggctctgctggtgctcctggcaaagatggactcaacggtctccctggccccattgggccccctggtcctcgcggtcgcactggtgatgctggtcctgttggtccccccggccctcctggacctcctggtccccctggtcctcccagcgctggtttcgacttcagcttcctgccccagccacctcaagagaaggctcacgatggtggccgctactaccgggctgatgatgccaatgtggttcgtgaccgtgacctcgaggtggacaccaccctcaagagcctgagccagcagatcgagaacatccggagcccagagggcagccgcaagaaccccgcccgcacctgccgtgacctcaagatgtgccactctgactggaagagtggagagtactggattgaccccaaccaaggctgcaacctggatgccatcaaagtcttctgcaacatggagactggtgagacctgcgtgtaccccactcagcccagtgtggcccagaagaactggtacatcagcaagaaccccaaggacaagaggcatgtctggttcggcgagagcatgaccgatggattccagttcgagtatggcggccagggctccgaccctgccgatgtggccatccagctgaccttcctgcgcctgatgtccaccgaggcctcccagaacatcacctaccactgcaagaacagcgtggcctacatggaccagcagactggcaacctcaagaaggccctgctcctccagggctccaacgagatcgagatccgcgccgagggcaacagccgcttcacctacagcgtcactgtcgatggctgcacgagtcacaccggagcctggggcaagacagtgattgaatacaaaaccaccaagacctcccgcctgcccatcatcgatgtggcccccttggacgttggtgccccagaccaggaattcggcttcgacgttggccctgtctgcttcctgtaaactccctccatcccaacctggctccctcccacccaaccaactttccccccaacccggaaacagacaagcaacccaaactgaaccccctcaaaagccaaaaaatgggagacaatttcacatggactttggaaaatatttttttcctttgcattcatctctcaaacttagtttttatctttgaccaaccgaacatgaccaaaaaccaaaagtgcattcaaccttaccaaaaaaaaaaaaaaaaaaagaataaataaataactttttaaaaaaggaagcttggtccacttgcttgaagacccatgcgggggtaagtccctttctgcccgttgggcttatgaaaccccaatgctgccctttctgctcctttctccacaccccccttggggcctcccctccactccttcccaaatctgtctccccagaagacacaggaaacaatgtattgtctgcccagcaatcaaaggcaatgctcaaacacccaagtggcccccaccctcagcccgctcctgcccgcccagcacccccaggccctgggggacctggggttctcagactgccaaagaagccttgccatctggcgctcccatggctcttgcaacatctccccttcgtttttgagggggtcatgccgggggagccaccagcccctcactgggttcggaggagagtcaggaagggccacgacaaagcagaaacatcggatttggggaacgcgtgtcaatcccttgtgccgcagggctgggcgggagagactgttctgttccttgtgtaactgtgttgctgaaagactacctcgttcttgtcttgatgtgtcaccggggcaactgcctgggggcggggatgggggcagggtggaagcggctccccattttataccaaaggtgctacatctatgtgatgggtggggtggggagggaatcactggtgctatagaaattgagatgcccccccaggccagcaaatgttcctttttgttcaaagtctatttttattccttgatatttttctttttttttttttttttttgtggatggggacttgtgaatttttctaaaggtgctatttaacatgggaggagagcgtgtgcggctccagcccagcccgctgctcactttccaccctctctccacctgcctctggcttctcaggcctctgctctccgacctctctcctctgaaaccctcctccacagctgcagcccatcctcccggctccctcctagtctgtcctgcgtcctctgtccccgggtttcagagacaacttcccaaagcacaaagcagtttttccccctaggggtgggaggaagcaaaagactctgtacctattttgtatgtgtataataatttgagatgtttttaattattttgattgctggaataaagcatgtggaaatgacccaaacataatcgtcggagcagacgggagtttctcctcggggtcggagcaggaggcacgcggagtgtgaggccacgcatgagcggacgctaaccccctccccagccacaaagagtctacatgtctagggtctagacatgttcagctttgtggacctccggctcctgctcctcttagcggccaccgccctcctgacgcacggccaagaggaaggccaagtcgagggccaagacgaagacatcccaccaatcacctgcgtacagaacggcctcaggtaccatgaccgagacgtgtggaaacccgagccctgccggatctgcgtctgcgacaacggcaaggtgttgtgcgatgacgtgatctgtgacgagaccaagaactgccccggcgccgaagtccccgagggcgagtgctgtcccgtctgccccgacggctcagagtcacccaccgaccaagaaaccaccggcgtcgagggacccaagggagacactggcccccgaggcccaaggggacccgcaggcccccctggccgagatggcatccctggacagcctggacttcccggaccccccggaccccccggacctcccggaccccctggcctcggaggaaactttgctccccagctgtcttatggctatgatgagaaatcaaccggaggaatttccgtgcctggccccatgggtccctctggtcctcgtggtctccctggcccccctggtgcacctggtccccaaggcttccaaggtccccctggtgagcctggcgagcctggagcttcaggtcccatgggtccccgaggtcccccaggtccccctggaaagaatggagatgatggggaagctggaaaacctggtcgtcctggtgagcgtgggcctcctgggcctcagggtgctcgaggattgcccggaacagctggcctccctggaatgaagggacacagaggtttcagtggtttggatggtgccaagggagatgctggtcctgctggtcctaagggtgagcctggcagccctggtgaaaatggagctcctggtcagatgggcccccgtggcctgcctggtgagagaggtcgccctggagcccctggccctgctggtgctcgtggaaatgatggtgctactggtgctgccgggccccctggtcccaccggccccgctggtcctcctggcttccctggtgctgttggtgctaagggtgaagctggtccccaagggccccgaggctctgaaggtccccagggtgtgcgtggtgagcctggcccccctggccctgctggtgctgctggccctgctggaaaccctggtgctgatggacagcctggtgctaaaggtgccaatggtgctcctggtattgctggtgctcctggcttccctggtgcccgaggcccctctggaccccagggccccggcggccctcctggtcccaagggtaacagcggtgaacctggtgctcctggcagcaaaggagacactggtgctaagggagagcctggccctgttggtgttcaaggaccccctggccctgctggagaggaaggaaagcgaggagctcgaggtgaacccggacccactggcctgcccggaccccctggcgagcgtggtggacctggtagccgtggtttccctggcgcagatggtgttgctggtcccaagggtcccgctggtgaacgtggttctcctggccctgctggccccaaaggatctcctggtgaagctggtcgtcccggtgaagctggtctgcctggtgccaagggtctgactggaagccctggcagccctggtcctgatggcaaaactggcccccctggtcccgccggtcaagatggtcgccccggacccccaggcccacctggtgcccgtggtcaggctggtgtgatgggattccctggacctaaaggtgctgctggagagcccggcaaggctggagagcgaggtgttcccggaccccctggcgctgtcggtcctgctggcaaagatggagaggctggagctcagggaccccctggccctgctggtcccgctggcgagagaggtgaacaaggccctgctggctcccccggattccagggtctccctggtcctgctggtcctccaggtgaagcaggcaaacctggtgaacagggtgttcctggagaccttggcgcccctggcccctctggagcaagaggcgagagaggtttccctggcgagcgtggtgtgcaaggtccccctggtcctgctggtccccgaggggccaacggtgctcccggcaacgatggtgctaagggtgatgctggtgcccctggagctcccggtagccagggcgcccctggccttcagggaatgcctggtgaacgtggtgcagctggtcttccagggcctaagggtgacagaggtgatgctggtcccaaaggtgctgatggctctcctggcaaagatggcgtccgtggtctgactggccccattggtcctcctggccctgctggtgcccctggtgacaagggtgaaagtggtcccagcggccctgctggtcccactggagctcgtggtgcccccggagaccgtggtgagcctggtccccccggccctgctggctttgctggcccccctggtgctgacggccaacctggtgctaaaggcgaacctggtgatgctggtgctaaaggcgatgctggtccccctggccctgccggacccgctggaccccctggccccattggtaatgttggtgctcctggagccaaaggtgctcgcggcagcgctggtccccctggtgctactggtttccctggtgctgctggccgagtcggtcctcctggcccctctggaaatgctggaccccctggccctcctggtcctgctggcaaagaaggcggcaaaggtccccgtggtgagactggccctgctggacgtcctggtgaagttggtccccctggtccccctggccctgctggcgagaaaggatcccctggtgctgatggtcctgctggtgctcctggtactcccgggcctcaaggtattgctggacagcgtggtgtggtcggcctgcctggtcagagaggagagagaggcttccctggtcttcctggcccctctggtgaacctggcaaacaaggtccctctggagcaagtggtgaacgtggtccccctggtcccatgggcccccctggattggctggaccccctggtgaatctggacgtgagggggctcctggtgccgaaggttcccctggacgagacggttctcctggcgccaagggtgaccgtggtgagaccggccccgctggaccccctggtgctcctggtgctcctggtgcccctggccccgttggccctgctggcaagagtggtgatcgtggtgagactggtcctgctggtcccaccggtcctgtcggccctgttggcgcccgtggccccgccggaccccaaggcccccgtggtgacaagggtgagacaggcgaacagggcgacagaggcataaagggtcaccgtggcttctctggcctccagggtccccctggccctcctggctctcctggtgaacaaggtccctctggagcctctggtcctgctggtccccgaggtccccctggctctgctggtgctcctggcaaagatggactcaacggtctccctggccccattgggccccctggtcctcgcggtcgcactggtgatgctggtcctgttggtccccccggccctcctggacctcctggtccccctggtcctcccagcgctggtttcgacttcagcttcctgccccagccacctcaagagaaggctcacgatggtggccgctactaccgggctgatgatgccaatgtggttcgtgaccgtgacctcgaggtggacaccaccctcaagagcctgagccagcagatcgagaacatccggagcccagagggcagccgcaagaaccccgcccgcacctgccgtgacctcaagatgtgccactctgactggaagagtggagagtactggattgaccccaaccaaggctgcaacctggatgccatcaaagtcttctgcaacatggagactggtgagacctgcgtgtaccccactcagcccagtgtggcccagaagaactggtacatcagcaagaaccccaaggacaagaggcatgtctggttcggcgagagcatgaccgatggattccagttcgagtatggcggccagggctccgaccctgccgatgtggccatccagctgaccttcctgcgcctgatgtccaccgaggcctcccagaacatcacctaccactgcaagaacagcgtggcctacatggaccagcagactggcaacctcaagaaggccctgctcctccagggctccaacgagatcgagatccgcgccgagggcaacagccgcttcacctacagcgtcactgtcgatggctgcacgagtcacaccggagcctggggcaagacagtgattgaatacaaaaccaccaagacctcccgcctgcccatcatcgatgtggcccccttggacgttggtgccccagaccaggaattcggcttcgacgttggccctgtctgcttcctgtaaactccctccatcccaacctggctccctcccacccaaccaactttccccccaacccggaaacagacaagcaacccaaactgaaccccctcaaaagccaaaaaatgggagacaatttcacatggactttggaaaatatttttttcctttgcattcatctctcaaacttagtttttatctttgaccaaccgaacatgaccaaaaaccaaaagtgcattcaaccttaccaaaaaaaaaaaaaaaaaaagaataaataaataactttttaaaaaaggaagcttggtccacttgcttgaagacccatgcgggggtaagtccctttctgcccgttgggcttatgaaaccccaatgctgccctttctgctcctttctccacaccccccttggggcctcccctccactccttcccaaatctgtctccccagaagacacaggaaacaatgtattgtctgcccagcaatcaaaggcaatgctcaaacacccaagtggcccccaccctcagcccgctcctgcccgcccagcacccccaggccctgggggacctggggttctcagactgccaaagaagccttgccatctggcgctcccatggctcttgcaacatctccccttcgtttttgagggggtcatgccgggggagccaccagcccctcactgggttcggaggagagtcaggaagggccacgacaaagcagaaacatcggatttggggaacgcgtgtcaatcccttgtgccgcagggctgggcgggagagactgttctgttccttgtgtaactgtgttgctgaaagactacctcgttcttgtcttgatgtgtcaccggggcaactgcctgggggcggggatgggggcagggtggaagcggctccccattttataccaaaggtgctacatctatgtgatgggtggggtggggagggaatcactggtgctatagaaattgagatgcccccccaggccagcaaatgttcctttttgttcaaagtctatttttattccttgatatttttctttttttttttttttttttgtggatggggacttgtgaatttttctaaaggtgctatttaacatgggaggagagcgtgtgcggctccagcccagcccgctgctcactttccaccctctctccacctgcctctggcttctcaggcctctgctctccgacctctctcctctgaaaccctcctccacagctgcagcccatcctcccggctccctcctagtctgtcctgcgtcctctgtccccgggtttcagagacaacttcccaaagcacaaagcagtttttccccctaggggtgggaggaagcaaaagactctgtacctattttgtatgtgtataataatttgagatgtttttaattattttgattgctggaataaagcatgtggaaatgacccaaacataatcgtcggagcagacgggagtttctcctcggggtcggagcaggaggcacgcggagtgtgaggccacgcatgagcggacgctaaccccctccccagccacaaagagtctacatgtctagggtctagacatgttcagctttgtggacctccggctcctgctcctcttagcggccaccgccctcctgacgcacggccaagaggaaggccaagtcgagggccaagacgaagacatcccaccaatcacctgcgtacagaacggcctcaggtaccatgaccgagacgtgtggaaacccgagccctgccggatctgcgtctgcgacaacggcaaggtgttgtgcgatgacgtgatctgtgacgagaccaagaactgccccggcgccgaagtccccgagggcgagtgctgtcccgtctgccccgacggctcagagtcacccaccgaccaagaaaccaccggcgtcgagggacccaagggagacactggcccccgaggcccaaggggacccgcaggcccccctggccgagatggcatccctggacagcctggacttcccggaccccccggaccccccggacctcccggaccccctggcctcggaggaaactttgctccccagctgtcttatggctatgatgagaaatcaaccggaggaatttccgtgcctggccccatgggtccctctggtcctcgtggtctccctggcccccctggtgcacctggtccccaaggcttccaaggtccccctggtgagcctggcgagcctggagcttcaggtcccatgggtccccgaggtcccccaggtccccctggaaagaatggagatgatggggaagctggaaaacctggtcgtcctggtgagcgtgggcctcctgggcctcagggtgctcgaggattgcccggaacagctggcctccctggaatgaagggacacagaggtttcagtggtttggatggtgccaagggagatgctggtcctgctggtcctaagggtgagcctggcagccctggtgaaaatggagctcctggtcagatgggcccccgtggcctgcctggtgagagaggtcgccctggagcccctggccctgctggtgctcgtggaaatgatggtgctactggtgctgccgggccccctggtcccaccggccccgctggtcctcctggcttccctggtgctgttggtgctaagggtgaagctggtccccaagggccccgaggctctgaaggtccccagggtgtgcgtggtgagcctggcccccctggccctgctggtgctgctggccctgctggaaaccctggtgctgatggacagcctggtgctaaaggtgccaatggtgctcctggtattgctggtgctcctggcttccctggtgcccgaggcccctctggaccccagggccccggcggccctcctggtcccaagggtaacagcggtgaacctggtgctcctggcagcaaaggagacactggtgctaagggagagcctggccctgttggtgttcaaggaccccctggccctgctggagaggaaggaaagcgaggagctcgaggtgaacccggacccactggcctgcccggaccccctggcgagcgtggtggacctggtagccgtggtttccctggcgcagatggtgttgctggtcccaagggtcccgctggtgaacgtggttctcctggccctgctggccccaaaggatctcctggtgaagctggtcgtcccggtgaagctggtctgcctggtgccaagggtctgactggaagccctggcagccctggtcctgatggcaaaactggcccccctggtcccgccggtcaagatggtcgccccggacccccaggcccacctggtgcccgtggtcaggctggtgtgatgggattccctggacctaaaggtgctgctggagagcccggcaaggctggagagcgaggtgttcccggaccccctggcgctgtcggtcctgctggcaaagatggagaggctggagctcagggaccccctggccctgctggtcccgctggcgagagaggtgaacaaggccctgctggctcccccggattccagggtctccctggtcctgctggtcctccaggtgaagcaggcaaacctggtgaacagggtgttcctggagaccttggcgcccctggcccctctggagcaagaggcgagagaggtttccctggcgagcgtggtgtgcaaggtccccctggtcctgctggtccccgaggggccaacggtgctcccggcaacgatggtgctaagggtgatgctggtgcccctggagctcccggtagccagggcgcccctggccttcagggaatgcctggtgaacgtggtgcagctggtcttccagggcctaagggtgacagaggtgatgctggtcccaaaggtgctgatggctctcctggcaaagatggcgtccgtggtctgactggccccattggtcctcctggccctgctggtgcccctggtgacaagggtgaaagtggtcccagcggccctgctggtcccactggagctcgtggtgcccccggagaccgtggtgagcctggtccccccggccctgctggctttgctggcccccctggtgctgacggccaacctggtgctaaaggcgaacctggtgatgctggtgctaaaggcgatgctggtccccctggccctgccggacccgctggaccccctggccccattggtaatgttggtgctcctggagccaaaggtgctcgcggcagcgctggtccccctggtgctactggtttccctggtgctgctggccgagtcggtcctcctggcccctctggaaatgctggaccccctggccctcctggtcctgctggcaaagaaggcggcaaaggtccccgtggtgagactggccctgctggacgtcctggtgaagttggtccccctggtccccctggccctgctggcgagaaaggatcccctggtgctgatggtcctgctggtgctcctggtactcccgggcctcaaggtattgctggacagcgtggtgtggtcggcctgcctggtcagagaggagagagaggcttccctggtcttcctggcccctctggtgaacctggcaaacaaggtccctctggagcaagtggtgaacgtggtccccctggtcccatgggcccccctggattggctggaccccctggtgaatctggacgtgagggggctcctggtgccgaaggttcccctggacgagacggttctcctggcgccaagggtgaccgtggtgagaccggccccgctggaccccctggtgctcctggtgctcctggtgcccctggccccgttggccctgctggcaagagtggtgatcgtggtgagactggtcctgctggtcccaccggtcctgtcggccctgttggcgcccgtggccccgccggaccccaaggcccccgtggtgacaagggtgagacaggcgaacagggcgacagaggcataaagggtcaccgtggcttctctggcctccagggtccccctggccctcctggctctcctggtgaacaaggtccctctggagcctctggtcctgctggtccccgaggtccccctggctctgctggtgctcctggcaaagatggactcaacggtctccctggccccattgggccccctggtcctcgcggtcgcactggtgatgctggtcctgttggtccccccggccctcctggacctcctggtccccctggtcctcccagcgctggtttcgacttcagcttcctgccccagccacctcaagagaaggctcacgatggtggccgctactaccgggctgatgatgccaatgtggttcgtgaccgtgacctcgaggtggacaccaccctcaagagcctgagccagcagatcgagaacatccggagcccagagggcagccgcaagaaccccgcccgcacctgccgtgacctcaagatgtgccactctgactggaagagtggagagtactggattgaccccaaccaaggctgcaacctggatgccatcaaagtcttctgcaacatggagactggtgagacctgcgtgtaccccactcagcccagtgtggcccagaagaactggtacatcagcaagaaccccaaggacaagaggcatgtctggttcggcgagagcatgaccgatggattccagttcgagtatggcggccagggctccgaccctgccgatgtggccatccagctgaccttcctgcgcctgatgtccaccgaggcctcccagaacatcacctaccactgcaagaacagcgtggcctacatggaccagcagactggcaacctcaagaaggccctgctcctccagggctccaacgagatcgagatccgcgccgagggcaacagccgcttcacctacagcgtcactgtcgatggctgcacgagtcacaccggagcctggggcaagacagtgattgaatacaaaaccaccaagacctcccgcctgcccatcatcgatgtggcccccttggacgttggtgccccagaccaggaattcggcttcgacgttggccctgtctgcttcctgtaaactccctccatcccaacctggctccctcccacccaaccaactttccccccaacccggaaacagacaagcaacccaaactgaaccccctcaaaagccaaaaaatgggagacaatttcacatggactttggaaaatatttttttcctttgcattcatctctcaaacttagtttttatctttgaccaaccgaacatgaccaaaaaccaaaagtgcattcaaccttaccaaaaaaaaaaaaaaaaaaagaataaataaataactttttaaaaaaggaagcttggtccacttgcttgaagacccatgcgggggtaagtccctttctgcccgttgggcttatgaaaccccaatgctgccctttctgctcctttctccacaccccccttggggcctcccctccactccttcccaaatctgtctccccagaagacacaggaaacaatgtattgtctgcccagcaatcaaaggcaatgctcaaacacccaagtggcccccaccctcagcccgctcctgcccgcccagcacccccaggccctgggggacctggggttctcagactgccaaagaagccttgccatctggcgctcccatggctcttgcaacatctccccttcgtttttgagggggtcatgccgggggagccaccagcccctcactgggttcggaggagagtcaggaagggccacgacaaagcagaaacatcggatttggggaacgcgtgtcaatcccttgtgccgcagggctgggcgggagagactgttctgttccttgtgtaactgtgttgctgaaagactacctcgttcttgtcttgatgtgtcaccggggcaactgcctgggggcggggatgggggcagggtggaagcggctccccattttataccaaaggtgctacatctatgtgatgggtggggtggggagggaatcactggtgctatagaaattgagatgcccccccaggccagcaaatgttcctttttgttcaaagtctatttttattccttgatatttttctttttttttttttttttttgtggatggggacttgtgaatttttctaaaggtgctatttaacatgggaggagagcgtgtgcggctccagcccagcccgctgctcactttccaccctctctccacctgcctctggcttctcaggcctctgctctccgacctctctcctctgaaaccctcctccacagctgcagcccatcctcccggctccctcctagtctgtcctgcgtcctctgtccccgggtttcagagacaacttcccaaagcacaaagcagtttttccccctaggggtgggaggaagcaaaagactctgtacctattttgtatgtgtataataatttgagatgtttttaattattttgattgctggaataaagcatgtggaaatgacccaaacataatcgtcggagcagacgggagtttctcctcggggtcggagcaggaggcacgcggagtgtgaggccacgcatgagcggacgctaaccccctccccagccacaaagagtctacatgtctagggtctagacatgttcagctttgtggacctccggctcctgctcctcttagcggccaccgccctcctgacgcacggccaagaggaaggccaagtcgagggccaagacgaagacatcccaccaatcacctgcgtacagaacggcctcaggtaccatgaccgagacgtgtggaaacccgagccctgccggatctgcgtctgcgacaacggcaaggtgttgtgcgatgacgtgatctgtgacgagaccaagaactgccccggcgccgaagtccccgagggcgagtgctgtcccgtctgccccgacggctcagagtcacccaccgaccaagaaaccaccggcgtcgagggacccaagggagacactggcccccgaggcccaaggggacccgcaggcccccctggccgagatggcatccctggacagcctggacttcccggaccccccggaccccccggacctcccggaccccctggcctcggaggaaactttgctccccagctgtcttatggctatgatgagaaatcaaccggaggaatttccgtgcctggccccatgggtccctctggtcctcgtggtctccctggcccccctggtgcacctggtccccaaggcttccaaggtccccctggtgagcctggcgagcctggagcttcaggtcccatgggtccccgaggtcccccaggtccccctggaaagaatggagatgatggggaagctggaaaacctggtcgtcctggtgagcgtgggcctcctgggcctcagggtgctcgaggattgcccggaacagctggcctccctggaatgaagggacacagaggtttcagtggtttggatggtgccaagggagatgctggtcctgctggtcctaagggtgagcctggcagccctggtgaaaatggagctcctggtcagatgggcccccgtggcctgcctggtgagagaggtcgccctggagcccctggccctgctggtgctcgtggaaatgatggtgctactggtgctgccgggccccctggtcccaccggccccgctggtcctcctggcttccctggtgctgttggtgctaagggtgaagctggtccccaagggccccgaggctctgaaggtccccagggtgtgcgtggtgagcctggcccccctggccctgctggtgctgctggccctgctggaaaccctggtgctgatggacagcctggtgctaaaggtgccaatggtgctcctggtattgctggtgctcctggcttccctggtgcccgaggcccctctggaccccagggccccggcggccctcctggtcccaagggtaacagcggtgaacctggtgctcctggcagcaaaggagacactggtgctaagggagagcctggccctgttggtgttcaaggaccccctggccctgctggagaggaaggaaagcgaggagctcgaggtgaacccggacccactggcctgcccggaccccctggcgagcgtggtggacctggtagccgtggtttccctggcgcagatggtgttgctggtcccaagggtcccgctggtgaacgtggttctcctggccctgctggccccaaaggatctcctggtgaagctggtcgtcccggtgaagctggtctgcctggtgccaagggtctgactggaagccctggcagccctggtcctgatggcaaaactggcccccctggtcccgccggtcaagatggtcgccccggacccccaggcccacctggtgcccgtggtcaggctggtgtgatgggattccctggacctaaaggtgctgctggagagcccggcaaggctggagagcgaggtgttcccggaccccctggcgctgtcggtcctgctggcaaagatggagaggctggagctcagggaccccctggccctgctggtcccgctggcgagagaggtgaacaaggccctgctggctcccccggattccagggtctccctggtcctgctggtcctccaggtgaagcaggcaaacctggtgaacagggtgttcctggagaccttggcgcccctggcccctctggagcaagaggcgagagaggtttccctggcgagcgtggtgtgcaaggtccccctggtcctgctggtccccgaggggccaacggtgctcccggcaacgatggtgctaagggtgatgctggtgcccctggagctcccggtagccagggcgcccctggccttcagggaatgcctggtgaacgtggtgcagctggtcttccagggcctaagggtgacagaggtgatgctggtcccaaaggtgctgatggctctcctggcaaagatggcgtccgtggtctgactggccccattggtcctcctggccctgctggtgcccctggtgacaagggtgaaagtggtcccagcggccctgctggtcccactggagctcgtggtgcccccggagaccgtggtgagcctggtccccccggccctgctggctttgctggcccccctggtgctgacggccaacctggtgctaaaggcgaacctggtgatgctggtgctaaaggcgatgctggtccccctggccctgccggacccgctggaccccctggccccattggtaatgttggtgctcctggagccaaaggtgctcgcggcagcgctggtccccctggtgctactggtttccctggtgctgctggccgagtcggtcctcctggcccctctggaaatgctggaccccctggccctcctggtcctgctggcaaagaaggcggcaaaggtccccgtggtgagactggccctgctggacgtcctggtgaagttggtccccctggtccccctggccctgctggcgagaaaggatcccctggtgctgatggtcctgctggtgctcctggtactcccgggcctcaaggtattgctggacagcgtggtgtggtcggcctgcctggtcagagaggagagagaggcttccctggtcttcctggcccctctggtgaacctggcaaacaaggtccctctggagcaagtggtgaacgtggtccccctggtcccatgggcccccctggattggctggaccccctggtgaatctggacgtgagggggctcctggtgccgaaggttcccctggacgagacggttctcctggcgccaagggtgaccgtggtgagaccggccccgctggaccccctggtgctcctggtgctcctggtgcccctggccccgttggccctgctggcaagagtggtgatcgtggtgagactggtcctgctggtcccaccggtcctgtcggccctgttggcgcccgtggccccgccggaccccaaggcccccgtggtgacaagggtgagacaggcgaacagggcgacagaggcataaagggtcaccgtggcttctctggcctccagggtccccctggccctcctggctctcctggtgaacaaggtccctctggagcctctggtcctgctggtccccgaggtccccctggctctgctggtgctcctggcaaagatggactcaacggtctccctggccccattgggccccctggtcctcgcggtcgcactggtgatgctggtcctgttggtccccccggccctcctggacctcctggtccccctggtcctcccagcgctggtttcgacttcagcttcctgccccagccacctcaagagaaggctcacgatggtggccgctactaccgggctgatgatgccaatgtggttcgtgaccgtgacctcgaggtggacaccaccctcaagagcctgagccagcagatcgagaacatccggagcccagagggcagccgcaagaaccccgcccgcacctgccgtgacctcaagatgtgccactctgactggaagagtggagagtactggattgaccccaaccaaggctgcaacctggatgccatcaaagtcttctgcaacatggagactggtgagacctgcgtgtaccccactcagcccagtgtggcccagaagaactggtacatcagcaagaaccccaaggacaagaggcatgtctggttcggcgagagcatgaccgatggattccagttcgagtatggcggccagggctccgaccctgccgatgtggccatccagctgaccttcctgcgcctgatgtccaccgaggcctcccagaacatcacctaccactgcaagaacagcgtggcctacatggaccagcagactggcaacctcaagaaggccctgctcctccagggctccaacgagatcgagatccgcgccgagggcaacagccgcttcacctacagcgtcactgtcgatggctgcacgagtcacaccggagcctggggcaagacagtgattgaatacaaaaccaccaagacctcccgcctgcccatcatcgatgtggcccccttggacgttggtgccccagaccaggaattcggcttcgacgttggccctgtctgcttcctgtaaactccctccatcccaacctggctccctcccacccaaccaactttccccccaacccggaaacagacaagcaacccaaactgaaccccctcaaaagccaaaaaatgggagacaatttcacatggactttggaaaatatttttttcctttgcattcatctctcaaacttagtttttatctttgaccaaccgaacatgaccaaaaaccaaaagtgcattcaaccttaccaaaaaaaaaaaaaaaaaaagaataaataaataactttttaaaaaaggaagcttggtccacttgcttgaagacccatgcgggggtaagtccctttctgcccgttgggcttatgaaaccccaatgctgccctttctgctcctttctccacaccccccttggggcctcccctccactccttcccaaatctgtctccccagaagacacaggaaacaatgtattgtctgcccagcaatcaaaggcaatgctcaaacacccaagtggcccccaccctcagcccgctcctgcccgcccagcacccccaggccctgggggacctggggttctcagactgccaaagaagccttgccatctggcgctcccatggctcttgcaacatctccccttcgtttttgagggggtcatgccgggggagccaccagcccctcactgggttcggaggagagtcaggaagggccacgacaaagcagaaacatcggatttggggaacgcgtgtcaatcccttgtgccgcagggctgggcgggagagactgttctgttccttgtgtaactgtgttgctgaaagactacctcgttcttgtcttgatgtgtcaccggggcaactgcctgggggcggggatgggggcagggtggaagcggctccccattttataccaaaggtgctacatctatgtgatgggtggggtggggagggaatcactggtgctatagaaattgagatgcccccccaggccagcaaatgttcctttttgttcaaagtctatttttattccttgatatttttctttttttttttttttttttgtggatggggacttgtgaatttttctaaaggtgctatttaacatgggaggagagcgtgtgcggctccagcccagcccgctgctcactttccaccctctctccacctgcctctggcttctcaggcctctgctctccgacctctctcctctgaaaccctcctccacagctgcagcccatcctcccggctccctcctagtctgtcctgcgtcctctgtccccgggtttcagagacaacttcccaaagcacaaagcagtttttccccctaggggtgggaggaagcaaaagactctgtacctattttgtatgtgtataataatttgagatgtttttaattattttgattgctggaataaagcatgtggaaatgacccaaacataatcgtcggagcagacgggagtttctcctcggggtcggagcaggaggcacgcggagtgtgaggccacgcatgagcggacgctaaccccctccccagccacaaagagtctacatgtctagggtctagacatgttcagctttgtggacctccggctcctgctcctcttagcggccaccgccctcctgacgcacggccaagaggaaggccaagtcgagggccaagacgaagacatcccaccaatcacctgcgtacagaacggcctcaggtaccatgaccgagacgtgtggaaacccgagccctgccggatctgcgtctgcgacaacggcaaggtgttgtgcgatgacgtgatctgtgacgagaccaagaactgccccggcgccgaagtccccgagggcgagtgctgtcccgtctgccccgacggctcagagtcacccaccgaccaagaaaccaccggcgtcgagggacccaagggagacactggcccccgaggcccaaggggacccgcaggcccccctggccgagatggcatccctggacagcctggacttcccggaccccccggaccccccggacctcccggaccccctggcctcggaggaaactttgctccccagctgtcttatggctatgatgagaaatcaaccggaggaatttccgtgcctggccccatgggtccctctggtcctcgtggtctccctggcccccctggtgcacctggtccccaaggcttccaaggtccccctggtgagcctggcgagcctggagcttcaggtcccatgggtccccgaggtcccccaggtccccctggaaagaatggagatgatggggaagctggaaaacctggtcgtcctggtgagcgtgggcctcctgggcctcagggtgctcgaggattgcccggaacagctggcctccctggaatgaagggacacagaggtttcagtggtttggatggtgccaagggagatgctggtcctgctggtcctaagggtgagcctggcagccctggtgaaaatggagctcctggtcagatgggcccccgtggcctgcctggtgagagaggtcgccctggagcccctggccctgctggtgctcgtggaaatgatggtgctactggtgctgccgggccccctggtcccaccggccccgctggtcctcctggcttccctggtgctgttggtgctaagggtgaagctggtccccaagggccccgaggctctgaaggtccccagggtgtgcgtggtgagcctggcccccctggccctgctggtgctgctggccctgctggaaaccctggtgctgatggacagcctggtgctaaaggtgccaatggtgctcctggtattgctggtgctcctggcttccctggtgcccgaggcccctctggaccccagggccccggcggccctcctggtcccaagggtaacagcggtgaacctggtgctcctggcagcaaaggagacactggtgctaagggagagcctggccctgttggtgttcaaggaccccctggccctgctggagaggaaggaaagcgaggagctcgaggtgaacccggacccactggcctgcccggaccccctggcgagcgtggtggacctggtagccgtggtttccctggcgcagatggtgttgctggtcccaagggtcccgctggtgaacgtggttctcctggccctgctggccccaaaggatctcctggtgaagctggtcgtcccggtgaagctggtctgcctggtgccaagggtctgactggaagccctggcagccctggtcctgatggcaaaactggcccccctggtcccgccggtcaagatggtcgccccggacccccaggcccacctggtgcccgtggtcaggctggtgtgatgggattccctggacctaaaggtgctgctggagagcccggcaaggctggagagcgaggtgttcccggaccccctggcgctgtcggtcctgctggcaaagatggagaggctggagctcagggaccccctggccctgctggtcccgctggcgagagaggtgaacaaggccctgctggctcccccggattccagggtctccctggtcctgctggtcctccaggtgaagcaggcaaacctggtgaacagggtgttcctggagaccttggcgcccctggcccctctggagcaagaggcgagagaggtttccctggcgagcgtggtgtgcaaggtccccctggtcctgctggtccccgaggggccaacggtgctcccggcaacgatggtgctaagggtgatgctggtgcccctggagctcccggtagccagggcgcccctggccttcagggaatgcctggtgaacgtggtgcagctggtcttccagggcctaagggtgacagaggtgatgctggtcccaaaggtgctgatggctctcctggcaaagatggcgtccgtggtctgactggccccattggtcctcctggccctgctggtgcccctggtgacaagggtgaaagtggtcccagcggccctgctggtcccactggagctcgtggtgcccccggagaccgtggtgagcctggtccccccggccctgctggctttgctggcccccctggtgctgacggccaacctggtgctaaaggcgaacctggtgatgctggtgctaaaggcgatgctggtccccctggccctgccggacccgctggaccccctggccccattggtaatgttggtgctcctggagccaaaggtgctcgcggcagcgctggtccccctggtgctactggtttccctggtgctgctggccgagtcggtcctcctggcccctctggaaatgctggaccccctggccctcctggtcctgctggcaaagaaggcggcaaaggtccccgtggtgagactggccctgctggacgtcctggtgaagttggtccccctggtccccctggccctgctggcgagaaaggatcccctggtgctgatggtcctgctggtgctcctggtactcccgggcctcaaggtattgctggacagcgtggtgtggtcggcctgcctggtcagagaggagagagaggcttccctggtcttcctggcccctctggtgaacctggcaaacaaggtccctctggagcaagtggtgaacgtggtccccctggtcccatgggcccccctggattggctggaccccctggtgaatctggacgtgagggggctcctggtgccgaaggttcccctggacgagacggttctcctggcgccaagggtgaccgtggtgagaccggccccgctggaccccctggtgctcctggtgctcctggtgcccctggccccgttggccctgctggcaagagtggtgatcgtggtgagactggtcctgctggtcccaccggtcctgtcggccctgttggcgcccgtggccccgccggaccccaaggcccccgtggtgacaagggtgagacaggcgaacagggcgacagaggcataaagggtcaccgtggcttctctggcctccagggtccccctggccctcctggctctcctggtgaacaaggtccctctggagcctctggtcctgctggtccccgaggtccccctggctctgctggtgctcctggcaaagatggactcaacggtctccctggccccattgggccccctggtcctcgcggtcgcactggtgatgctggtcctgttggtccccccggccctcctggacctcctggtccccctggtcctcccagcgctggtttcgacttcagcttcctgccccagccacctcaagagaaggctcacgatggtggccgctactaccgggctgatgatgccaatgtggttcgtgaccgtgacctcgaggtggacaccaccctcaagagcctgagccagcagatcgagaacatccggagcccagagggcagccgcaagaaccccgcccgcacctgccgtgacctcaagatgtgccactctgactggaagagtggagagtactggattgaccccaaccaaggctgcaacctggatgccatcaaagtcttctgcaacatggagactggtgagacctgcgtgtaccccactcagcccagtgtggcccagaagaactggtacatcagcaagaaccccaaggacaagaggcatgtctggttcggcgagagcatgaccgatggattccagttcgagtatggcggccagggctccgaccctgccgatgtggccatccagctgaccttcctgcgcctgatgtccaccgaggcctcccagaacatcacctaccactgcaagaacagcgtggcctacatggaccagcagactggcaacctcaagaaggccctgctcctccagggctccaacgagatcgagatccgcgccgagggcaacagccgcttcacctacagcgtcactgtcgatggctgcacgagtcacaccggagcctggggcaagacagtgattgaatacaaaaccaccaagacctcccgcctgcccatcatcgatgtggcccccttggacgttggtgccccagaccaggaattcggcttcgacgttggccctgtctgcttcctgtaaactccctccatcccaacctggctccctcccacccaaccaactttccccccaacccggaaacagacaagcaacccaaactgaaccccctcaaaagccaaaaaatgggagacaatttcacatggactttggaaaatatttttttcctttgcattcatctctcaaacttagtttttatctttgaccaaccgaacatgaccaaaaaccaaaagtgcattcaaccttaccaaaaaaaaaaaaaaaaaaagaataaataaataactttttaaaaaaggaagcttggtccacttgcttgaagacccatgcgggggtaagtccctttctgcccgttgggcttatgaaaccccaatgctgccctttctgctcctttctccacaccccccttggggcctcccctccactccttcccaaatctgtctccccagaagacacaggaaacaatgtattgtctgcccagcaatcaaaggcaatgctcaaacacccaagtggcccccaccctcagcccgctcctgcccgcccagcacccccaggccctgggggacctggggttctcagactgccaaagaagccttgccatctggcgctcccatggctcttgcaacatctccccttcgtttttgagggggtcatgccgggggagccaccagcccctcactgggttcggaggagagtcaggaagggccacgacaaagcagaaacatcggatttggggaacgcgtgtcaatcccttgtgccgcagggctgggcgggagagactgttctgttccttgtgtaactgtgttgctgaaagactacctcgttcttgtcttgatgtgtcaccggggcaactgcctgggggcggggatgggggcagggtggaagcggctccccattttataccaaaggtgctacatctatgtgatgggtggggtggggagggaatcactggtgctatagaaattgagatgcccccccaggccagcaaatgttcctttttgttcaaagtctatttttattccttgatatttttctttttttttttttttttttgtggatggggacttgtgaatttttctaaaggtgctatttaacatgggaggagagcgtgtgcggctccagcccagcccgctgctcactttccaccctctctccacctgcctctggcttctcaggcctctgctctccgacctctctcctctgaaaccctcctccacagctgcagcccatcctcccggctccctcctagtctgtcctgcgtcctctgtccccgggtttcagagacaacttcccaaagcacaaagcagtttttccccctaggggtgggaggaagcaaaagactctgtacctattttgtatgtgtataataatttgagatgtttttaattattttgattgctggaataaagcatgtggaaatgacccaaacataatcgtcggagcagacgggagtttctcctcggggtcggagcaggaggcacgcggagtgtgaggccacgcatgagcggacgctaaccccctccccagccacaaagagtctacatgtctagggtctagacatgttcagctttgtggacctccggctcctgctcctcttagcggccaccgccctcctgacgcacggccaagaggaaggccaagtcgagggccaagacgaagacatcccaccaatcacctgcgtacagaacggcctcaggtaccatgaccgagacgtgtggaaacccgagccctgccggatctgcgtctgcgacaacggcaaggtgttgtgcgatgacgtgatctgtgacgagaccaagaactgccccggcgccgaagtccccgagggcgagtgctgtcccgtctgccccgacggctcagagtcacccaccgaccaagaaaccaccggcgtcgagggacccaagggagacactggcccccgaggcccaaggggacccgcaggcccccctggccgagatggcatccctggacagcctggacttcccggaccccccggaccccccggacctcccggaccccctggcctcggaggaaactttgctccccagctgtcttatggctatgatgagaaatcaaccggaggaatttccgtgcctggccccatgggtccctctggtcctcgtggtctccctggcccccctggtgcacctggtccccaaggcttccaaggtccccctggtgagcctggcgagcctggagcttcaggtcccatgggtccccgaggtcccccaggtccccctggaaagaatggagatgatggggaagctggaaaacctggtcgtcctggtgagcgtgggcctcctgggcctcagggtgctcgaggattgcccggaacagctggcctccctggaatgaagggacacagaggtttcagtggtttggatggtgccaagggagatgctggtcctgctggtcctaagggtgagcctggcagccctggtgaaaatggagctcctggtcagatgggcccccgtggcctgcctggtgagagaggtcgccctggagcccctggccctgctggtgctcgtggaaatgatggtgctactggtgctgccgggccccctggtcccaccggccccgctggtcctcctggcttccctggtgctgttggtgctaagggtgaagctggtccccaagggccccgaggctctgaaggtccccagggtgtgcgtggtgagcctggcccccctggccctgctggtgctgctggccctgctggaaaccctggtgctgatggacagcctggtgctaaaggtgccaatggtgctcctggtattgctggtgctcctggcttccctggtgcccgaggcccctctggaccccagggccccggcggccctcctggtcccaagggtaacagcggtgaacctggtgctcctggcagcaaaggagacactggtgctaagggagagcctggccctgttggtgttcaaggaccccctggccctgctggagaggaaggaaagcgaggagctcgaggtgaacccggacccactggcctgcccggaccccctggcgagcgtggtggacctggtagccgtggtttccctggcgcagatggtgttgctggtcccaagggtcccgctggtgaacgtggttctcctggccctgctggccccaaaggatctcctggtgaagctggtcgtcccggtgaagctggtctgcctggtgccaagggtctgactggaagccctggcagccctggtcctgatggcaaaactggcccccctggtcccgccggtcaagatggtcgccccggacccccaggcccacctggtgcccgtggtcaggctggtgtgatgggattccctggacctaaaggtgctgctggagagcccggcaaggctggagagcgaggtgttcccggaccccctggcgctgtcggtcctgctggcaaagatggagaggctggagctcagggaccccctggccctgctggtcccgctggcgagagaggtgaacaaggccctgctggctcccccggattccagggtctccctggtcctgctggtcctccaggtgaagcaggcaaacctggtgaacagggtgttcctggagaccttggcgcccctggcccctctggagcaagaggcgagagaggtttccctggcgagcgtggtgtgcaaggtccccctggtcctgctggtccccgaggggccaacggtgctcccggcaacgatggtgctaagggtgatgctggtgcccctggagctcccggtagccagggcgcccctggccttcagggaatgcctggtgaacgtggtgcagctggtcttccagggcctaagggtgacagaggtgatgctggtcccaaaggtgctgatggctctcctggcaaagatggcgtccgtggtctgactggccccattggtcctcctggccctgctggtgcccctggtgacaagggtgaaagtggtcccagcggccctgctggtcccactggagctcgtggtgcccccggagaccgtggtgagcctggtccccccggccctgctggctttgctggcccccctggtgctgacggccaacctggtgctaaaggcgaacctggtgatgctggtgctaaaggcgatgctggtccccctggccctgccggacccgctggaccccctggccccattggtaatgttggtgctcctggagccaaaggtgctcgcggcagcgctggtccccctggtgctactggtttccctggtgctgctggccgagtcggtcctcctggcccctctggaaatgctggaccccctggccctcctggtcctgctggcaaagaaggcggcaaaggtccccgtggtgagactggccctgctggacgtcctggtgaagttggtccccctggtccccctggccctgctggcgagaaaggatcccctggtgctgatggtcctgctggtgctcctggtactcccgggcctcaaggtattgctggacagcgtggtgtggtcggcctgcctggtcagagaggagagagaggcttccctggtcttcctggcccctctggtgaacctggcaaacaaggtccctctggagcaagtggtgaacgtggtccccctggtcccatgggcccccctggattggctggaccccctggtgaatctggacgtgagggggctcctggtgccgaaggttcccctggacgagacggttctcctggcgccaagggtgaccgtggtgagaccggccccgctggaccccctggtgctcctggtgctcctggtgcccctggccccgttggccctgctggcaagagtggtgatcgtggtgagactggtcctgctggtcccaccggtcctgtcggccctgttggcgcccgtggccccgccggaccccaaggcccccgtggtgacaagggtgagacaggcgaacagggcgacagaggcataaagggtcaccgtggcttctctggcctccagggtccccctggccctcctggctctcctggtgaacaaggtccctctggagcctctggtcctgctggtccccgaggtccccctggctctgctggtgctcctggcaaagatggactcaacggtctccctggccccattgggccccctggtcctcgcggtcgcactggtgatgctggtcctgttggtccccccggccctcctggacctcctggtccccctggtcctcccagcgctggtttcgacttcagcttcctgccccagccacctcaagagaaggctcacgatggtggccgctactaccgggctgatgatgccaatgtggttcgtgaccgtgacctcgaggtggacaccaccctcaagagcctgagccagcagatcgagaacatccggagcccagagggcagccgcaagaaccccgcccgcacctgccgtgacctcaagatgtgccactctgactggaagagtggagagtactggattgaccccaaccaaggctgcaacctggatgccatcaaagtcttctgcaacatggagactggtgagacctgcgtgtaccccactcagcccagtgtggcccagaagaactggtacatcagcaagaaccccaaggacaagaggcatgtctggttcggcgagagcatgaccgatggattccagttcgagtatggcggccagggctccgaccctgccgatgtggccatccagctgaccttcctgcgcctgatgtccaccgaggcctcccagaacatcacctaccactgcaagaacagcgtggcctacatggaccagcagactggcaacctcaagaaggccctgctcctccagggctccaacgagatcgagatccgcgccgagggcaacagccgcttcacctacagcgtcactgtcgatggctgcacgagtcacaccggagcctggggcaagacagtgattgaatacaaaaccaccaagacctcccgcctgcccatcatcgatgtggcccccttggacgttggtgccccagaccaggaattcggcttcgacgttggccctgtctgcttcctgtaaactccctccatcccaacctggctccctcccacccaaccaactttccccccaacccggaaacagacaagcaacccaaactgaaccccctcaaaagccaaaaaatgggagacaatttcacatggactttggaaaatatttttttcctttgcattcatctctcaaacttagtttttatctttgaccaaccgaacatgaccaaaaaccaaaagtgcattcaaccttaccaaaaaaaaaaaaaaaaaaagaataaataaataactttttaaaaaaggaagcttggtccacttgcttgaagacccatgcgggggtaagtccctttctgcccgttgggcttatgaaaccccaatgctgccctttctgctcctttctccacaccccccttggggcctcccctccactccttcccaaatctgtctccccagaagacacaggaaacaatgtattgtctgcccagcaatcaaaggcaatgctcaaacacccaagtg

SEQ ID NO: 605 - DNA, 32765 bp, Homo sapiens
  misc_feature (693)..(693): second gene starts at position 693
atgtcgacctcgtccttgaggcgccagatgaagaacatcgtccacaactactcagaggcggagatcaaggttcgagaggccacgagcaatgacccctggggcccatccagctccctcatgtcagagattgccgacctcacctacaacgttgtcgccttctcggagatcatgagcatgatctggaagcggctcaatgaccatggcaagaactggcgtcacgtttacaaggccatgacgctgatggagtacctcatcaagaccggctcggagcgcgtgtcgcagcagtgcaaggagaacatgtacgccgtgcagacgctgaaggacttccagtacgtggaccgcgacggcaaggaccagggcgtgaacgtgcgtgagaaagctaagcagctggtggccctgctgcgcgacgaggaccggctgcgggaagagcgggcgcacgcgctcaagaccaaggaaaagctggcacagaccgccacggcctcatcagcagctgtgggctcaggcccccctcccgaggcggagcaggcgtggccgcagagcagcggggaggaggagctgcagctccagctggccctggccatgagcaaggaggaggccgaccagcccccgtcctgcggccccgaggacgacgcccagctccagctggcccttagtttgagccgagaagagcatgataaggaggagcggatccgtcgcggggatgacctgcggctgcagatggcaatcgaggagagcaagagggagactgggggcaaggaggagtcgtccctcatggaccttgctgacgtcttcacggccccagctcctgccccgaccacagacccctgggggggcccagcacccatggctgctgccgtccccacggctgcccccacctcggacccctggggcggcccccctgtccctccagctgctgatccctggggaggtccagcccccacgccggcctctggggacccctggaggcctgctgcccctgcaggaccctcagttgacccttggggtgggaccccagcccctgcagctggggaggggcccacgcctgatccatggggaagttccgatggtggggtcccggtcagtgggccctcagcctccgatccctggacaccggccccggccttctcagatccctggggagggtcacctgccaagcccagcaccaatggcacaacagcagccgggggattcgacacggagcccgacgagttctctgactttgaccgactccgcacggcactgccgacctccgggagcagcgcaggagagctggagctgctggcaggagaggtgccggcccgaagccctggggcgtttgacatgagtggggtcaggggatctctggctgaggctgtgggcagccccccacctgcagccacaccaactcccacgccccccacccggaagacgccggagtcattcctggggcccaatgcagccctcgtcgacctggactcgctggtgagccggccgggccccacgccgcctggagccaaggcctccaaccccttcctgccaggcggaggcccagccactggcccttccgtcaccaaccccttccagcccgcgcctcccgcgacgctcaccctgaaccagctccgtctcagtcctgtgcctcccgtccctggagcgccacccacgtacatctctccccttggcgggggccctggcctgccccccatgatgcccccgctcctggctctcctggtgaacaaggtccctctggagcctctggtcctgctggtccccgaggtccccctggctctgctggtgctcctggcaaagatggactcaacggtctccctggccccattgggccccctggtcctcgcggtcgcactggtgatgctggtcctgttggtccccccggccctcctggacctcctggtccccctggtcctcccagcgctggtttcgacttcagcttcctgccccagccacctcaagagaaggctcacgatggtggccgctactaccgggctgatgatgccaatgtggttcgtgaccgtgacctcgaggtggacaccaccctcaagagcctgagccagcagatcgagaacatccggagcccagagggcagccgcaagaaccccgcccgcacctgccgtgacctcaagatgtgccactctgactggaagagtggagagtactggattgaccccaaccaaggctgcaacctggatgccatcaaagtcttctgcaacatggagactggtgagacctgcgtgtaccccactcagcccagtgtggcccagaagaactggtacatcagcaagaaccccaaggacaagaggcatgtctggttcggcgagagcatgaccgatggattccagttcgagtatggcggccagggctccgaccctgccgatgtggccatccagctgaccttcctgcgcctgatgtccaccgaggcctcccagaacatcacctaccactgcaagaacagcgtggcctacatggaccagcagactggcaacctcaagaaggccctgctcctccagggctccaacgagatcgagatccgcgccgagggcaacagccgcttcacctacagcgtcactgtcgatggctgcacgagtcacaccggagcctggggcaagacagtgattgaatacaaaaccaccaagacctcccgcctgcccatcatcgatgtggcccccttggacgttggtgccccagaccaggaattcggcttcgacgttggccctgtctgcttcctgtaaactccctccatcccaacctggctccctcccacccaaccaactttccccccaacccggaaacagacaagcaacccaaactgaaccccctcaaaagccaaaaaatgggagacaatttcacatggactttggaaaatatttttttcctttgcattcatctctcaaacttagtttttatctttgaccaaccgaacatgaccaaaaaccaaaagtgcattcaaccttaccaaaaaaaaaaaaaaaaaaagaataaataaataactttttaaaaaaggaagcttggtccacttgcttgaagacccatgcgggggtaagtccctttctgcccgttgggcttatgaaaccccaatgctgccctttctgctcctttctccacaccccccttggggcctcccctccactccttcccaaatctgtctccccagaagacacaggaaacaatgtattgtctgcccagcaatcaaaggcaatgctcaaacacccaagtggcccccaccctcagcccgctcctgcccgcccagcacccccaggccctgggggacctggggttctcagactgccaaagaagccttgccatctggcgctcccatggctcttgcaacatctccccttcgtttttgagggggtcatgccgggggagccaccagcccctcactgggttcggaggagagtcaggaagggccacgacaaagcagaaacatcggatttggggaacgcgtgtcaatcccttgtgccgcagggctgggcgggagagactgttctgttccttgtgtaactgtgttgctgaaagactacctcgttcttgtcttgatgtgtcaccggggcaactgcctgggggcggggatgggggcagggtggaagcggctccccattttataccaaaggtgctacatctatgtgatgggtggggtggggagggaatcactggtgctatagaaattgagatgcccccccaggccagcaaatgttcctttttgttcaaagtctatttttattccttgatatttttctttttttttttttttttttgtggatggggacttgtgaatttttctaaaggtgctatttaacatgggaggagagcgtgtgcggctccagcccagcccgctgctcactttccaccctctctccacctgcctctggcttctcaggcctctgctctccgacctctctcctctgaaaccctcctccacagctgcagcccatcctcccggctccctcctagtctgtcctgcgtcctctgtccccgggtttcagagacaacttcccaaagcacaaagcagtttttccccctaggggtgggaggaagcaaaagactctgtacctattttgtatgtgtataataatttgagatgtttttaattattttgattgctggaataaagcatgtggaaatgacccaaacataatcgtcggagcagacgggagtttctcctcggggtcggagcaggaggcacgcggagtgtgaggccacgcatgagcggacgctaaccccctccccagccacaaagagtctacatgtctagggtctagacatgttcagctttgtggacctccggctcctgctcctcttagcggccaccgccctcctgacgcacggccaagaggaaggccaagtcgagggccaagacgaagacatcccaccaatcacctgcgtacagaacggcctcaggtaccatgaccgagacgtgtggaaacccgagccctgccggatctgcgtctgcgacaacggcaaggtgttgtgcgatgacgtgatctgtgacgagaccaagaactgccccggcgccgaagtccccgagggcgagtgctgtcccgtctgccccgacggctcagagtcacccaccgaccaagaaaccaccggcgtcgagggacccaagggagacactggcccccgaggcccaaggggacccgcaggcccccctggccgagatggcatccctggacagcctggacttcccggaccccccggaccccccggacctcccggaccccctggcctcggaggaaactttgctccccagctgtcttatggctatgatgagaaatcaaccggaggaatttccgtgcctggccccatgggtccctctggtcctcgtggtctccctggcccccctggtgcacctggtccccaaggcttccaaggtccccctggtgagcctggcgagcctggagcttcaggtcccatgggtccccgaggtcccccaggtccccctggaaagaatggagatgatggggaagctggaaaacctggtcgtcctggtgagcgtgggcctcctgggcctcagggtgctcgaggattgcccggaacagctggcctccctggaatgaagggacacagaggtttcagtggtttggatggtgccaagggagatgctggtcctgctggtcctaagggtgagcctggcagccctggtgaaaatggagctcctggtcagatgggcccccgtggcctgcctggtgagagaggtcgccctggagcccctggccctgctggtgctcgtggaaatgatggtgctactggtgctgccgggccccctggtcccaccggccccgctggtcctcctggcttccctggtgctgttggtgctaagggtgaagctggtccccaagggccccgaggctctgaaggtccccagggtgtgcgtggtgagcctggcccccctggccctgctggtgctgctggccctgctggaaaccctggtgctgatggacagcctggtgctaaaggtgccaatggtgctcctggtattgctggtgctcctggcttccctggtgcccgaggcccctctggaccccagggccccggcggccctcctggtcccaagggtaacagcggtgaacctggtgctcctggcagcaaaggagacactggtgctaagggagagcctggccctgttggtgttcaaggaccccctggccctgctggagaggaaggaaagcgaggagctcgaggtgaacccggacccactggcctgcccggaccccctggcgagcgtggtggacctggtagccgtggtttccctggcgcagatggtgttgctggtcccaagggtcccgctggtgaacgtggttctcctggccctgctggccccaaaggatctcctggtgaagctggtcgtcccggtgaagctggtctgcctggtgccaagggtctgactggaagccctggcagccctggtcctgatggcaaaactggcccccctggtcccgccggtcaagatggtcgccccggacccccaggcccacctggtgcccgtggtcaggctggtgtgatgggattccctggacctaaaggtgctgctggagagcccggcaaggctggagagcgaggtgttcccggaccccctggcgctgtcggtcctgctggcaaagatggagaggctggagctcagggaccccctggccctgctggtcccgctggcgagagaggtgaacaaggccctgctggctcccccggattccagggtctccctggtcctgctggtcctccaggtgaagcaggcaaacctggtgaacagggtgttcctggagaccttggcgcccctggcccctctggagcaagaggcgagagaggtttccctggcgagcgtggtgtgcaaggtccccctggtcctgctggtccccgaggggccaacggtgctcccggcaacgatggtgctaagggtgatgctggtgcccctggagctcccggtagccagggcgcccctggccttcagggaatgcctggtgaacgtggtgcagctggtcttccagggcctaagggtgacagaggtgatgctggtcccaaaggtgctgatggctctcctggcaaagatggcgtccgtggtctgactggccccattggtcctcctggccctgctggtgcccctggtgacaagggtgaaagtggtcccagcggccctgctggtcccactggagctcgtggtgcccccggagaccgtggtgagcctggtccccccggccctgctggctttgctggcccccctggtgctgacggccaacctggtgctaaaggcgaacctggtgatgctggtgctaaaggcgatgctggtccccctggccctgccggacccgctggaccccctggccccattggtaatgttggtgctcctggagccaaaggtgctcgcggcagcgctggtccccctggtgctactggtttccctggtgctgctggccgagtcggtcctcctggcccctctggaaatgctggaccccctggccctcctggtcctgctggcaaagaaggcggcaaaggtccccgtggtgagactggccctgctggacgtcctggtgaagttggtccccctggtccccctggccctgctggcgagaaaggatcccctggtgctgatggtcctgctggtgctcctggtactcccgggcctcaaggtattgctggacagcgtggtgtggtcggcctgcctggtcagagaggagagagaggcttccctggtcttcctggcccctctggtgaacctggcaaacaaggtccctctggagcaagtggtgaacgtggtccccctggtcccatgggcccccctggattggctggaccccctggtgaatctggacgtgagggggctcctggtgccgaaggttcccctggacgagacggttctcctggcgccaagggtgaccgtggtgagaccggccccgctggaccccctggtgctcctggtgctcctggtgcccctggccccgttggccctgctggcaagagtggtgatcgtggtgagactggtcctgctggtcccaccggtcctgtcggccctgttggcgcccgtggccccgccggaccccaaggcccccgtggtgacaagggtgagacaggcgaacagggcgacagaggcataaagggtcaccgtggcttctctggcctccagggtccccctggccctcctggctctcctggtgaacaaggtccctctggagcctctggtcctgctggtccccgaggtccccctggctctgctggtgctcctggcaaagatggactcaacggtctccctggccccattgggccccctggtcctcgcggtcgcactggtgatgctggtcctgttggtccccccggccctcctggacctcctggtccccctggtcctcccagcgctggtttcgacttcagcttcctgccccagccacctcaagagaaggctcacgatggtggccgctactaccgggctgatgatgccaatgtggttcgtgaccgtgacctcgaggtggacaccaccctcaagagcctgagccagcagatcgagaacatccggagcccagagggcagccgcaagaaccccgcccgcacctgccgtgacctcaagatgtgccactctgactggaagagtggagagtactggattgaccccaaccaaggctgcaacctggatgccatcaaagtcttctgcaacatggagactggtgagacctgcgtgtaccccactcagcccagtgtggcccagaagaactggtacatcagcaagaaccccaaggacaagaggcatgtctggttcggcgagagcatgaccgatggattccagttcgagtatggcggccagggctccgaccctgccgatgtggccatccagctgaccttcctgcgcctgatgtccaccgaggcctcccagaacatcacctaccactgcaagaacagcgtggcctacatggaccagcagactggcaacctcaagaaggccctgctcctccagggctccaacgagatcgagatccgcgccgagggcaacagccgcttcacctacagcgtcactgtcgatggctgcacgagtcacaccggagcctggggcaagacagtgattgaatacaaaaccaccaagacctcccgcctgcccatcatcgatgtggcccccttggacgttggtgccccagaccaggaattcggcttcgacgttggccctgtctgcttcctgtaaactccctccatcccaacctggctccctcccacccaaccaactttccccccaacccggaaacagacaagcaacccaaactgaaccccctcaaaagccaaaaaatgggagacaatttcacatggactttggaaaatatttttttcctttgcattcatctctcaaacttagtttttatctttgaccaaccgaacatgaccaaaaaccaaaagtgcattcaaccttaccaaaaaaaaaaaaaaaaaaagaataaataaataactttttaaaaaaggaagcttggtccacttgcttgaagacccatgcgggggtaagtccctttctgcccgttgggcttatgaaaccccaatgctgccctttctgctcctttctccacaccccccttggggcctcccctccactccttcccaaatctgtctccccagaagacacaggaaacaatgtattgtctgcccagcaatcaaaggcaatgctcaaacacccaagtggcccccaccctcagcccgctcctgcccgcccagcacccccaggccctgggggacctggggttctcagactgccaaagaagccttgccatctggcgctcccatggctcttgcaacatctccccttcgtttttgagggggtcatgccgggggagccaccagcccctcactgggttcggaggagagtcaggaagggccacgacaaagcagaaacatcggatttggggaacgcgtgtcaatcccttgtgccgcagggctgggcgggagagactgttctgttccttgtgtaactgtgttgctgaaagactacctcgttcttgtcttgatgtgtcaccggggcaactgcctgggggcggggatgggggcagggtggaagcggctccccattttataccaaaggtgctacatctatgtgatgggtggggtggggagggaatcactggtgctatagaaattgagatgcccccccaggccagcaaatgttcctttttgttcaaagtctatttttattccttgatatttttctttttttttttttttttttgtggatggggacttgtgaatttttctaaaggtgctatttaacatgggaggagagcgtgtgcggctccagcccagcccgctgctcactttccaccctctctccacctgcctctggcttctcaggcctctgctctccgacctctctcctctgaaaccctcctccacagctgcagcccatcctcccggctccctcctagtctgtcctgcgtcctctgtccccgggtttcagagacaacttcccaaagcacaaagcagtttttccccctaggggtgggaggaagcaaaagactctgtacctattttgtatgtgtataataatttgagatgtttttaattattttgattgctggaataaagcatgtggaaatgacccaaacataatcgtcggagcagacgggagtttctcctcggggtcggagcaggaggcacgcggagtgtgaggccacgcatgagcggacgctaaccccctccccagccacaaagagtctacatgtctagggtctagacatgttcagctttgtggacctccggctcctgctcctcttagcggccaccgccctcctgacgcacggccaagaggaaggccaagtcgagggccaagacgaagacatcccaccaatcacctgcgtacagaacggcctcaggtaccatgaccgagacgtgtggaaacccgagccctgccggatctgcgtctgcgacaacggcaaggtgttgtgcgatgacgtgatctgtgacgagaccaagaactgccccggcgccgaagtccccgagggcgagtgctgtcccgtctgccccgacggctcagagtcacccaccgaccaagaaaccaccggcgtcgagggacccaagggagacactggcccccgaggcccaaggggacccgcaggcccccctggccgagatggcatccctggacagcctggacttcccggaccccccggaccccccggacctcccggaccccctggcctcggaggaaactttgctccccagctgtcttatggctatgatgagaaatcaaccggaggaatttccgtgcctggccccatgggtccctctggtcctcgtggtctccctggcccccctggtgcacctggtccccaaggcttccaaggtccccctggtgagcctggcgagcctggagcttcaggtcccatgggtccccgaggtcccccaggtccccctggaaagaatggagatgatggggaagctggaaaacctggtcgtcctggtgagcgtgggcctcctgggcctcagggtgctcgaggattgcccggaacagctggcctccctggaatgaagggacacagaggtttcagtggtttggatggtgccaagggagatgctggtcctgctggtcctaagggtgagcctggcagccctggtgaaaatggagctcctggtcagatgggcccccgtggcctgcctggtgagagaggtcgccctggagcccctggccctgctggtgctcgtggaaatgatggtgctactggtgctgccgggccccctggtcccaccggccccgctggtcctcctggcttccctggtgctgttggtgctaagggtgaagctggtccccaagggccccgaggctctgaaggtccccagggtgtgcgtggtgagcctggcccccctggccctgctggtgctgctggccctgctggaaaccctggtgctgatggacagcctggtgctaaaggtgccaatggtgctcctggtattgctggtgctcctggcttccctggtgcccgaggcccctctggaccccagggccccggcggccctcctggtcccaagggtaacagcggtgaacctggtgctcctggcagcaaaggagacactggtgctaagggagagcctggccctgttggtgttcaaggaccccctggccctgctggagaggaaggaaagcgaggagctcgaggtgaacccggacccactggcctgcccggaccccctggcgagcgtggtggacctggtagccgtggtttccctggcgcagatggtgttgctggtcccaagggtcccgctggtgaacgtggttctcctggccctgctggccccaaaggatctcctggtgaagctggtcgtcccggtgaagctggtctgcctggtgccaagggtctgactggaagccctggcagccctggtcctgatggcaaaactggcccccctggtcccgccggtcaagatggtcgccccggacccccaggcccacctggtgcccgtggtcaggctggtgtgatgggattccctggacctaaaggtgctgctggagagcccggcaaggctggagagcgaggtgttcccggaccccctggcgctgtcggtcctgctggcaaagatggagaggctggagctcagggaccccctggccctgctggtcccgctggcgagagaggtgaacaaggccctgctggctcccccggattccagggtctccctggtcctgctggtcctccaggtgaagcaggcaaacctggtgaacagggtgttcctggagaccttggcgcccctggcccctctggagcaagaggcgagagaggtttccctggcgagcgtggtgtgcaaggtccccctggtcctgctggtccccgaggggccaacggtgctcccggcaacgatggtgctaagggtgatgctggtgcccctggagctcccggtagccagggcgcccctggccttcagggaatgcctggtgaacgtggtgcagctggtcttccagggcctaagggtgacagaggtgatgctggtcccaaaggtgctgatggctctcctggcaaagatggcgtccgtggtctgactggccccattggtcctcctggccctgctggtgcccctggtgacaagggtgaaagtggtcccagcggccctgctggtcccactggagctcgtggtgcccccggagaccgtggtgagcctggtccccccggccctgctggctttgctggcccccctggtgctgacggccaacctggtgctaaaggcgaacctggtgatgctggtgctaaaggcgatgctggtccccctggccctgccggacccgctggaccccctggccccattggtaatgttggtgctcctggagccaaaggtgctcgcggcagcgctggtccccctggtgctactggtttccctggtgctgctggccgagtcggtcctcctggcccctctggaaatgctggaccccctggccctcctggtcctgctggcaaagaaggcggcaaaggtccccgtggtgagactggccctgctggacgtcctggtgaagttggtccccctggtccccctggccctgctggcgagaaaggatcccctggtgctgatggtcctgctggtgctcctggtactcccgggcctcaaggtattgctggacagcgtggtgtggtcggcctgcctggtcagagaggagagagaggcttccctggtcttcctggcccctctggtgaacctggcaaacaaggtccctctggagcaagtggtgaacgtggtccccctggtcccatgggcccccctggattggctggaccccctggtgaatctggacgtgagggggctcctggtgccgaaggttcccctggacgagacggttctcctggcgccaagggtgaccgtggtgagaccggccccgctggaccccctggtgctcctggtgctcctggtgcccctggccccgttggccctgctggcaagagtggtgatcgtggtgagactggtcctgctggtcccaccggtcctgtcggccctgttggcgcccgtggccccgccggaccccaaggcccccgtggtgacaagggtgagacaggcgaacagggcgacagaggcataaagggtcaccgtggcttctctggcctccagggtccccctggccctcctggctctcctggtgaacaaggtccctctggagcctctggtcctgctggtccccgaggtccccctggctctgctggtgctcctggcaaagatggactcaacggtctccctggccccattgggccccctggtcctcgcggtcgcactggtgatgctggtcctgttggtccccccggccctcctggacctcctggtccccctggtcctcccagcgctggtttcgacttcagcttcctgccccagccacctcaagagaaggctcacgatggtggccgctactaccgggctgatgatgccaatgtggttcgtgaccgtgacctcgaggtggacaccaccctcaagagcctgagccagcagatcgagaacatccggagcccagagggcagccgcaagaaccccgcccgcacctgccgtgacctcaagatgtgccactctgactggaagagtggagagtactggattgaccccaaccaaggctgcaacctggatgccatcaaagtcttctgcaacatggagactggtgagacctgcgtgtaccccactcagcccagtgtggcccagaagaactggtacatcagcaagaaccccaaggacaagaggcatgtctggttcggcgagagcatgaccgatggattccagttcgagtatggcggccagggctccgaccctgccgatgtggccatccagctgaccttcctgcgcctgatgtccaccgaggcctcccagaacatcacctaccactgcaagaacagcgtggcctacatggaccagcagactggcaacctcaagaaggccctgctcctccagggctccaacgagatcgagatccgcgccgagggcaacagccgcttcacctacagcgtcactgtcgatggctgcacgagtcacaccggagcctggggcaagacagtgattgaatacaaaaccaccaagacctcccgcctgcccatcatcgatgtggcccccttggacgttggtgccccagaccaggaattcggcttcgacgttggccctgtctgcttcctgtaaactccctccatcccaacctggctccctcccacccaaccaactttccccccaacccggaaacagacaagcaacccaaactgaaccccctcaaaagccaaaaaatgggagacaatttcacatggactttggaaaatatttttttcctttgcattcatctctcaaacttagtttttatctttgaccaaccgaacatgaccaaaaaccaaaagtgcattcaaccttaccaaaaaaaaaaaaaaaaaaagaataaataaataactttttaaaaaaggaagcttggtccacttgcttgaagacccatgcgggggtaagtccctttctgcccgttgggcttatgaaaccccaatgctgccctttctgctcctttctccacaccccccttggggcctcccctccactccttcccaaatctgtctccccagaagacacaggaaacaatgtattgtctgcccagcaatcaaaggcaatgctcaaacacccaagtggcccccaccctcagcccgctcctgcccgcccagcacccccaggccctgggggacctggggttctcagactgccaaagaagccttgccatctggcgctcccatggctcttgcaacatctccccttcgtttttgagggggtcatgccgggggagccaccagcccctcactgggttcggaggagagtcaggaagggccacgacaaagcagaaacatcggatttggggaacgcgtgtcaatcccttgtgccgcagggctgggcgggagagactgttctgttccttgtgtaactgtgttgctgaaagactacctcgttcttgtcttgatgtgtcaccggggcaactgcctgggggcggggatgggggcagggtggaagcggctccccattttataccaaaggtgctacatctatgtgatgggtggggtggggagggaatcactggtgctatagaaattgagatgcccccccaggccagcaaatgttcctttttgttcaaagtctatttttattccttgatatttttctttttttttttttttttttgtggatggggacttgtgaatttttctaaaggtgctatttaacatgggaggagagcgtgtgcggctccagcccagcccgctgctcactttccaccctctctccacctgcctctggcttctcaggcctctgctctccgacctctctcctctgaaaccctcctccacagctgcagcccatcctcccggctccctcctagtctgtcctgcgtcctctgtccccgggtttcagagacaacttcccaaagcacaaagcagtttttccccctaggggtgggaggaagcaaaagactctgtacctattttgtatgtgtataataatttgagatgtttttaattattttgattgctggaataaagcatgtggaaatgacccaaacataatcgtcggagcagacgggagtttctcctcggggtcggagcaggaggcacgcggagtgtgaggccacgcatgagcggacgctaaccccctccccagccacaaagagtctacatgtctagggtctagacatgttcagctttgtggacctccggctcctgctcctcttagcggccaccgccctcctgacgcacggccaagaggaaggccaagtcgagggccaagacgaagacatcccaccaatcacctgcgtacagaacggcctcaggtaccatgaccgagacgtgtggaaacccgagccctgccggatctgcgtctgcgacaacggcaaggtgttgtgcgatgacgtgatctgtgacgagaccaagaactgccccggcgccgaagtccccgagggcgagtgctgtcccgtctgccccgacggctcagagtcacccaccgaccaagaaaccaccggcgtcgagggacccaagggagacactggcccccgaggcccaaggggacccgcaggcccccctggccgagatggcatccctggacagcctggacttcccggaccccccggaccccccggacctcccggaccccctggcctcggaggaaactttgctccccagctgtcttatggctatgatgagaaatcaaccggaggaatttccgtgcctggccccatgggtccctctggtcctcgtggtctccctggcccccctggtgcacctggtccccaaggcttccaaggtccccctggtgagcctggcgagcctggagcttcaggtcccatgggtccccgaggtcccccaggtccccctggaaagaatggagatgatggggaagctggaaaacctggtcgtcctggtgagcgtgggcctcctgggcctcagggtgctcgaggattgcccggaacagctggcctccctggaatgaagggacacagaggtttcagtggtttggatggtgccaagggagatgctggtcctgctggtcctaagggtgagcctggcagccctggtgaaaatggagctcctggtcagatgggcccccgtggcctgcctggtgagagaggtcgccctggagcccctggccctgctggtgctcgtggaaatgatggtgctactggtgctgccgggccccctggtcccaccggccccgctggtcctcctggcttccctggtgctgttggtgctaagggtgaagctggtccccaagggccccgaggctctgaaggtccccagggtgtgcgtggtgagcctggcccccctggccctgctggtgctgctggccctgctggaaaccctggtgctgatggacagcctggtgctaaaggtgccaatggtgctcctggtattgctggtgctcctggcttccctggtgcccgaggcccctctggaccccagggccccggcggccctcctggtcccaagggtaacagcggtgaacctggtgctcctggcagcaaaggagacactggtgctaagggagagcctggccctgttggtgttcaaggaccccctggccctgctggagaggaaggaaagcgaggagctcgaggtgaacccggacccactggcctgcccggaccccctggcgagcgtggtggacctggtagccgtggtttccctggcgcagatggtgttgctggtcccaagggtcccgctggtgaacgtggttctcctggccctgctggccccaaaggatctcctggtgaagctggtcgtcccggtgaagctggtctgcctggtgccaagggtctgactggaagccctggcagccctggtcctgatggcaaaactggcccccctggtcccgccggtcaagatggtcgccccggacccccaggcccacctggtgcccgtggtcaggctggtgtgatgggattccctggacctaaaggtgctgctggagagcccggcaaggctggagagcgaggtgttcccggaccccctggcgctgtcggtcctgctggcaaagatggagaggctggagctcagggaccccctggccctgctggtcccgctggcgagagaggtgaacaaggccctgctggctcccccggattccagggtctccctggtcctgctggtcctccaggtgaagcaggcaaacctggtgaacagggtgttcctggagaccttggcgcccctggcccctctggagcaagaggcgagagaggtttccctggcgagcgtggtgtgcaaggtccccctggtcctgctggtccccgaggggccaacggtgctcccggcaacgatggtgctaagggtgatgctggtgcccctggagctcccggtagccagggcgcccctggccttcagggaatgcctggtgaacgtggtgcagctggtcttccagggcctaagggtgacagaggtgatgctggtcccaaaggtgctgatggctctcctggcaaagatggcgtccgtggtctgactggccccattggtcctcctggccctgctggtgcccctggtgacaagggtgaaagtggtcccagcggccctgctggtcccactggagctcgtggtgcccccggagaccgtggtgagcctggtccccccggccctgctggctttgctggcccccctggtgctgacggccaacctggtgctaaaggcgaacctggtgatgctggtgctaaaggcgatgctggtccccctggccctgccggacccgctggaccccctggccccattggtaatgttggtgctcctggagccaaaggtgctcgcggcagcgctggtccccctggtgctactggtttccctggtgctgctggccgagtcggtcctcctggcccctctggaaatgctggaccccctggccctcctggtcctgctggcaaagaaggcggcaaaggtccccgtggtgagactggccctgctggacgtcctggtgaagttggtccccctggtccccctggccctgctggcgagaaaggatcccctggtgctgatggtcctgctggtgctcctggtactcccgggcctcaaggtattgctggacagcgtggtgtggtcggcctgcctggtcagagaggagagagaggcttccctggtcttcctggcccctctggtgaacctggcaaacaaggtccctctggagcaagtggtgaacgtggtccccctggtcccatgggcccccctggattggctggaccccctggtgaatctggacgtgagggggctcctggtgccgaaggttcccctggacgagacggttctcctggcgccaagggtgaccgtggtgagaccggccccgctggaccccctggtgctcctggtgctcctggtgcccctggccccgttggccctgctggcaagagtggtgatcgtggtgagactggtcctgctggtcccaccggtcctgtcggccctgttggcgcccgtggccccgccggaccccaaggcccccgtggtgacaagggtgagacaggcgaacagggcgacagaggcataaagggtcaccgtggcttctctggcctccagggtccccctggccctcctggctctcctggtgaacaaggtccctctggagcctctggtcctgctggtccccgaggtccccctggctctgctggtgctcctggcaaagatggactcaacggtctccctggccccattgggccccctggtcctcgcggtcgcactggtgatgctggtcctgttggtccccccggccctcctggacctcctggtccccctggtcctcccagcgctggtttcgacttcagcttcctgccccagccacctcaagagaaggctcacgatggtggccgctactaccgggctgatgatgccaatgtggttcgtgaccgtgacctcgaggtggacaccaccctcaagagcctgagccagcagatcgagaacatccggagcccagagggcagccgcaagaaccccgcccgcacctgccgtgacctcaagatgtgccactctgactggaagagtggagagtactggattgaccccaaccaaggctgcaacctggatgccatcaaagtcttctgcaacatggagactggtgagacctgcgtgtaccccactcagcccagtgtggcccagaagaactggtacatcagcaagaaccccaaggacaagaggcatgtctggttcggcgagagcatgaccgatggattccagttcgagtatggcggccagggctccgaccctgccgatgtggccatccagctgaccttcctgcgcctgatgtccaccgaggcctcccagaacatcacctaccactgcaagaacagcgtggcctacatggaccagcagactggcaacctcaagaaggccctgctcctccagggctccaacgagatcgagatccgcgccgagggcaacagccgcttcacctacagcgtcactgtcgatggctgcacgagtcacaccggagcctggggcaagacagtgattgaatacaaaaccaccaagacctcccgcctgcccatcatcgatgtggcccccttggacgttggtgccccagaccaggaattcggcttcgacgttggccctgtctgcttcctgtaaactccctccatcccaacctggctccctcccacccaaccaactttccccccaacccggaaacagacaagcaacccaaactgaaccccctcaaaagccaaaaaatgggagacaatttcacatggactttggaaaatatttttttcctttgcattcatctctcaaacttagtttttatctttgaccaaccgaacatgaccaaaaaccaaaagtgcattcaaccttaccaaaaaaaaaaaaaaaaaaagaataaataaataactttttaaaaaaggaagcttggtccacttgcttgaagacccatgcgggggtaagtccctttctgcccgttgggcttatgaaaccccaatgctgccctttctgctcctttctccacaccccccttggggcctcccctccactccttcccaaatctgtctccccagaagacacaggaaacaatgtattgtctgcccagcaatcaaaggcaatgctcaaacacccaagtggcccccaccctcagcccgctcctgcccgcccagcacccccaggccctgggggacctggggttctcagactgccaaagaagccttgccatctggcgctcccatggctcttgcaacatctccccttcgtttttgagggggtcatgccgggggagccaccagcccctcactgggttcggaggagagtcaggaagggccacgacaaagcagaaacatcggatttggggaacgcgtgtcaatcccttgtgccgcagggctgggcgggagagactgttctgttccttgtgtaactgtgttgctgaaagactacctcgttcttgtcttgatgtgtcaccggggcaactgcctgggggcggggatgggggcagggtggaagcggctccccattttataccaaaggtgctacatctatgtgatgggtggggtggggagggaatcactggtgctatagaaattgagatgcccccccaggccagcaaatgttcctttttgttcaaagtctatttttattccttgatatttttctttttttttttttttttttgtggatggggacttgtgaatttttctaaaggtgctatttaacatgggaggagagcgtgtgcggctccagcccagcccgctgctcactttccaccctctctccacctgcctctggcttctcaggcctctgctctccgacctctctcctctgaaaccctcctccacagctgcagcccatcctcccggctccctcctagtctgtcctgcgtcctctgtccccgggtttcagagacaacttcccaaagcacaaagcagtttttccccctaggggtgggaggaagcaaaagactctgtacctattttgtatgtgtataataatttgagatgtttttaattattttgattgctggaataaagcatgtggaaatgacccaaacataatcgtcggagcagacgggagtttctcctcggggtcggagcaggaggcacgcggagtgtgaggccacgcatgagcggacgctaaccccctccccagccacaaagagtctacatgtctagggtctagacatgttcagctttgtggacctccggctcctgctcctcttagcggccaccgccctcctgacgcacggccaagaggaaggccaagtcgagggccaagacgaagacatcccaccaatcacctgcgtacagaacggcctcaggtaccatgaccgagacgtgtggaaacccgagccctgccggatctgcgtctgcgacaacggcaaggtgttgtgcgatgacgtgatctgtgacgagaccaagaactgccccggcgccgaagtccccgagggcgagtgctgtcccgtctgccccgacggctcagagtcacccaccgaccaagaaaccaccggcgtcgagggacccaagggagacactggcccccgaggcccaaggggacccgcaggcccccctggccgagatggcatccctggacagcctggacttcccggaccccccggaccccccggacctcccggaccccctggcctcggaggaaactttgctccccagctgtcttatggctatgatgagaaatcaaccggaggaatttccgtgcctggccccatgggtccctctggtcctcgtggtctccctggcccccctggtgcacctggtccccaaggcttccaaggtccccctggtgagcctggcgagcctggagcttcaggtcccatgggtccccgaggtcccccaggtccccctggaaagaatggagatgatggggaagctggaaaacctggtcgtcctggtgagcgtgggcctcctgggcctcagggtgctcgaggattgcccggaacagctggcctccctggaatgaagggacacagaggtttcagtggtttggatggtgccaagggagatgctggtcctgctggtcctaagggtgagcctggcagccctggtgaaaatggagctcctggtcagatgggcccccgtggcctgcctggtgagagaggtcgccctggagcccctggccctgctggtgctcgtggaaatgatggtgctactggtgctgccgggccccctggtcccaccggccccgctggtcctcctggcttccctggtgctgttggtgctaagggtgaagctggtccccaagggccccgaggctctgaaggtccccagggtgtgcgtggtgagcctggcccccctggccctgctggtgctgctggccctgctggaaaccctggtgctgatggacagcctggtgctaaaggtgccaatggtgctcctggtattgctggtgctcctggcttccctggtgcccgaggcccctctggaccccagggccccggcggccctcctggtcccaagggtaacagcggtgaacctggtgctcctggcagcaaaggagacactggtgctaagggagagcctggccctgttggtgttcaaggaccccctggccctgctggagaggaaggaaagcgaggagctcgaggtgaacccggacccactggcctgcccggaccccctggcgagcgtggtggacctggtagccgtggtttccctggcgcagatggtgttgctggtcccaagggtcccgctggtgaacgtggttctcctggccctgctggccccaaaggatctcctggtgaagctggtcgtcccggtgaagctggtctgcctggtgccaagggtctgactggaagccctggcagccctggtcctgatggcaaaactggcccccctggtcccgccggtcaagatggtcgccccggacccccaggcccacctggtgcccgtggtcaggctggtgtgatgggattccctggacctaaaggtgctgctggagagcccggcaaggctggagagcgaggtgttcccggaccccctggcgctgtcggtcctgctggcaaagatggagaggctggagctcagggaccccctggccctgctggtcccgctggcgagagaggtgaacaaggccctgctggctcccccggattccagggtctccctggtcctgctggtcctccaggtgaagcaggcaaacctggtgaacagggtgttcctggagaccttggcgcccctggcccctctggagcaagaggcgagagaggtttccctggcgagcgtggtgtgcaaggtccccctggtcctgctggtccccgaggggccaacggtgctcccggcaacgatggtgctaagggtgatgctggtgcccctggagctcccggtagccagggcgcccctggccttcagggaatgcctggtgaacgtggtgcagctggtcttccagggcctaagggtgacagaggtgatgctggtcccaaaggtgctgatggctctcctggcaaagatggcgtccgtggtctgactggccccattggtcctcctggccctgctggtgcccctggtgacaagggtgaaagtggtcccagcggccctgctggtcccactggagctcgtggtgcccccggagaccgtggtgagcctggtccccccggccctgctggctttgctggcccccctggtgctgacggccaacctggtgctaaaggcgaacctggtgatgctggtgctaaaggcgatgctggtccccctggccctgccggacccgctggaccccctggccccattggtaatgttggtgctcctggagccaaaggtgctcgcggcagcgctggtccccctggtgctactggtttccctggtgctgctggccgagtcggtcctcctggcccctctggaaatgctggaccccctggccctcctggtcctgctggcaaagaaggcggcaaaggtccccgtggtgagactggccctgctggacgtcctggtgaagttggtccccctggtccccctggccctgctggcgagaaaggatcccctggtgctgatggtcctgctggtgctcctggtactcccgggcctcaaggtattgctggacagcgtggtgtggtcggcctgcctggtcagagaggagagagaggcttccctggtcttcctggcccctctggtgaacctggcaaacaaggtccctctggagcaagtggtgaacgtggtccccctggtcccatgggcccccctggattggctggaccccctggtgaatctggacgtgagggggctcctggtgccgaaggttcccctggacgagacggttctcctggcgccaagggtgaccgtggtgagaccggccccgctggaccccctggtgctcctggtgctcctggtgcccctggccccgttggccctgctggcaagagtggtgatcgtggtgagactggtcctgctggtcccaccggtcctgtcggccctgttggcgcccgtggccccgccggaccccaaggcccccgtggtgacaagggtgagacaggcgaacagggcgacagaggcataaagggtcaccgtggcttctctggcctccagggtccccctggccctcctggctctcctggtgaacaaggtccctctggagcctctggtcctgctggtccccgaggtccccctggctctgctggtgctcctggcaaagatggactcaacggtctccctggccccattgggccccctggtcctcgcggtcgcactggtgatgctggtcctgttggtccccccggccctcctggacctcctggtccccctggtcctcccagcgctggtttcgacttcagcttcctgccccagccacctcaagagaaggctcacgatggtggccgctactaccgggctgatgatgccaatgtggttcgtgaccgtgacctcgaggtggacaccaccctcaagagcctgagccagcagatcgagaacatccggagcccagagggcagccgcaagaaccccgcccgcacctgccgtgacctcaagatgtgccactctgactggaagagtggagagtactggattgaccccaaccaaggctgcaacctggatgccatcaaagtcttctgcaacatggagactggtgagacctgcgtgtaccccactcagcccagtgtggcccagaagaactggtacatcagcaagaaccccaaggacaagaggcatgtctggttcggcgagagcatgaccgatggattccagttcgagtatggcggccagggctccgaccctgccgatgtggccatccagctgaccttcctgcgcctgatgtccaccgaggcctcccagaacatcacctaccactgcaagaacagcgtggcctacatggaccagcagactggcaacctcaagaaggccctgctcctccagggctccaacgagatcgagatccgcgccgagggcaacagccgcttcacctacagcgtcactgtcgatggctgcacgagtcacaccggagcctggggcaagacagtgattgaatacaaaaccaccaagacctcccgcctgcccatcatcgatgtggcccccttggacgttggtgccccagaccaggaattcggcttcgacgttggccctgtctgcttcctgtaaactccctccatcccaacctggctccctcccacccaaccaactttccccccaacccggaaacagacaagcaacccaaactgaaccccctcaaaagccaaaaaatgggagacaatttcacatggactttggaaaatatttttttcctttgcattcatctctcaaacttagtttttatctttgaccaaccgaacatgaccaaaaaccaaaagtgcattcaaccttaccaaaaaaaaaaaaaaaaaaagaataaataaataactttttaaaaaaggaagcttggtccacttgcttgaagacccatgcgggggtaagtccctttctgcccgttgggcttatgaaaccccaatgctgccctttctgctcctttctccacaccccccttggggcctcccctccactccttcccaaatctgtctccccagaagacacaggaaacaatgtattgtctgcccagcaatcaaaggcaatgctcaaacacccaagtggcccccaccctcagcccgctcctgcccgcccagcacccccaggccctgggggacctggggttctcagactgccaaagaagccttgccatctggcgctcccatggctcttgcaacatctccccttcgtttttgagggggtcatgccgggggagccaccagcccctcactgggttcggaggagagtcaggaagggccacgacaaagcagaaacatcggatttggggaacgcgtgtcaatcccttgtgccgcagggctgggcgggagagactgttctgttccttgtgtaactgtgttgctgaaagactacctcgttcttgtcttgatgtgtcaccggggcaactgcctgggggcggggatgggggcagggtggaagcggctccccattttataccaaaggtgctacatctatgtgatgggtggggtggggagggaatcactggtgctatagaaattgagatgcccccccaggccagcaaatgttcctttttgttcaaagtctatttttattccttgatatttttctttttttttttttttttttgtggatggggacttgtgaatttttctaaaggtgctatttaacatgggaggagagcgtgtgcggctccagcccagcccgctgctcactttccaccctctctccacctgcctctggcttctcaggcctctgctctccgacctctctcctctgaaaccctcctccacagctgcagcccatcctcccggctccctcctagtctgtcctgcgtcctctgtccccgggtttcagagacaacttcccaaagcacaaagcagtttttccccctaggggtgggaggaagcaaaagactctgtacctattttgtatgtgtataataatttgagatgtttttaattattttgattgctggaataaagcatgtggaaatgacccaaacataatcgtcggagcagacgggagtttctcctcggggtcggagcaggaggcacgcggagtgtgaggccacgcatgagcggacgctaaccccctccccagccacaaagagtctacatgtctagggtctagacatgttcagctttgtggacctccggctcctgctcctcttagcggccaccgccctcctgacgcacggccaagaggaaggccaagtcgagggccaagacgaagacatcccaccaatcacctgcgtacagaacggcctcaggtaccatgaccgagacgtgtggaaacccgagccctgccggatctgcgtctgcgacaacggcaaggtgttgtgcgatgacgtgatctgtgacgagaccaagaactgccccggcgccgaagtccccgagggcgagtgctgtcccgtctgccccgacggctcagagtcacccaccgaccaagaaaccaccggcgtcgagggacccaagggagacactggcccccgaggcccaaggggacccgcaggcccccctggccgagatggcatccctggacagcctggacttcccggaccccccggaccccccggacctcccggaccccctggcctcggaggaaactttgctccccagctgtcttatggctatgatgagaaatcaaccggaggaatttccgtgcctggccccatgggtccctctggtcctcgtggtctccctggcccccctggtgcacctggtccccaaggcttccaaggtccccctggtgagcctggcgagcctggagcttcaggtcccatgggtccccgaggtcccccaggtccccctggaaagaatggagatgatggggaagctggaaaacctggtcgtcctggtgagcgtgggcctcctgggcctcagggtgctcgaggattgcccggaacagctggcctccctggaatgaagggacacagaggtttcagtggtttggatggtgccaagggagatgctggtcctgctggtcctaagggtgagcctggcagccctggtgaaaatggagctcctggtcagatgggcccccgtggcctgcctggtgagagaggtcgccctggagcccctggccctgctggtgctcgtggaaatgatggtgctactggtgctgccgggccccctggtcccaccggccccgctggtcctcctggcttccctggtgctgttggtgctaagggtgaagctggtccccaagggccccgaggctctgaaggtccccagggtgtgcgtggtgagcctggcccccctggccctgctggtgctgctggccctgctggaaaccctggtgctgatggacagcctggtgctaaaggtgccaatggtgctcctggtattgctggtgctcctggcttccctggtgcccgaggcccctctggaccccagggccccggcggccctcctggtcccaagggtaacagcggtgaacctggtgctcctggcagcaaaggagacactggtgctaagggagagcctggccctgttggtgttcaaggaccccctggccctgctggagaggaaggaaagcgaggagctcgaggtgaacccggacccactggcctgcccggaccccctggcgagcgtggtggacctggtagccgtggtttccctggcgcagatggtgttgctggtcccaagggtcccgctggtgaacgtggttctcctggccctgctggccccaaaggatctcctggtgaagctggtcgtcccggtgaagctggtctgcctggtgccaagggtctgactggaagccctggcagccctggtcctgatggcaaaactggcccccctggtcccgccggtcaagatggtcgccccggacccccaggcccacctggtgcccgtggtcaggctggtgtgatgggattccctggacctaaaggtgctgctggagagcccggcaaggctggagagcgaggtgttcccggaccccctggcgctgtcggtcctgctggcaaagatggagaggctggagctcagggaccccctggccctgctggtcccgctggcgagagaggtgaacaaggccctgctggctcccccggattccagggtctccctggtcctgctggtcctccaggtgaagcaggcaaacctggtgaacagggtgttcctggagaccttggcgcccctggcccctctggagcaagaggcgagagaggtttccctggcgagcgtggtgtgcaaggtccccctggtcctgctggtccccgaggggccaacggtgctcccggcaacgatggtgctaagggtgatgctggtgcccctggagctcccggtagccagggcgcccctggccttcagggaatgcctggtgaacgtggtgcagctggtcttccagggcctaagggtgacagaggtgatgctggtcccaaaggtgctgatggctctcctggcaaagatggcgtccgtggtctgactggccccattggtcctcctggccctgctggtgcccctggtgacaagggtgaaagtggtcccagcggccctgctggtcccactggagctcgtggtgcccccggagaccgtggtgagcctggtccccccggccctgctggctttgctggcccccctggtgctgacggccaacctggtgctaaaggcgaacctggtgatgctggtgctaaaggcgatgctggtccccctggccctgccggacccgctggaccccctggccccattggtaatgttggtgctcctggagccaaaggtgctcgcggcagcgctggtccccctggtgctactggtttccctggtgctgctggccgagtcggtcctcctggcccctctggaaatgctggaccccctggccctcctggtcctgctggcaaagaaggcggcaaaggtccccgtggtgagactggccctgctggacgtcctggtgaagttggtccccctggtccccctggccctgctggcgagaaaggatcccctggtgctgatggtcctgctggtgctcctggtactcccgggcctcaaggtattgctggacagcgtggtgtggtcggcctgcctggtcagagaggagagagaggcttccctggtcttcctggcccctctggtgaacctggcaaacaaggtccctctggagcaagtggtgaacgtggtccccctggtcccatgggcccccctggattggctggaccccctggtgaatctggacgtgagggggctcctggtgccgaaggttcccctggacgagacggttctcctggcgccaagggtgaccgtggtgagaccggccccgctggaccccctggtgctcctggtgctcctggtgcccctggccccgttggccctgctggcaagagtggtgatcgtggtgagactggtcctgctggtcccaccggtcctgtcggccctgttggcgcccgtggccccgccggaccccaaggcccccgtggtgacaagggtgagacaggcgaacagggcgacagaggcataaagggtcaccgtggcttctctggcctccagggtccccctggccctcctggctctcctggtgaacaaggtccctctggagcctctggtcctgctggtccccgaggtccccctggctctgctggtgctcctggcaaagatggactcaacggtctccctggccccattgggccccctggtcctcgcggtcgcactggtgatgctggtcctgttggtccccccggccctcctggacctcctggtccccctggtcctcccagcgctggtttcgacttcagcttcctgccccagccacctcaagagaaggctcacgatggtggccgctactaccgggctgatgatgccaatgtggttcgtgaccgtgacctcgaggtggacaccaccctcaagagcctgagccagcagatcgagaacatccggagcccagagggcagccgcaagaaccccgcccgcacctgccgtgacctcaagatgtgccactctgactggaagagtggagagtactggattgaccccaaccaaggctgcaacctggatgccatcaaagtcttctgcaacatggagactggtgagacctgcgtgtaccccactcagcccagtgtggcccagaagaactggtacatcagcaagaaccccaaggacaagaggcatgtctggttcggcgagagcatgaccgatggattccagttcgagtatggcggccagggctccgaccctgccgatgtggccatccagctgaccttcctgcgcctgatgtccaccgaggcctcccagaacatcacctaccactgcaagaacagcgtggcctacatggaccagcagactggcaacctcaagaaggccctgctcctccagggctccaacgagatcgagatccgcgccgagggcaacagccgcttcacctacagcgtcactgtcgatggctgcacgagtcacaccggagcctggggcaagacagtgattgaatacaaaaccaccaagacctcccgcctgcccatcatcgatgtggcccccttggacgttggtgccccagaccaggaattcggcttcgacgttggccctgtctgcttcctgtaaactccctccatcccaacctggctccctcccacccaaccaactttccccccaacccggaaacagacaagcaacccaaactgaaccccctcaaaagccaaaaaatgggagacaatttcacatggactttggaaaatatttttttcctttgcattcatctctcaaacttagtttttatctttgaccaaccgaacatgaccaaaaaccaaaagtgcattcaaccttaccaaaaaaaaaaaaaaaaaaagaataaataaataactttttaaaaaaggaagcttggtccacttgcttgaagacccatgcgggggtaagtccctttctgcccgttgggcttatgaaaccccaatgctgccctttctgctcctttctccacaccccccttggggcctcccctccactccttccca

SEQ ID NO: 606 - DNA, 32765 bp, Homo sapiens
  misc_feature (951)..(951): second gene starts at position 951
atgggtgatcagagctggctctggaaccaggctgctccaggagtaaggagcccagtctttgcatgcagtgttgaaaaaggtaatgtccctcttgtgctgagcgagcacctggcacacagcagggacccaggcagtggggctgttaggttccttatctctcctgagccttgggcttccgctatccttgggacgtctggtcttctggcttccccggttcttcctgccgccctggatgcggtgacctgccagcacctgccgcagccttcgtccgggagtcgccccatctctccacgcatcggggccctgtgccccttgctgctgcagccgggcaccatgtcgacctcgtccttgaggcgccagatgaagaacatcgtccacaactactcagaggcggagatcaaggttcgagaggccacgagcaatgacccctggggcccatccagctccctcatgtcagagattgccgacctcacctacaacgttgtcgccttctcggagatcatgagcatgatctggaagcggctcaatgaccatggcaagaactggcgtcacgtttacaaggccatgacgctgatggagtacctcatcaagaccggctcggagcgcgtgtcgcagcagtgcaaggagaacatgtacgccgtgcagacgctgaaggacttccagtacgtggaccgcgacggcaaggaccagggcgtgaacgtgcgtgagaaagctaagcagctggtggccctgctgcgcgacgaggaccggctgcgggaagagcgggcgcacgcgctcaagaccaaggaaaagctggcacagaccgccacggcctcatcagcagctgtgggctcaggcccccctcccgaggcggagcaggcgtggccgcagagcagcggggaggaggagctgcagctccagctggccctggccatgagcaaggaggaggccgaccaggaggagcggatccgtcgcggggatgacctgcggctgcagatggcaatcgaggagagcaagagggagactgggggcaaggaggagtcgtccctcatggaccttgctgacgtcttcacggccccagctcctgccccgaccacagacccctgggggggcccagcacccatggctgctgccgtccccacggctgcccccacctcggacccctggggcggcccccctgtccctccagctgctgatccctggggaggtccagcccccacgccggcctctggggacccctggaggcctgctgcccctgcaggaccctcagttgacccttggggtgggaccccagcccctgcagctggggaggggcccacgcctgatccatggggaagttccgatggtggggtcccggtcagtgggccctcagcctccgatccctggacaccggccccggccttctcagatccctggggagggtcacctgccaagcccagcaccaatggcacaacagcagccgggggattcgacacggagcccgacgagttctctgactttgaccgactccgcacggcactgccgacctccgggagcagcgcaggagagctggagctgctggcaggagaggtgccggcccgaagccctggggcgtttgacatgagtggggtcaggggatctctggctgaggctgtgggcagccccccacctgcagccacaccaactcccacgccccccacccggaagacgccggagtcattcctggggcccaatgcagccctcgtcgacctggactcgctggtgagccggccgggccccacgccgcctggagccaaggcctccaaccccttcctgccaggcggaggcccagccactggcccttccgtcaccaaccccttccagcccgcgcctcccgcgacgctcaccctgaaccagctccgtctcagtcctgtgcctcccgtccctggagcgccacccacgtacatctctccccttggcgggggccctggcctgccccccatgatgcccccgctcctggctctcctggtgaacaaggtccctctggagcctctggtcctgctggtccccgaggtccccctggctctgctggtgctcctggcaaagatggactcaacggtctccctggccccattgggccccctggtcctcgcggtcgcactggtgatgctggtcctgttggtccccccggccctcctggacctcctggtccccctggtcctcccagcgctggtttcgacttcagcttcctgccccagccacctcaagagaaggctcacgatggtggccgctactaccgggctgatgatgccaatgtggttcgtgaccgtgacctcgaggtggacaccaccctcaagagcctgagccagcagatcgagaacatccggagcccagagggcagccgcaagaaccccgcccgcacctgccgtgacctcaagatgtgccactctgactggaagagtggagagtactggattgaccccaaccaaggctgcaacctggatgccatcaaagtcttctgcaacatggagactggtgagacctgcgtgtaccccactcagcccagtgtggcccagaagaactggtacatcagcaagaaccccaaggacaagaggcatgtctggttcggcgagagcatgaccgatggattccagttcgagtatggcggccagggctccgaccctgccgatgtggccatccagctgaccttcctgcgcctgatgtccaccgaggcctcccagaacatcacctaccactgcaagaacagcgtggcctacatggaccagcagactggcaacctcaagaaggccctgctcctccagggctccaacgagatcgagatccgcgccgagggcaacagccgcttcacctacagcgtcactgtcgatggctgcacgagtcacaccggagcctggggcaagacagtgattgaatacaaaaccaccaagacctcccgcctgcccatcatcgatgtggcccccttggacgttggtgccccagaccaggaattcggcttcgacgttggccctgtctgcttcctgtaaactccctccatcccaacctggctccctcccacccaaccaactttccccccaacccggaaacagacaagcaacccaaactgaaccccctcaaaagccaaaaaatgggagacaatttcacatggactttggaaaatatttttttcctttgcattcatctctcaaacttagtttttatctttgaccaaccgaacatgaccaaaaaccaaaagtgcattcaaccttaccaaaaaaaaaaaaaaaaaaagaataaataaataactttttaaaaaaggaagcttggtccacttgcttgaagacccatgcgggggtaagtccctttctgcccgttgggcttatgaaaccccaatgctgccctttctgctcctttctccacaccccccttggggcctcccctccactccttcccaaatctgtctccccagaagacacaggaaacaatgtattgtctgcccagcaatcaaaggcaatgctcaaacacccaagtggcccccaccctcagcccgctcctgcccgcccagcacccccaggccctgggggacctggggttctcagactgccaaagaagccttgccatctggcgctcccatggctcttgcaacatctccccttcgtttttgagggggtcatgccgggggagccaccagcccctcactgggttcggaggagagtcaggaagggccacgacaaagcagaaacatcggatttggggaacgcgtgtcaatcccttgtgccgcagggctgggcgggagagactgttctgttccttgtgtaactgtgttgctgaaagactacctcgttcttgtcttgatgtgtcaccggggcaactgcctgggggcggggatgggggcagggtggaagcggctccccattttataccaaaggtgctacatctatgtgatgggtggggtggggagggaatcactggtgctatagaaattgagatgcccccccaggccagcaaatgttcctttttgttcaaagtctatttttattccttgatatttttctttttttttttttttttttgtggatggggacttgtgaatttttctaaaggtgctatttaacatgggaggagagcgtgtgcggctccagcccagcccgctgctcactttccaccctctctccacctgcctctggcttctcaggcctctgctctccgacctctctcctctgaaaccctcctccacagctgcagcccatcctcccggctccctcctagtctgtcctgcgtcctctgtccccgggtttcagagacaacttcccaaagcacaaagcagtttttccccctaggggtgggaggaagcaaaagactctgtacctattttgtatgtgtataataatttgagatgtttttaattattttgattgctggaataaagcatgtggaaatgacccaaacataatcgtcggagcagacgggagtttctcctcggggtcggagcaggaggcacgcggagtgtgaggccacgcatgagcggacgctaaccccctccccagccacaaagagtctacatgtctagggtctagacatgttcagctttgtggacctccggctcctgctcctcttagcggccaccgccctcctgacgcacggccaagaggaaggccaagtcgagggccaagacgaagacatcccaccaatcacctgcgtacagaacggcctcaggtaccatgaccgagacgtgtggaaacccgagccctgccggatctgcgtctgcgacaacggcaaggtgttgtgcgatgacgtgatctgtgacgagaccaagaactgccccggcgccgaagtccccgagggcgagtgctgtcccgtctgccccgacggctcagagtcacccaccgaccaagaaaccaccggcgtcgagggacccaagggagacactggcccccgaggcccaaggggacccgcaggcccccctggccgagatggcatccctggacagcctggacttcccggaccccccggaccccccggacctcccggaccccctggcctcggaggaaactttgctccccagctgtcttatggctatgatgagaaatcaaccggaggaatttccgtgcctggccccatgggtccctctggtcctcgtggtctccctggcccccctggtgcacctggtccccaaggcttccaaggtccccctggtgagcctggcgagcctggagcttcaggtcccatgggtccccgaggtcccccaggtccccctggaaagaatggagatgatggggaagctggaaaacctggtcgtcctggtgagcgtgggcctcctgggcctcagggtgctcgaggattgcccggaacagctggcctccctggaatgaagggacacagaggtttcagtggtttggatggtgccaagggagatgctggtcctgctggtcctaagggtgagcctggcagccctggtgaaaatggagctcctggtcagatgggcccccgtggcctgcctggtgagagaggtcgccctggagcccctggccctgctggtgctcgtggaaatgatggtgctactggtgctgccgggccccctggtcccaccggccccgctggtcctcctggcttccctggtgctgttggtgctaagggtgaagctggtccccaagggccccgaggctctgaaggtccccagggtgtgcgtggtgagcctggcccccctggccctgctggtgctgctggccctgctggaaaccctggtgctgatggacagcctggtgctaaaggtgccaatggtgctcctggtattgctggtgctcctggcttccctggtgcccgaggcccctctggaccccagggccccggcggccctcctggtcccaagggtaacagcggtgaacctggtgctcctggcagcaaaggagacactggtgctaagggagagcctggccctgttggtgttcaaggaccccctggccctgctggagaggaaggaaagcgaggagctcgaggtgaacccggacccactggcctgcccggaccccctggcgagcgtggtggacctggtagccgtggtttccctggcgcagatggtgttgctggtcccaagggtcccgctggtgaacgtggttctcctggccctgctggccccaaaggatctcctggtgaagctggtcgtcccggtgaagctggtctgcctggtgccaagggtctgactggaagccctggcagccctggtcctgatggcaaaactggcccccctggtcccgccggtcaagatggtcgccccggacccccaggcccacctggtgcccgtggtcaggctggtgtgatgggattccctggacctaaaggtgctgctggagagcccggcaaggctggagagcgaggtgttcccggaccccctggcgctgtcggtcctgctggcaaagatggagaggctggagctcagggaccccctggccctgctggtcccgctggcgagagaggtgaacaaggccctgctggctcccccggattccagggtctccctggtcctgctggtcctccaggtgaagcaggcaaacctggtgaacagggtgttcctggagaccttggcgcccctggcccctctggagcaagaggcgagagaggtttccctggcgagcgtggtgtgcaaggtccccctggtcctgctggtccccgaggggccaacggtgctcccggcaacgatggtgctaagggtgatgctggtgcccctggagctcccggtagccagggcgcccctggccttcagggaatgcctggtgaacgtggtgcagctggtcttccagggcctaagggtgacagaggtgatgctggtcccaaaggtgctgatggctctcctggcaaagatggcgtccgtggtctgactggccccattggtcctcctggccctgctggtgcccctggtgacaagggtgaaagtggtcccagcggccctgctggtcccactggagctcgtggtgcccccggagaccgtggtgagcctggtccccccggccctgctggctttgctggcccccctggtgctgacggccaacctggtgctaaaggcgaacctggtgatgctggtgctaaaggcgatgctggtccccctggccctgccggacccgctggaccccctggccccattggtaatgttggtgctcctggagccaaaggtgctcgcggcagcgctggtccccctggtgctactggtttccctggtgctgctggccgagtcggtcctcctggcccctctggaaatgctggaccccctggccctcctggtcctgctggcaaagaaggcggcaaaggtccccgtggtgagactggccctgctggacgtcctggtgaagttggtccccctggtccccctggccctgctggcgagaaaggatcccctggtgctgatggtcctgctggtgctcctggtactcccgggcctcaaggtattgctggacagcgtggtgtggtcggcctgcctggtcagagaggagagagaggcttccctggtcttcctggcccctctggtgaacctggcaaacaaggtccctctggagcaagtggtgaacgtggtccccctggtcccatgggcccccctggattggctggaccccctggtgaatctggacgtgagggggctcctggtgccgaaggttcccctggacgagacggttctcctggcgccaagggtgaccgtggtgagaccggccccgctggaccccctggtgctcctggtgctcctggtgcccctggccccgttggccctgctggcaagagtggtgatcgtggtgagactggtcctgctggtcccaccggtcctgtcggccctgttggcgcccgtggccccgccggaccccaaggcccccgtggtgacaagggtgagacaggcgaacagggcgacagaggcataaagggtcaccgtggcttctctggcctccagggtccccctggccctcctggctctcctggtgaacaaggtccctctggagcctctggtcctgctggtccccgaggtccccctggctctgctggtgctcctggcaaagatggactcaacggtctccctggccccattgggccccctggtcctcgcggtcgcactggtgatgctggtcctgttggtccccccggccctcctggacctcctggtccccctggtcctcccagcgctggtttcgacttcagcttcctgccccagccacctcaagagaaggctcacgatggtggccgctactaccgggctgatgatgccaatgtggttcgtgaccgtgacctcgaggtggacaccaccctcaagagcctgagccagcagatcgagaacatccggagcccagagggcagccgcaagaaccccgcccgcacctgccgtgacctcaagatgtgccactctgactggaagagtggagagtactggattgaccccaaccaaggctgcaacctggatgccatcaaagtcttctgcaacatggagactggtgagacctgcgtgtaccccactcagcccagtgtggcccagaagaactggtacatcagcaagaaccccaaggacaagaggcatgtctggttcggcgagagcatgaccgatggattccagttcgagtatggcggccagggctccgaccctgccgatgtggccatccagctgaccttcctgcgcctgatgtccaccgaggcctcccagaacatcacctaccactgcaagaacagcgtggcctacatggaccagcagactggcaacctcaagaaggccctgctcctccagggctccaacgagatcgagatccgcgccgagggcaacagccgcttcacctacagcgtcactgtcgatggctgcacgagtcacaccggagcctggggcaagacagtgattgaatacaaaaccaccaagacctcccgcctgcccatcatcgatgtggcccccttggacgttggtgccccagaccaggaattcggcttcgacgttggccctgtctgcttcctgtaaactccctccatcccaacctggctccctcccacccaaccaactttccccccaacccggaaacagacaagcaacccaaactgaaccccctcaaaagccaaaaaatgggagacaatttcacatggactttggaaaatatttttttcctttgcattcatctctcaaacttagtttttatctttgaccaaccgaacatgaccaaaaaccaaaagtgcattcaaccttaccaaaaaaaaaaaaaaaaaaagaataaataaataactttttaaaaaaggaagcttggtccacttgcttgaagacccatgcgggggtaagtccctttctgcccgttgggcttatgaaaccccaatgctgccctttctgctcctttctccacaccccccttggggcctcccctccactccttcccaaatctgtctccccagaagacacaggaaacaatgtattgtctgcccagcaatcaaaggcaatgctcaaacacccaagtggcccccaccctcagcccgctcctgcccgcccagcacccccaggccctgggggacctggggttctcagactgccaaagaagccttgccatctggcgctcccatggctcttgcaacatctccccttcgtttttgagggggtcatgccgggggagccaccagcccctcactgggttcggaggagagtcaggaagggccacgacaaagcagaaacatcggatttggggaacgcgtgtcaatcccttgtgccgcagggctgggcgggagagactgttctgttccttgtgtaactgtgttgctgaaagactacctcgttcttgtcttgatgtgtcaccggggcaactgcctgggggcggggatgggggcagggtggaagcggctccccattttataccaaaggtgctacatctatgtgatgggtggggtggggagggaatcactggtgctatagaaattgagatgcccccccaggccagcaaatgttcctttttgttcaaagtctatttttattccttgatatttttctttttttttttttttttttgtggatggggacttgtgaatttttctaaaggtgctatttaacatgggaggagagcgtgtgcggctccagcccagcccgctgctcactttccaccctctctccacctgcctctggcttctcaggcctctgctctccgacctctctcctctgaaaccctcctccacagctgcagcccatcctcccggctccctcctagtctgtcctgcgtcctctgtccccgggtttcagagacaacttcccaaagcacaaagcagtttttccccctaggggtgggaggaagcaaaagactctgtacctattttgtatgtgtataataatttgagatgtttttaattattttgattgctggaataaagcatgtggaaatgacccaaacataatcgtcggagcagacgggagtttctcctcggggtcggagcaggaggcacgcggagtgtgaggccacgcatgagcggacgctaaccccctccccagccacaaagagtctacatgtctagggtctagacatgttcagctttgtggacctccggctcctgctcctcttagcggccaccgccctcctgacgcacggccaagaggaaggccaagtcgagggccaagacgaagacatcccaccaatcacctgcgtacagaacggcctcaggtaccatgaccgagacgtgtggaaacccgagccctgccggatctgcgtctgcgacaacggcaaggtgttgtgcgatgacgtgatctgtgacgagaccaagaactgccccggcgccgaagtccccgagggcgagtgctgtcccgtctgccccgacggctcagagtcacccaccgaccaagaaaccaccggcgtcgagggacccaagggagacactggcccccgaggcccaaggggacccgcaggcccccctggccgagatggcatccctggacagcctggacttcccggaccccccggaccccccggacctcccggaccccctggcctcggaggaaactttgctccccagctgtcttatggctatgatgagaaatcaaccggaggaatttccgtgcctggccccatgggtccctctggtcctcgtggtctccctggcccccctggtgcacctggtccccaaggcttccaaggtccccctggtgagcctggcgagcctggagcttcaggtcccatgggtccccgaggtcccccaggtccccctggaaagaatggagatgatggggaagctggaaaacctggtcgtcctggtgagcgtgggcctcctgggcctcagggtgctcgaggattgcccggaacagctggcctccctggaatgaagggacacagaggtttcagtggtttggatggtgccaagggagatgctggtcctgctggtcctaagggtgagcctggcagccctggtgaaaatggagctcctggtcagatgggcccccgtggcctgcctggtgagagaggtcgccctggagcccctggccctgctggtgctcgtggaaatgatggtgctactggtgctgccgggccccctggtcccaccggccccgctggtcctcctggcttccctggtgctgttggtgctaagggtgaagctggtccccaagggccccgaggctctgaaggtccccagggtgtgcgtggtgagcctggcccccctggccctgctggtgctgctggccctgctggaaaccctggtgctgatggacagcctggtgctaaaggtgccaatggtgctcctggtattgctggtgctcctggcttccctggtgcccgaggcccctctggaccccagggccccggcggccctcctggtcccaagggtaacagcggtgaacctggtgctcctggcagcaaaggagacactggtgctaagggagagcctggccctgttggtgttcaaggaccccctggccctgctggagaggaaggaaagcgaggagctcgaggtgaacccggacccactggcctgcccggaccccctggcgagcgtggtggacctggtagccgtggtttccctggcgcagatggtgttgctggtcccaagggtcccgctggtgaacgtggttctcctggccctgctggccccaaaggatctcctggtgaagctggtcgtcccggtgaagctggtctgcctggtgccaagggtctgactggaagccctggcagccctggtcctgatggcaaaactggcccccctggtcccgccggtcaagatggtcgccccggacccccaggcccacctggtgcccgtggtcaggctggtgtgatgggattccctggacctaaaggtgctgctggagagcccggcaaggctggagagcgaggtgttcccggaccccctggcgctgtcggtcctgctggcaaagatggagaggctggagctcagggaccccctggccctgctggtcccgctggcgagagaggtgaacaaggccctgctggctcccccggattccagggtctccctggtcctgctggtcctccaggtgaagcaggcaaacctggtgaacagggtgttcctggagaccttggcgcccctggcccctctggagcaagaggcgagagaggtttccctggcgagcgtggtgtgcaaggtccccctggtcctgctggtccccgaggggccaacggtgctcccggcaacgatggtgctaagggtgatgctggtgcccctggagctcccggtagccagggcgcccctggccttcagggaatgcctggtgaacgtggtgcagctggtcttccagggcctaagggtgacagaggtgatgctggtcccaaaggtgctgatggctctcctggcaaagatggcgtccgtggtctgactggccccattggtcctcctggccctgctggtgcccctggtgacaagggtgaaagtggtcccagcggccctgctggtcccactggagctcgtggtgcccccggagaccgtggtgagcctggtccccccggccctgctggctttgctggcccccctggtgctgacggccaacctggtgctaaaggcgaacctggtgatgctggtgctaaaggcgatgctggtccccctggccctgccggacccgctggaccccctggccccattggtaatgttggtgctcctggagccaaaggtgctcgcggcagcgctggtccccctggtgctactggtttccctggtgctgctggccgagtcggtcctcctggcccctctggaaatgctggaccccctggccctcctggtcctgctggcaaagaaggcggcaaaggtccccgtggtgagactggccctgctggacgtcctggtgaagttggtccccctggtccccctggccctgctggcgagaaaggatcccctggtgctgatggtcctgctggtgctcctggtactcccgggcctcaaggtattgctggacagcgtggtgtggtcggcctgcctggtcagagaggagagagaggcttccctggtcttcctggcccctctggtgaacctggcaaacaaggtccctctggagcaagtggtgaacgtggtccccctggtcccatgggcccccctggattggctggaccccctggtgaatctggacgtgagggggctcctggtgccgaaggttcccctggacgagacggttctcctggcgccaagggtgaccgtggtgagaccggccccgctggaccccctggtgctcctggtgctcctggtgcccctggccccgttggccctgctggcaagagtggtgatcgtggtgagactggtcctgctggtcccaccggtcctgtcggccctgttggcgcccgtggccccgccggaccccaaggcccccgtggtgacaagggtgagacaggcgaacagggcgacagaggcataaagggtcaccgtggcttctctggcctccagggtccccctggccctcctggctctcctggtgaacaaggtccctctggagcctctggtcctgctggtccccgaggtccccctggctctgctggtgctcctggcaaagatggactcaacggtctccctggccccattgggccccctggtcctcgcggtcgcactggtgatgctggtcctgttggtccccccggccctcctggacctcctggtccccctggtcctcccagcgctggtttcgacttcagcttcctgccccagccacctcaagagaaggctcacgatggtggccgctactaccgggctgatgatgccaatgtggttcgtgaccgtgacctcgaggtggacaccaccctcaagagcctgagccagcagatcgagaacatccggagcccagagggcagccgcaagaaccccgcccgcacctgccgtgacctcaagatgtgccactctgactggaagagtggagagtactggattgaccccaaccaaggctgcaacctggatgccatcaaagtcttctgcaacatggagactggtgagacctgcgtgtaccccactcagcccagtgtggcccagaagaactggtacatcagcaagaaccccaaggacaagaggcatgtctggttcggcgagagcatgaccgatggattccagttcgagtatggcggccagggctccgaccctgccgatgtggccatccagctgaccttcctgcgcctgatgtccaccgaggcctcccagaacatcacctaccactgcaagaacagcgtggcctacatggaccagcagactggcaacctcaagaaggccctgctcctccagggctccaacgagatcgagatccgcgccgagggcaacagccgcttcacctacagcgtcactgtcgatggctgcacgagtcacaccggagcctggggcaagacagtgattgaatacaaaaccaccaagacctcccgcctgcccatcatcgatgtggcccccttggacgttggtgccccagaccaggaattcggcttcgacgttggccctgtctgcttcctgtaaactccctccatcccaacctggctccctcccacccaaccaactttccccccaacccggaaacagacaagcaacccaaactgaaccccctcaaaagccaaaaaatgggagacaatttcacatggactttggaaaatatttttttcctttgcattcatctctcaaacttagtttttatctttgaccaaccgaacatgaccaaaaaccaaaagtgcattcaaccttaccaaaaaaaaaaaaaaaaaaagaataaataaataactttttaaaaaaggaagcttggtccacttgcttgaagacccatgcgggggtaagtccctttctgcccgttgggcttatgaaaccccaatgctgccctttctgctcctttctccacaccccccttggggcctcccctccactccttcccaaatctgtctccccagaagacacaggaaacaatgtattgtctgcccagcaatcaaaggcaatgctcaaacacccaagtggcccccaccctcagcccgctcctgcccgcccagcacccccaggccctgggggacctggggttctcagactgccaaagaagccttgccatctggcgctcccatggctcttgcaacatctccccttcgtttttgagggggtcatgccgggggagccaccagcccctcactgggttcggaggagagtcaggaagggccacgacaaagcagaaacatcggatttggggaacgcgtgtcaatcccttgtgccgcagggctgggcgggagagactgttctgttccttgtgtaactgtgttgctgaaagactacctcgttcttgtcttgatgtgtcaccggggcaactgcctgggggcggggatgggggcagggtggaagcggctccccattttataccaaaggtgctacatctatgtgatgggtggggtggggagggaatcactggtgctatagaaattgagatgcccccccaggccagcaaatgttcctttttgttcaaagtctatttttattccttgatatttttctttttttttttttttttttgtggatggggacttgtgaatttttctaaaggtgctatttaacatgggaggagagcgtgtgcggctccagcccagcccgctgctcactttccaccctctctccacctgcctctggcttctcaggcctctgctctccgacctctctcctctgaaaccctcctccacagctgcagcccatcctcccggctccctcctagtctgtcctgcgtcctctgtccccgggtttcagagacaacttcccaaagcacaaagcagtttttccccctaggggtgggaggaagcaaaagactctgtacctattttgtatgtgtataataatttgagatgtttttaattattttgattgctggaataaagcatgtggaaatgacccaaacataatcgtcggagcagacgggagtttctcctcggggtcggagcaggaggcacgcggagtgtgaggccacgcatgagcggacgctaaccccctccccagccacaaagagtctacatgtctagggtctagacatgttcagctttgtggacctccggctcctgctcctcttagcggccaccgccctcctgacgcacggccaagaggaaggccaagtcgagggccaagacgaagacatcccaccaatcacctgcgtacagaacggcctcaggtaccatgaccgagacgtgtggaaacccgagccctgccggatctgcgtctgcgacaacggcaaggtgttgtgcgatgacgtgatctgtgacgagaccaagaactgccccggcgccgaagtccccgagggcgagtgctgtcccgtctgccccgacggctcagagtcacccaccgaccaagaaaccaccggcgtcgagggacccaagggagacactggcccccgaggcccaaggggacccgcaggcccccctggccgagatggcatccctggacagcctggacttcccggaccccccggaccccccggacctcccggaccccctggcctcggaggaaactttgctccccagctgtcttatggctatgatgagaaatcaaccggaggaatttccgtgcctggccccatgggtccctctggtcctcgtggtctccctggcccccctggtgcacctggtccccaaggcttccaaggtccccctggtgagcctggcgagcctggagcttcaggtcccatgggtccccgaggtcccccaggtccccctggaaagaatggagatgatggggaagctggaaaacctggtcgtcctggtgagcgtgggcctcctgggcctcagggtgctcgaggattgcccggaacagctggcctccctggaatgaagggacacagaggtttcagtggtttggatggtgccaagggagatgctggtcctgctggtcctaagggtgagcctggcagccctggtgaaaatggagctcctggtcagatgggcccccgtggcctgcctggtgagagaggtcgccctggagcccctggccctgctggtgctcgtggaaatgatggtgctactggtgctgccgggccccctggtcccaccggccccgctggtcctcctggcttccctggtgctgttggtgctaagggtgaagctggtccccaagggccccgaggctctgaaggtccccagggtgtgcgtggtgagcctggcccccctggccctgctggtgctgctggccctgctggaaaccctggtgctgatggacagcctggtgctaaaggtgccaatggtgctcctggtattgctggtgctcctggcttccctggtgcccgaggcccctctggaccccagggccccggcggccctcctggtcccaagggtaacagcggtgaacctggtgctcctggcagcaaaggagacactggtgctaagggagagcctggccctgttggtgttcaaggaccccctggccctgctggagaggaaggaaagcgaggagctcgaggtgaacccggacccactggcctgcccggaccccctggcgagcgtggtggacctggtagccgtggtttccctggcgcagatggtgttgctggtcccaagggtcccgctggtgaacgtggttctcctggccctgctggccccaaaggatctcctggtgaagctggtcgtcccggtgaagctggtctgcctggtgccaagggtctgactggaagccctggcagccctggtcctgatggcaaaactggcccccctggtcccgccggtcaagatggtcgccccggacccccaggcccacctggtgcccgtggtcaggctggtgtgatgggattccctggacctaaaggtgctgctggagagcccggcaaggctggagagcgaggtgttcccggaccccctggcgctgtcggtcctgctggcaaagatggagaggctggagctcagggaccccctggccctgctggtcccgctggcgagagaggtgaacaaggccctgctggctcccccggattccagggtctccctggtcctgctggtcctccaggtgaagcaggcaaacctggtgaacagggtgttcctggagaccttggcgcccctggcccctctggagcaagaggcgagagaggtttccctggcgagcgtggtgtgcaaggtccccctggtcctgctggtccccgaggggccaacggtgctcccggcaacgatggtgctaagggtgatgctggtgcccctggagctcccggtagccagggcgcccctggccttcagggaatgcctggtgaacgtggtgcagctggtcttccagggcctaagggtgacagaggtgatgctggtcccaaaggtgctgatggctctcctggcaaagatggcgtccgtggtctgactggccccattggtcctcctggccctgctggtgcccctggtgacaagggtgaaagtggtcccagcggccctgctggtcccactggagctcgtggtgcccccggagaccgtggtgagcctggtccccccggccctgctggctttgctggcccccctggtgctgacggccaacctggtgctaaaggcgaacctggtgatgctggtgctaaaggcgatgctggtccccctggccctgccggacccgctggaccccctggccccattggtaatgttggtgctcctggagccaaaggtgctcgcggcagcgctggtccccctggtgctactggtttccctggtgctgctggccgagtcggtcctcctggcccctctggaaatgctggaccccctggccctcctggtcctgctggcaaagaaggcggcaaaggtccccgtggtgagactggccctgctggacgtcctggtgaagttggtccccctggtccccctggccctgctggcgagaaaggatcccctggtgctgatggtcctgctggtgctcctggtactcccgggcctcaaggtattgctggacagcgtggtgtggtcggcctgcctggtcagagaggagagagaggcttccctggtcttcctggcccctctggtgaacctggcaaacaaggtccctctggagcaagtggtgaacgtggtccccctggtcccatgggcccccctggattggctggaccccctggtgaatctggacgtgagggggctcctggtgccgaaggttcccctggacgagacggttctcctggcgccaagggtgaccgtggtgagaccggccccgctggaccccctggtgctcctggtgctcctggtgcccctggccccgttggccctgctggcaagagtggtgatcgtggtgagactggtcctgctggtcccaccggtcctgtcggccctgttggcgcccgtggccccgccggaccccaaggcccccgtggtgacaagggtgagacaggcgaacagggcgacagaggcataaagggtcaccgtggcttctctggcctccagggtccccctggccctcctggctctcctggtgaacaaggtccctctggagcctctggtcctgctggtccccgaggtccccctggctctgctggtgctcctggcaaagatggactcaacggtctccctggccccattgggccccctggtcctcgcggtcgcactggtgatgctggtcctgttggtccccccggccctcctggacctcctggtccccctggtcctcccagcgctggtttcgacttcagcttcctgccccagccacctcaagagaaggctcacgatggtggccgctactaccgggctgatgatgccaatgtggttcgtgaccgtgacctcgaggtggacaccaccctcaagagcctgagccagcagatcgagaacatccggagcccagagggcagccgcaagaaccccgcccgcacctgccgtgacctcaagatgtgccactctgactggaagagtggagagtactggattgaccccaaccaaggctgcaacctggatgccatcaaagtcttctgcaacatggagactggtgagacctgcgtgtaccccactcagcccagtgtggcccagaagaactggtacatcagcaagaaccccaaggacaagaggcatgtctggttcggcgagagcatgaccgatggattccagttcgagtatggcggccagggctccgaccctgccgatgtggccatccagctgaccttcctgcgcctgatgtccaccgaggcctcccagaacatcacctaccactgcaagaacagcgtggcctacatggaccagcagactggcaacctcaagaaggccctgctcctccagggctccaacgagatcgagatccgcgccgagggcaacagccgcttcacctacagcgtcactgtcgatggctgcacgagtcacaccggagcctggggcaagacagtgattgaatacaaaaccaccaagacctcccgcctgcccatcatcgatgtggcccccttggacgttggtgccccagaccaggaattcggcttcgacgttggccctgtctgcttcctgtaaactccctccatcccaacctggctccctcccacccaaccaactttccccccaacccggaaacagacaagcaacccaaactgaaccccctcaaaagccaaaaaatgggagacaatttcacatggactttggaaaatatttttttcctttgcattcatctctcaaacttagtttttatctttgaccaaccgaacatgaccaaaaaccaaaagtgcattcaaccttaccaaaaaaaaaaaaaaaaaaagaataaataaataactttttaaaaaaggaagcttggtccacttgcttgaagacccatgcgggggtaagtccctttctgcccgttgggcttatgaaaccccaatgctgccctttctgctcctttctccacaccccccttggggcctcccctccactccttcccaaatctgtctccccagaagacacaggaaacaatgtattgtctgcccagcaatcaaaggcaatgctcaaacacccaagtggcccccaccctcagcccgctcctgcccgcccagcacccccaggccctgggggacctggggttctcagactgccaaagaagccttgccatctggcgctcccatggctcttgcaacatctccccttcgtttttgagggggtcatgccgggggagccaccagcccctcactgggttcggaggagagtcaggaagggccacgacaaagcagaaacatcggatttggggaacgcgtgtcaatcccttgtgccgcagggctgggcgggagagactgttctgttccttgtgtaactgtgttgctgaaagactacctcgttcttgtcttgatgtgtcaccggggcaactgcctgggggcggggatgggggcagggtggaagcggctccccattttataccaaaggtgctacatctatgtgatgggtggggtggggagggaatcactggtgctatagaaattgagatgcccccccaggccagcaaatgttcctttttgttcaaagtctatttttattccttgatatttttctttttttttttttttttttgtggatggggacttgtgaatttttctaaaggtgctatttaacatgggaggagagcgtgtgcggctccagcccagcccgctgctcactttccaccctctctccacctgcctctggcttctcaggcctctgctctccgacctctctcctctgaaaccctcctccacagctgcagcccatcctcccggctccctcctagtctgtcctgcgtcctctgtccccgggtttcagagacaacttcccaaagcacaaagcagtttttccccctaggggtgggaggaagcaaaagactctgtacctattttgtatgtgtataataatttgagatgtttttaattattttgattgctggaataaagcatgtggaaatgacccaaacataatcgtcggagcagacgggagtttctcctcggggtcggagcaggaggcacgcggagtgtgaggccacgcatgagcggacgctaaccccctccccagccacaaagagtctacatgtctagggtctagacatgttcagctttgtggacctccggctcctgctcctcttagcggccaccgccctcctgacgcacggccaagaggaaggccaagtcgagggccaagacgaagacatcccaccaatcacctgcgtacagaacggcctcaggtaccatgaccgagacgtgtggaaacccgagccctgccggatctgcgtctgcgacaacggcaaggtgttgtgcgatgacgtgatctgtgacgagaccaagaactgccccggcgccgaagtccccgagggcgagtgctgtcccgtctgccccgacggctcagagtcacccaccgaccaagaaaccaccggcgtcgagggacccaagggagacactggcccccgaggcccaaggggacccgcaggcccccctggccgagatggcatccctggacagcctggacttcccggaccccccggaccccccggacctcccggaccccctggcctcggaggaaactttgctccccagctgtcttatggctatgatgagaaatcaaccggaggaatttccgtgcctggccccatgggtccctctggtcctcgtggtctccctggcccccctggtgcacctggtccccaaggcttccaaggtccccctggtgagcctggcgagcctggagcttcaggtcccatgggtccccgaggtcccccaggtccccctggaaagaatggagatgatggggaagctggaaaacctggtcgtcctggtgagcgtgggcctcctgggcctcagggtgctcgaggattgcccggaacagctggcctccctggaatgaagggacacagaggtttcagtggtttggatggtgccaagggagatgctggtcctgctggtcctaagggtgagcctggcagccctggtgaaaatggagctcctggtcagatgggcccccgtggcctgcctggtgagagaggtcgccctggagcccctggccctgctggtgctcgtggaaatgatggtgctactggtgctgccgggccccctggtcccaccggccccgctggtcctcctggcttccctggtgctgttggtgctaagggtgaagctggtccccaagggccccgaggctctgaaggtccccagggtgtgcgtggtgagcctggcccccctggccctgctggtgctgctggccctgctggaaaccctggtgctgatggacagcctggtgctaaaggtgccaatggtgctcctggtattgctggtgctcctggcttccctggtgcccgaggcccctctggaccccagggccccggcggccctcctggtcccaagggtaacagcggtgaacctggtgctcctggcagcaaaggagacactggtgctaagggagagcctggccctgttggtgttcaaggaccccctggccctgctggagaggaaggaaagcgaggagctcgaggtgaacccggacccactggcctgcccggaccccctggcgagcgtggtggacctggtagccgtggtttccctggcgcagatggtgttgctggtcccaagggtcccgctggtgaacgtggttctcctggccctgctggccccaaaggatctcctggtgaagctggtcgtcccggtgaagctggtctgcctggtgccaagggtctgactggaagccctggcagccctggtcctgatggcaaaactggcccccctggtcccgccggtcaagatggtcgccccggacccccaggcccacctggtgcccgtggtcaggctggtgtgatgggattccctggacctaaaggtgctgctggagagcccggcaaggctggagagcgaggtgttcccggaccccctggcgctgtcggtcctgctggcaaagatggagaggctggagctcagggaccccctggccctgctggtcccgctggcgagagaggtgaacaaggccctgctggctcccccggattccagggtctccctggtcctgctggtcctccaggtgaagcaggcaaacctggtgaacagggtgttcctggagaccttggcgcccctggcccctctggagcaagaggcgagagaggtttccctggcgagcgtggtgtgcaaggtccccctggtcctgctggtccccgaggggccaacggtgctcccggcaacgatggtgctaagggtgatgctggtgcccctggagctcccggtagccagggcgcccctggccttcagggaatgcctggtgaacgtggtgcagctggtcttccagggcctaagggtgacagaggtgatgctggtcccaaaggtgctgatggctctcctggcaaagatggcgtccgtggtctgactggccccattggtcctcctggccctgctggtgcccctggtgacaagggtgaaagtggtcccagcggccctgctggtcccactggagctcgtggtgcccccggagaccgtggtgagcctggtccccccggccctgctggctttgctggcccccctggtgctgacggccaacctggtgctaaaggcgaacctggtgatgctggtgctaaaggcgatgctggtccccctggccctgccggacccgctggaccccctggccccattggtaatgttggtgctcctggagccaaaggtgctcgcggcagcgctggtccccctggtgctactggtttccctggtgctgctggccgagtcggtcctcctggcccctctggaaatgctggaccccctggccctcctggtcctgctggcaaagaaggcggcaaaggtccccgtggtgagactggccctgctggacgtcctggtgaagttggtccccctggtccccctggccctgctggcgagaaaggatcccctggtgctgatggtcctgctggtgctcctggtactcccgggcctcaaggtattgctggacagcgtggtgtggtcggcctgcctggtcagagaggagagagaggcttccctggtcttcctggcccctctggtgaacctggcaaacaaggtccctctggagcaagtggtgaacgtggtccccctggtcccatgggcccccctggattggctggaccccctggtgaatctggacgtgagggggctcctggtgccgaaggttcccctggacgagacggttctcctggcgccaagggtgaccgtggtgagaccggccccgctggaccccctggtgctcctggtgctcctggtgcccctggccccgttggccctgctggcaagagtggtgatcgtggtgagactggtcctgctggtcccaccggtcctgtcggccctgttggcgcccgtggccccgccggaccccaaggcccccgtggtgacaagggtgagacaggcgaacagggcgacagaggcataaagggtcaccgtggcttctctggcctccagggtccccctggccctcctggctctcctggtgaacaaggtccctctggagcctctggtcctgctggtccccgaggtccccctggctctgctggtgctcctggcaaagatggactcaacggtctccctggccccattgggccccctggtcctcgcggtcgcactggtgatgctggtcctgttggtccccccggccctcctggacctcctggtccccctggtcctcccagcgctggtttcgacttcagcttcctgccccagccacctcaagagaaggctcacgatggtggccgctactaccgggctgatgatgccaatgtggttcgtgaccgtgacctcgaggtggacaccaccctcaagagcctgagccagcagatcgagaacatccggagcccagagggcagccgcaagaaccccgcccgcacctgccgtgacctcaagatgtgccactctgactggaagagtggagagtactggattgaccccaaccaaggctgcaacctggatgccatcaaagtcttctgcaacatggagactggtgagacctgcgtgtaccccactcagcccagtgtggcccagaagaactggtacatcagcaagaaccccaaggacaagaggcatgtctggttcggcgagagcatgaccgatggattccagttcgagtatggcggccagggctccgaccctgccgatgtggccatccagctgaccttcctgcgcctgatgtccaccgaggcctcccagaacatcacctaccactgcaagaacagcgtggcctacatggaccagcagactggcaacctcaagaaggccctgctcctccagggctccaacgagatcgagatccgcgccgagggcaacagccgcttcacctacagcgtcactgtcgatggctgcacgagtcacaccggagcctggggcaagacagtgattgaatacaaaaccaccaagacctcccgcctgcccatcatcgatgtggcccccttggacgttggtgccccagaccaggaattcggcttcgacgttggccctgtctgcttcctgtaaactccctccatcccaacctggctccctcccacccaaccaactttccccccaacccggaaacagacaagcaacccaaactgaaccccctcaaaagccaaaaaatgggagacaatttcacatggactttggaaaatatttttttcctttgcattcatctctcaaacttagtttttatctttgaccaaccgaacatgaccaaaaaccaaaagtgcattcaaccttaccaaaaaaaaaaaaaaaaaaagaataaataaataactttttaaaaaaggaagcttggtccacttgcttgaagacccatgcgggggtaagtccctttctgcccgttgggcttatgaaaccccaatgctgccctttctgctcctttctccacaccccccttggggcctcccctccactccttcccaaatctgtctccccagaagacacaggaaacaatgtattgtctgcccagcaatcaaaggcaatgctcaaacacccaagtggcccccaccctcagcccgctcctgcccgcccagcacccccaggccctgggggacctggggttctcagactgccaaagaagccttgccatctggcgctcccatggctcttgcaacatctccccttcgtttttgagggggtcatgccgggggagccaccagcccctcactgggttcggaggagagtcaggaagggccacgacaaagcagaaacatcggatttggggaacgcgtgtcaatcccttgtgccgcagggctgggcgggagagactgttctgttccttgtgtaactgtgttgctgaaagactacctcgttcttgtcttgatgtgtcaccggggcaactgcctgggggcggggatgggggcagggtggaagcggctccccattttataccaaaggtgctacatctatgtgatgggtggggtggggagggaatcactggtgctatagaaattgagatgcccccccaggccagcaaatgttcctttttgttcaaagtctatttttattccttgatatttttctttttttttttttttttttgtggatggggacttgtgaatttttctaaaggtgctatttaacatgggaggagagcgtgtgcggctccagcccagcccgctgctcactttccaccctctctccacctgcctctggcttctcaggcctctgctctccgacctctctcctctgaaaccctcctccacagctgcagcccatcctcccggctccctcctagtctgtcctgcgtcctctgtccccgggtttcagagacaacttcccaaagcacaaagcagtttttccccctaggggtgggaggaagcaaaagactctgtacctattttgtatgtgtataataatttgagatgtttttaattattttgattgctggaataaagcatgtggaaatgacccaaacataatcgtcggagcagacgggagtttctcctcggggtcggagcaggaggcacgcggagtgtgaggccacgcatgagcggacgctaaccccctccccagccacaaagagtctacatgtctagggtctagacatgttcagctttgtggacctccggctcctgctcctcttagcggccaccgccctcctgacgcacggccaagaggaaggccaagtcgagggccaagacgaagacatcccaccaatcacctgcgtacagaacggcctcaggtaccatgaccgagacgtgtggaaacccgagccctgccggatctgcgtctgcgacaacggcaaggtgttgtgcgatgacgtgatctgtgacgagaccaagaactgccccggcgccgaagtccccgagggcgagtgctgtcccgtctgccccgacggctcagagtcacccaccgaccaagaaaccaccggcgtcgagggacccaagggagacactggcccccgaggcccaaggggacccgcaggcccccctggccgagatggcatccctggacagcctggacttcccggaccccccggaccccccggacctcccggaccccctggcctcggaggaaactttgctccccagctgtcttatggctatgatgagaaatcaaccggaggaatttccgtgcctggccccatgggtccctctggtcctcgtggtctccctggcccccctggtgcacctggtccccaaggcttccaaggtccccctggtgagcctggcgagcctggagcttcaggtcccatgggtccccgaggtcccccaggtccccctggaaagaatggagatgatggggaagctggaaaacctggtcgtcctggtgagcgtgggcctcctgggcctcagggtgctcgaggattgcccggaacagctggcctccctggaatgaagggacacagaggtttcagtggtttggatggtgccaagggagatgctggtcctgctggtcctaagggtgagcctggcagccctggtgaaaatggagctcctggtcagatgggcccccgtggcctgcctggtgagagaggtcgccctggagcccctggccctgctggtgctcgtggaaatgatggtgctactggtgctgccgggccccctggtcccaccggccccgctggtcctcctggcttccctggtgctgttggtgctaagggtgaagctggtccccaagggccccgaggctctgaaggtccccagggtgtgcgtggtgagcctggcccccctggccctgctggtgctgctggccctgctggaaaccctggtgctgatggacagcctggtgctaaaggtgccaatggtgctcctggtattgctggtgctcctggcttccctggtgcccgaggcccctctggaccccagggccccggcggccctcctggtcccaagggtaacagcggtgaacctggtgctcctggcagcaaaggagacactggtgctaagggagagcctggccctgttggtgttcaaggaccccctggccctgctggagaggaaggaaagcgaggagctcgaggtgaacccggacccactggcctgcccggaccccctggcgagcgtggtggacctggtagccgtggtttccctggcgcagatggtgttgctggtcccaagggtcccgctggtgaacgtggttctcctggccctgctggccccaaaggatctcctggtgaagctggtcgtcccggtgaagctggtctgcctggtgccaagggtctgactggaagccctggcagccctggtcctgatggcaaaactggcccccctggtcccgccggtcaagatggtcgccccggacccccaggcccacctggtgcccgtggtcaggctggtgtgatgggattccctggacctaaaggtgctgctggagagcccggcaaggctggagagcgaggtgttcccggaccccctggcgctgtcggtcctgctggcaaagatggagaggctggagctcagggaccccctggccctgctggtcccgctggcgagagaggtgaacaaggccctgctggctcccccggattccagggtctccctggtcctgctggtcctccaggtgaagcaggcaaacctggtgaacagggtgttcctggagaccttggcgcccctggcccctctggagcaagaggcgagagaggtttccctggcgagcgtggtgtgcaaggtccccctggtcctgctggtccccgaggggccaacggtgctcccggcaacgatggtgctaagggtgatgctggtgcccctggagctcccggtagccagggcgcccctggccttcagggaatgcctggtgaacgtggtgcagctggtcttccagggcctaagggtgacagaggtgatgctggtcccaaaggtgctgatggctctcctggcaaagatggcgtccgtggtctgactggccccattggtcctcctggccctgctggtgcccctggtgacaagggtgaaagtggtcccagcggccctgctggtcccactggagctcgtggtgcccccggagaccgtggtgagcctggtccccccggccctgctggctttgctggcccccctggtgctgacggccaacctggtgctaaaggcgaacctggtgatgctggtgctaaaggcgatgctggtccccctggccctgccggacccgctggaccccctggccccattggtaatgttggtgctcctggagccaaaggtgctcgcggcagcgctggtccccctggtgctactggtttccctggtgctgctggccgagtcggtcctcctggcccctctggaaatgctggaccccctggccctcctggtcctgctggcaaagaaggcggcaaaggtccccgtggtgagactggccctgctggacgtcctggtgaagttggtccccctggtccccctggccctgctggcgagaaaggatcccctggtgctgatggtcctgctggtgctcctggtactcccgggcctcaaggtattgctggacagcgtggtgtggtcggcctgcctggtcagagaggagagagaggcttccctggtcttcctggcccctctggtgaacctggcaaacaaggtccctctggagcaagtggtgaacgtggtccccctggtcccatgggcccccctggattggctggaccccctggtgaatctggacgtgagggggctcctggtgccgaaggttcccctggacgagacggttctcctggcgccaagggtgaccgtggtgagaccggccccgctggaccccctggtgctcctggtgctcctggtgcccctggccccgttggccctgctggcaagagtggtgatcgtggtgagactggtcctgctggtcccaccggtcctgtcggccctgttggcgcccgtggccccgccggaccccaaggcccccgtggtgacaagggtgagacaggcgaacagggcgacagaggcataaagggtcaccgtggcttctctggcctccagggtccccctggccctcctggctctcctggtgaacaaggtccctctggagcctctggtcctgctggtccccgaggtccccctggctctgctggtgctcctggcaaagatggactcaacggtctccctggccccattgggccccctggtcctcgcggtcgcactggtgatgctggtcctgttggtccccccggccctcctggacctcctggtccccctggtcctcccagcgctggtttcgacttcagcttcctgccccagccacctcaagagaaggctcacgatggtggccgctactaccgggctgatgatgccaatgtggttcgtgaccgtgacctcgaggtggacaccaccctcaagagcctgagccagcagatcgagaacatccggagcccagagggcagccgcaagaaccccgcccgcacctgccgtgacctcaagatgtgccactctgactggaagagtggagagtactggattgaccccaaccaaggctgcaacctggatgccatcaaagtcttctgcaacatggagactggtgagacctgcgtgtaccccactcagcccagtgtggcccagaagaactggtacatcagcaagaaccccaaggacaagaggcatgtctggttcggcgagagcatgaccgatggattccagttcgagtatggcggccagggctccgaccctgccgatgtggccatccagctgaccttcctgcgcctgatgtccaccgaggcctcccagaacatcacctaccactgcaagaacagcgtggcctacatggaccagcagactggcaacctcaagaaggccctgctcctccagggctccaacgagatcgagatccgcgccgagggcaacagccgcttcacctacagcgtcactgtcgatggctgcacgagtcacaccggagcctggggcaagacagtgattgaatacaaaaccaccaagacctcccgcctgcccatcatcgatgtggcccccttggacgttggtgccccagaccaggaattcggcttcgacgttggccctgtctgcttcctgtaaactccctccatcccaacctggctccctcccacccaaccaactttccccccaacccggaaacagacaagcaacccaaactgaaccccctcaaaagccaaaaaatgggagacaatttcacatggactttggaaaatatttttttcctttgc

SEQ ID NO: 607 - DNA, 7300 bp, Homo sapiens
  misc_feature (192)..(192): second gene starts at position 192
atggggggcggagacctgaatctgaagaagagctggcacccgcagaccctcaggaatgtggagaaagtgtggaaggccgagcagaagcatgaggctgagcggaagaagattgaggagcttcagcgggagctgcgagaagagagagcccgggaagagatgcagcgctatgcggaggatgttggggccgtcaactcccccacagtttgtggttcggccaagagatcagattgttgctcaaggtcgaacagtgacatttccctgtgaaactaaaggaaacccacagccagctgttttttggcagaaagaaggcagccagaacctacttttcccaaaccaaccccagcagcccaacagtagatgctcagtgtcaccaactggagacctcacaatcaccaacattcaacgttccgacgcgggttactacatctgccaggctttaactgtggcaggaagcattttagcaaaagctcaactggaggttactgatgttttgacagatagacctccacctataattctacaaggcccagccaaccaaacgctggcagtggatggtacagcgttactgaaatgtaaagccactggtgatcctcttcctgtaattagctggttaaaggagggatttacttttccgggtagagatccaagagcaacaattcaagagcaaggcacactgcagattaagaatttacggatttctgatactggcacttatacttgtgtggctacaagttcaagtggagagacttcctggagtgcagtgctggatgtgacagagtctggagcaacaatcagtaaaaactatgatttaagtgacctgccagggccaccatccaaaccgcaggtcactgatgttactaagaacagtgtcaccttgtcctggcagccaggtacccctggaacccttccagcaagtgcatatatcattgaggctttcagccaatcagtgagcaacagctggcagaccgtggcaaaccatgtaaagaccaccctctatactgtaagaggactgcggcccaatacaatctacttattcatggtcagagcgatcaacccccaaggtctcagtgacccaagtcccatgtcagatcctgtgcgcacacaagatatcagcccaccagcacaaggagtggaccacaggcaagtgcagaaagagctaggagatgtccttgtccgtcttcataatccagttgtgctgactcccaccacggttcaggtcacatggacggttgatcgccaaccccagtttatccaaggctaccgagtgatgtatcgtcagacttcaggtctgcaggcgacatcttcgtggcagaatttagatgccaaagtcccgactgaacgaagtgctgtcttagtcaacctgaaaaagggggtgacttatgaaattaaagtacggccatattttaatgagttccaaggaatggatagtgaatctaaaacggttcgtactactgaagaagccccaagtgccccaccacagtctgtcactgtactgacagttggaagctacaatagcacaagtattagtgtttcctgggatcctcctcctccagatcaccagaatggaattatccaagaatacaagatctggtgtctaggaaatgaaacgcgattccatatcaacaaaactgtggatgcagccattcggtccgtaataattggtggattattcccaggtattcaataccgggtagaggttgcagctagtaccagtgcaggggttggagtaaagagtgagccacagccaataataatcgggagacgcaatgaagttgtcattactgaaaacaataacagcataactgagcaaatcactgatgtggtgaagcaaccagcctttatagctggtattggtggtgcctgctgggtaattctgatgggttttagcatatggttgtattggcgaagaaagaagaggaagggactcagtaattatgctgttacgtttcaaagaggagatggaggactaatgagcaatggaagccgtccaggtcttctcaatgctggtgatcccagctatccatggcttgctgattcttggccagccacgagcttgccagtaaataatagcaacagtggcccaaatgagattggaaattttggccgtggagatgtgctgccaccagttccaggccaaggggataaaacagcaacgatgctctcagatggagccatttatagtagcattgacttcactaccaaaaccagttacaacagttccagccaaataacacaggctaccccatatgccacgacacagatcttgcattccaacagcatacatgaattggctgtcgatctgcctgatccacaatggaaaagctcaattcagcaaaaaacagatctgatgggatttggttattctctacctgatcagaacaaaggtaacaatggtgggaaaggtggaaaaaagaagaaaaataaaaactcttctaaaccacagaaaaacaatggatccacttgggccaatgtccctctacctccccccccagtccagccccttcctggcacggagctggaacactatgcagtggaacaacaagaaaatggctatgacagtgatagctggtgcccaccattgccagtacaaacttacttacaccaaggtctggaagatgaactggaagaagatgatgatagggtcccaacacctcctgttcgaggcgtggcttcttctcctgctatctcctttggacagcagtccactgcaactcttactccatccccacgggaagagatgcaacccatgctgcaggctcacctggatgagttgacaagagcctatcagtttgatatagcaaaacaaacatggcacattcaaagcaataatcaacctccacagcctccagttccaccgttaggttatgtgtctggagccttgatttctgatttggaaacggatgttgcagatgatgatgccgacgacgaagaggaagctttagaaatccccaggcccctgagagcactggaccagactcctggatccagcatggacaatctagacagctctgtgacaggaaaagcctttacctcctctcaaagacctcgacctaccagcccattttctactgacagtaacaccagtgcagccctgagtcaaagtcagaggcctcggcccactaaaaaacacaagggagggcggatggaccaacaaccagcattgcctcatcgaagggaaggaatgacagatgaggaggccttggtgccctatagcaagcccagtttcccatctccaggtggccacagctcatcaggaacagcttcttctaagggatccactggacctaggaaaaccgaggtgttgagagcaggccaccagcgcaatgccagcgaccttcttgacataggatatatgggctccaacagtcaaggacagtttacaggtgaattatagtaaatgagaggagacatacaaagctgctctgaaggaccatcaggtccggactcatggaagtgatgactctaaacagtgcaatgaacaatttatttatgtactattaaaagaactgtaaatgcaatgtaaagacacacagccacacatatcccacagatattttcattgtgttcttctcttaagtacaccacccaccttaactctttcttgtcaggagtatataaaaaagaaagaaaacaaaactcgccctacaggaagaaaaggattctcctctgtatataatttcttttgtgcattgctatgcaagctcactctttttagctctgctcatattattgtctgttcttattggtctgttgtactatatgtgaattaataggctgtggtgccatatattaacttttaattgtgtaacttttatgtttaaattttgcactgcaattttatttggtgataagcacaaatctctactcctcatgacatgaagaaaaagactgaatgtgaagggagtttctgtactgtaagctagattggataatgatggctgtaacaaatcatgttagatggttttcagttggggtgtagaaataggaagatgcaaaggaacaatggtgttggcaaagtcttctttgaatatcagggactgagtcaataaaaaaaatagtagaaaggtggcttttactattgacaaaagccggggtcaaaaaaagtagtttaagtcttaagactgaatatgcattaaagtatgcaggtagcaaagatgtaataaatttgcttaaaaaaagaaattaaagttttatttagaatcaattttacctgtcattgtaattgacccatctgagaattacaataagcaagaggaaattaaggtgttttgcaagagctgtatttatattacagttttttaaaaacattttctgaattatcgtaattaagctctccaactcgttaagtcagaatataatatgaagttccccaaggaaacgaacaaaatgaactctagaatatctagcaaatagttaaagaagcaatttattattagggcatactcgggctgtttccaaatataaactctattgcaatatcttatttcatctttctaatacatgtacagtgcacactagaggatagagctgcatcacttaaattcatgacttaaaaaataatacagtttatatacaacttgttttttatttgattaagaagtgaagtttacgccacccaatgtatagccaaattgtacgtgcttaaaaaacagtgccgagagtatgttcagttcgcagtaagtagatttattggaataaatattctatggtacattctcagaaattggcttccaactaaaatacgtttgacccattttgaataaggaaattgaaaagaaaaatttaaaaggagaaaaaaatgcatgtttataaactttttaaataaaaccagaccttgtaagtggacattaataattgtcctgcctcatttgttttcacgactttgacaacaagaagttcctgaacattagtcatgtatgctcagaataaatgtgactttgaaatatatgttagctactgtacatgtatagtcagtcaagtagaagaggaccttcctgaaattcccacttgtgacattttcccatgggtttcctacacaatcttaaattttatttctgtctatactttctcaaatttttcctatgataagttcagttgttggtactcttctaaaaatattcaacgtgattaggatcagttctaaaatacgggacccctttgagtgacaattcgcactccatgcattattggctcagtagccaatttttgtcacgtcgttataacaaggagatgacataattaaacatttccatcctttctattccctgagactgcatcagcacaggcaagtatagaatgtaatgttcttcatgggccccaccagctttttggtgccatgtaatttatttcttcgctgaagagaaaaagaattctgagacacagttattaaaccctttatcaactttctaccatcagtgcctgaattctaatgcagtgtgatttctctgggacaaagagactgaggaagatgaaaagtttcttcaaagagtgaatacatacttattcacaactctaggatgtgaggactttaaatatctctttatgaagttccctgcctaacctctttctatttaaaggcaaacaaatttcgaagaggttttgtgttccctctttatgtttctctatgacccagtttagtctaaaaccttagttcattacatatacaacacatagcctttgatccctggtaactggcaggtgttggtgattaataaaccaaggcttcaaagtgaagtatgtgtgtgcagatgacttttggaataacgtgggcatagcatcataccttcctgattgtcttcagcatataaaaattaactgttgtagttaaaattatgtcagtgcagagcttgtggttacttggaatgttctttcagaatagtccatgttgcctattaaacctagttttaaacacattgggcagtcaatttatgcacccaaaatatcaccctcaggtagattgagggcaagataaaatgctgtatgtagctatacaaaggaattcagaaacattactggaaagcaaagcctttgtcagcttgctactgacaaagtagtaaaaagctactaatcagtgttgagtcagatgtcaacagaaaaatacaaatacctatgagagccacagcagtttctcgtttcatagccgattcaatgaatatgattagaaattcactgagctcactcttgcaggtttaaatggaggcctgcataaggactgcaagaggaaatctgggtgggagagaatgtaatctgatcttgcactcataggcaatgctgcaatgcaatcatgtccaatacaagcacagcttcattcataacaggaaacgtcttctttgggaaaatagctctattggtgcccaaactcaggtatgccagtgtatgcaggtggagtcgccctacccctcttccaaacatgtcctgtgagatttttaaaataagatgggatagtacaggggcatgaaaagaattgattccttcacaggatttgaatccagttcaagggagaatgtagaaaattcaaaaccaacatataaggtatcacacaaccaagaaaagtaaaaccattgcaagtttacttgcgttgagtacaaaacagatttaatggtgttctatgtcatagtttaatgctctgggtatttaaatatgttttcaacaggatttgagttgaaagtttgtaatgtgctttgatggaacacctctcaatttctattcaataaacttatgtaattgtccattgacaatataatgataacagtaccattgaactctaaactgtggtttatcttcactactgggaagcaactgtgcatcagtattaaagatatgcagaaacataatattcactaatttgttcatctgcttctgtatattgtttatggaattacatggcaagaactgttctaaagcaacatgtctttccacattattttagaggtgaaattacttttgttttgcttctctataatgtgtacttcaaatgaaacaccatacttttttctaaaaaaagatgttcaatttactaatttttttaaatctcataatttaaaaagcatttgttgtgattttaaagtgttgcaagaaaagggattttgtggccgtgggtagactttttatactttgttttatagatggattttttttaactgtagtttgtttaagtcaccaagcagcatccaaaatcttaatgtgtttcatttgatgttgttagatcagagaagaaattggcataaaatcggttaatagtattgtcaaagaattgtgtattgtgtactcactgggaaaaaataaaatatattcacatttc

SEQ ID NO: 608 - DNA, 7300 bp, Homo sapiens; identical to SEQ ID NO: 607
  misc_feature (192)..(192): second gene starts at position 192

SEQ ID NO: 609 - DNA, 1582 bp, Homo sapiens
  misc_feature (49)..(49): second gene starts at position 49
acctcgtggcctggtctccattatttgagatgagttacatcttggagggcctgatcttttggccagaaggagattaaaaagatgcccctcaagatggctgtgcctgtcagctgcatggagcttcgttcaagtattttctgagcctgatggatttacagtgatcttcagtggtctggggaataacgctggtggaaccatgcactggaatgacacacgcccggcacatttcaggatactaaaagtggttttaagggaggctgtggctgaatgcctcatggattcttacagcttggatgtccatgggggacgaaggactgcagctggctgagagggttgagatctctgtttacttagatctctgccaacttcctttgggtctccctatggaatgtaagaccccgactcttcctggtgaagcatctgatgcacgttccatccggcgctcagctgggcttgagctgaccatactccctggagccttctcccgaggtgcgcgggtgaccttggcacatacagccatcatgatggtactttaagtggaggctgaatcatctcccctttgagctgcttggcacgtggctcccttggtgttccccttttactgccaggacactgagatttggagagagtctcactctgtggtccaggctgaagtacagtggcatgatcccaggtcactgcaacccccacctcccgggttcaagtgatcctcctgcctcagcctcccgagtagctggtattacaggcgtgtgccacaaagcctggctaagttttgtatttttagtagagacggggtttcaccatgttggccaggttggtctcgaactcctgacctcaagtgatccactcactttggcctttcaacgtgctgggattacaggcgagagtcaccgcacccggacgactctgacatttttgaagagtccagaatcctgttacacctgggatttaggcactttcaatctgaaaaaatacatatcctttcagcactctggacggacttgagaactgtccttacgtgacctaaagctggagtattttgagattggagaattaagagccagtcttggtgctctgtgttcacctggttcatctgaggagctgcatctaccctgcccatgccatagatcctgccctgtttgcttctcctgttgctgctagtggacatgagaaggacagaataacgggctcccagattcacaagccccaccaagaggatcaccccaggaacgcttggaggctgaggagttcactgaggctactgcatcttgagactcaggatgaagacccagcttggggctgtcaaaggttttttgcatgtctgacacccatgactccacctggaccttatggctccacccagaagcaattcagcccaacaggaggacagcttcaacccattacgatttcatctctgccccaaccactcagcagcaagcacctgttacctgtccacccccaccccttcccccaaactgcctttgaaaaatccctaacctatgagctttgaataagatgagtacgaacttcatcgcccacgtggcgtggccggcctcgtgtctattaaattctttttctacta

SEQ ID NO: 610 - DNA, 1582 bp, Homo sapiens; identical to SEQ ID NO: 609
  misc_feature (49)..(49): second gene starts at position 49

SEQ ID NO: 611 - DNA, 1582 bp, Homo sapiens; identical to SEQ ID NO: 609
  misc_feature (49)..(49): second gene starts at position 49

SEQ ID NO: 612 - DNA, 1582 bp, Homo sapiens; identical to SEQ ID NO: 609
  misc_feature (49)..(49): second gene starts at postion 49

SEQ ID NO: 613 - DNA, 1582 bp, Homo sapiens; identical to SEQ ID NO: 609
  misc_feature (49)..(49): second gene starts at position 49

SEQ ID NO: 614 - DNA, 1582 bp, Homo sapiens; identical to SEQ ID NO: 609
  misc_feature (49)..(49): second gene starts at position 49

SEQ ID NO: 615 - DNA, 1747 bp, Homo sapiens
  misc_feature (49)..(49): second gene starts at position 49
acctcgtggcctggtctccattatttgagatgagttacatcttggagggaccatagctgtctgcagtgcaggaagccaactattaaggggaaacaaaagtgttcttaggagtcctgctgtcactgtggattgagccggtgaagccctgagggatttcatcgctgaggtggatggagaagcagctgggggccttggctgtaaggacccctaagggcctgatcttttggccagaaggagattaaaaagatgcccctcaagatggctgtgcctgtcagctgcatggagcttcgttcaagtattttctgagcctgatggatttacagtgatcttcagtggtctggggaataacgctggtggaaccatgcactggaatgacacacgcccggcacatttcaggatactaaaagtggttttaagggaggctgtggctgaatgcctcatggattcttacagcttggatgtccatgggggacgaaggactgcagctggctgagagggttgagatctctgtttacttagatctctgccaacttcctttgggtctccctatggaatgtaagaccccgactcttcctggtgaagcatctgatgcacgttccatccggcgctcagctgggcttgagctgaccatactccctggagccttctcccgaggtgcgcgggtgaccttggcacatacagccatcatgatggtactttaagtggaggctgaatcatctcccctttgagctgcttggcacgtggctcccttggtgttccccttttactgccaggacactgagatttggagagagtctcactctgtggtccaggctgaagtacagtggcatgatcccaggtcactgcaacccccacctcccgggttcaagtgatcctcctgcctcagcctcccgagtagctggtattacaggcgtgtgccacaaagcctggctaagttttgtatttttagtagagacggggtttcaccatgttggccaggttggtctcgaactcctgacctcaagtgatccactcactttggcctttcaacgtgctgggattacaggcgagagtcaccgcacccggacgactctgacatttttgaagagtccagaatcctgttacacctgggatttaggcactttcaatctgaaaaaatacatatcctttcagcactctggacggacttgagaactgtccttacgtgacctaaagctggagtattttgagattggagaattaagagccagtcttggtgctctgtgttcacctggttcatctgaggagctgcatctaccctgcccatgccatagatcctgccctgtttgcttctcctgttgctgctagtggacatgagaaggacagaataacgggctcccagattcacaagccccaccaagaggatcaccccaggaacgcttggaggctgaggagttcactgaggctactgcatcttgagactcaggatgaagacccagcttggggctgtcaaaggttttttgcatgtctgacacccatgactccacctggaccttatggctccacccagaagcaattcagcccaacaggaggacagcttcaacccattacgatttcatctctgccccaaccactcagcagcaagcacctgttacctgtccacccccaccccttcccccaaactgcctttgaaaaatccctaacctatgagctttgaataagatgagtacgaacttcatcgcccacgtggcgtggccggcctcgtgtctattaaattctttttctacta

SEQ ID NO: 616 - DNA, 1747 bp, Homo sapiens; identical to SEQ ID NO: 615
  misc_feature (49)..(49): second gene starts at position 49

SEQ ID NO: 617 - DNA, 32765 bp, Homo sapiens
  misc_feature (813)..(813): second gene starts at position 813
atgggggcctgcctgggagcctgctccctgctcagctgcgcgtcctgcctctgcggctctgccccctgcatcctgtgcagctgctgccccgccagccgcaactccaccgtgagccgcctcatcttcacgttcttcctcttcctgggggtgctggtgtccatcattatgctgagcccgggcgtggagagtcagctctacaagctgccctgggtgtgtgaggagggggccgggatccccaccgtcctgcagggccacatcgactgtggctccctgcttggctaccgcgctgtctaccgcatgtgcttcgccacggcggccttcttcttctttttcaccctgctcatgctctgcgtgagcagcagccgggacccccgggctgccatccagaatgggttttggttctttaagttcctgatcctggtgggcctcaccgtgggtgccttctacattcctgacggctccttcaccaacatctggttctacttcggcgtcgtgggctccttcctcttcatcctcatccagctggtgctgctcatcgactttgcgcactcctggaaccagcggtggctgggcaaggccgaggagtgcgattcccgtgcctggtacgcaggcctcttcttcttcactctcctcttctacttgctgtcgatcgcggccgtggcgctgatgttcatgtactacactgagcccagcggctgccacgagggcaaggtcttcatcagcctcaacctcaccttctgtgtctgcgtgtccatcgctgctgtcctgcccaaggtccaggacgcccagcccaactcgggtctgctgcaggcagagggtgaggaccgaggagcgcgagcagatcaagaccctcaacaataagtttgcctccttcatcgacaaggtgcggttcctggagcagcagaacaaggttctggacaccaagtggaccctgctgcaggagcagggcaccaagactgtgaggcagaacctggagccgttgttcgagcagtacatcaacaacctcaggaggcagctggacagcatcgtgggggaacggggccgcctggactcagagctgagaaacatgcaggacctggtggaagacttcaagaacaagtatgaggatgaaatcaacaagcgtaccactgctgagaatgagtttgtgatgctgaagaaggatgtagatgctgcctacatgaacaaggtggagctggaggccaaggttgatgcactgatggatgagattaacttcatgaagatgttctttgatgcggagctgtcccagatgcagacgcatgtctctgacacctcagtggtcctctccatggacaacaaccgcaacctggacctggatagcatcatcgctgaggtcaaggcccagtatgaggagattgccaaccgcagccggacagaagccgagtcctggtatcagaccaagtatgaggagctgcagcagacagctggccggcatggcgatgacctccgcaacaccaagcatgagatctctgagatgaaccggatgatccagaggctgagagccgagattgacaatgtcaagaaacagtgcgccaatctgcagaacgccattgcggatgccgagcagcgtggggagctggccctcaaggatgccaggaacaagctggccgagctggaggaggccctgcagaaggccaagcaggacatggcccggctgctgcgtgagtaccaggagctcatgaacaccaagctggccctggacgtggagatcgccacttaccgcaagctgctggagggcgaggaatgcagactcagtggagaaggagttggaccagtcaacatctctgttgtcacaagcagtgtttcctctggatatggcagtggcagtggctatggcggtggcctcggtggaggtcttggcggcggcctcggtggaggtcttgccggaggtagcagtggaagctactactccagcagcagtgggggtgtcggcctaggtggtgggctcagtgtggggggctctggcttcagtgcaagcagtggccgagggctgggggtgggctttggcagtggcgggggtagcagctccagcgtcaaatttgtctccaccacctcctcctcccggaagagcttcaagagctaagaacctgctgcaagtcactgccttccaagtgcagcaacccagcccatggagattgcctcttctaggcagttgctcaagccatgttttatccttttctggagagtagtctagaccaagccaattgcagaaccacattctttggttcccaggagagccccattcccagcccctggtctcccgtgccgcagttctatattctgcttcaaatcagccttcaggtttcccacagcatggcccctgctgacacgagaacccaaagttttcccaaatctaaatcatcaaaacagaatccccaccccaatcccaaattttgttttggttctaactacctccagaatgtgttcaataaaatgcttttataatataatcgacagctctctcgcccagcccagttctggaagggataaaaagggggcatcaccgttcctgggtaacagagccaccttctgcgtcctgctgagctctgttctctccagcacctcccaacccactagtgcctggttctcttgctccaccaggaacaagccaccatgtctcgccagtcaagtgtgtccttccggagcgggggcagtcgtagcttcagcaccgcctctgccatcaccccgtctgtctcccgcaccagcttcacctccgtgtcccggtccgggggtggcggtggtggtggcttcggcagggtcagccttgcgggtgcttgtggagtgggtggctatggcagccggagcctctacaacctggggggctccaagaggatatccatcagcactagtggtggcagcttcaggaaccggtttggtgctggtgctggaggcggctatggctttggaggtggtgccggtagtggatttggtttcggcggtggagctggtggtggctttgggctcggtggcggagctggctttggaggtggcttcggtggccctggctttcctgtctgccctcctggaggtatccaagaggtcactgtcaaccagagtctcctgactcccctcaacctgcaaatcgaccccagcatccagagggtgaggaccgaggagcgcgagcagatcaagaccctcaacaataagtttgcctccttcatcgacaaggtgcggttcctggagcagcagaacaaggttctggacaccaagtggaccctgctgcaggagcagggcaccaagactgtgaggcagaacctggagccgttgttcgagcagtacatcaacaacctcaggaggcagctggacagcatcgtgggggaacggggccgcctggactcagagctgagaaacatgcaggacctggtggaagacttcaagaacaagtatgaggatgaaatcaacaagcgtaccactgctgagaatgagtttgtgatgctgaagaaggatgtagatgctgcctacatgaacaaggtggagctggaggccaaggttgatgcactgatggatgagattaacttcatgaagatgttctttgatgcggagctgtcccagatgcagacgcatgtctctgacacctcagtggtcctctccatggacaacaaccgcaacctggacctggatagcatcatcgctgaggtcaaggcccagtatgaggagattgccaaccgcagccggacagaagccgagtcctggtatcagaccaagtatgaggagctgcagcagacagctggccggcatggcgatgacctccgcaacaccaagcatgagatctctgagatgaaccggatgatccagaggctgagagccgagattgacaatgtcaagaaacagtgcgccaatctgcagaacgccattgcggatgccgagcagcgtggggagctggccctcaaggatgccaggaacaagctggccgagctggaggaggccctgcagaaggccaagcaggacatggcccggctgctgcgtgagtaccaggagctcatgaacaccaagctggccctggacgtggagatcgccacttaccgcaagctgctggagggcgaggaatgcagactcagtggagaaggagttggaccagtcaacatctctgttgtcacaagcagtgtttcctctggatatggcagtggcagtggctatggcggtggcctcggtggaggtcttggcggcggcctcggtggaggtcttgccggaggtagcagtggaagctactactccagcagcagtgggggtgtcggcctaggtggtgggctcagtgtggggggctctggcttcagtgcaagcagtggccgagggctgggggtgggctttggcagtggcgggggtagcagctccagcgtcaaatttgtctccaccacctcctcctcccggaagagcttcaagagctaagaacctgctgcaagtcactgccttccaagtgcagcaacccagcccatggagattgcctcttctaggcagttgctcaagccatgttttatccttttctggagagtagtctagaccaagccaattgcagaaccacattctttggttcccaggagagccccattcccagcccctggtctcccgtgccgcagttctatattctgcttcaaatcagccttcaggtttcccacagcatggcccctgctgacacgagaacccaaagttttcccaaatctaaatcatcaaaacagaatccccaccccaatcccaaattttgttttggttctaactacctccagaatgtgttcaataaaatgcttttataatataatcgacagctctctcgcccagcccagttctggaagggataaaaagggggcatcaccgttcctgggtaacagagccaccttctgcgtcctgctgagctctgttctctccagcacctcccaacccactagtgcctggttctcttgctccaccaggaacaagccaccatgtctcgccagtcaagtgtgtccttccggagcgggggcagtcgtagcttcagcaccgcctctgccatcaccccgtctgtctcccgcaccagcttcacctccgtgtcccggtccgggggtggcggtggtggtggcttcggcagggtcagccttgcgggtgcttgtggagtgggtggctatggcagccggagcctctacaacctggggggctccaagaggatatccatcagcactagtggtggcagcttcaggaaccggtttggtgctggtgctggaggcggctatggctttggaggtggtgccggtagtggatttggtttcggcggtggagctggtggtggctttgggctcggtggcggagctggctttggaggtggcttcggtggccctggctttcctgtctgccctcctggaggtatccaagaggtcactgtcaaccagagtctcctgactcccctcaacctgcaaatcgaccccagcatccagagggtgaggaccgaggagcgcgagcagatcaagaccctcaacaataagtttgcctccttcatcgacaaggtgcggttcctggagcagcagaacaaggttctggacaccaagtggaccctgctgcaggagcagggcaccaagactgtgaggcagaacctggagccgttgttcgagcagtacatcaacaacctcaggaggcagctggacagcatcgtgggggaacggggccgcctggactcagagctgagaaacatgcaggacctggtggaagacttcaagaacaagtatgaggatgaaatcaacaagcgtaccactgctgagaatgagtttgtgatgctgaagaaggatgtagatgctgcctacatgaacaaggtggagctggaggccaaggttgatgcactgatggatgagattaacttcatgaagatgttctttgatgcggagctgtcccagatgcagacgcatgtctctgacacctcagtggtcctctccatggacaacaaccgcaacctggacctggatagcatcatcgctgaggtcaaggcccagtatgaggagattgccaaccgcagccggacagaagccgagtcctggtatcagaccaagtatgaggagctgcagcagacagctggccggcatggcgatgacctccgcaacaccaagcatgagatctctgagatgaaccggatgatccagaggctgagagccgagattgacaatgtcaagaaacagtgcgccaatctgcagaacgccattgcggatgccgagcagcgtggggagctggccctcaaggatgccaggaacaagctggccgagctggaggaggccctgcagaaggccaagcaggacatggcccggctgctgcgtgagtaccaggagctcatgaacaccaagctggccctggacgtggagatcgccacttaccgcaagctgctggagggcgaggaatgcagactcagtggagaaggagttggaccagtcaacatctctgttgtcacaagcagtgtttcctctggatatggcagtggcagtggctatggcggtggcctcggtggaggtcttggcggcggcctcggtggaggtcttgccggaggtagcagtggaagctactactccagcagcagtgggggtgtcggcctaggtggtgggctcagtgtggggggctctggcttcagtgcaagcagtggccgagggctgggggtgggctttggcagtggcgggggtagcagctccagcgtcaaatttgtctccaccacctcctcctcccggaagagcttcaagagctaagaacctgctgcaagtcactgccttccaagtgcagcaacccagcccatggagattgcctcttctaggcagttgctcaagccatgttttatccttttctggagagtagtctagaccaagccaattgcagaaccacattctttggttcccaggagagccccattcccagcccctggtctcccgtgccgcagttctatattctgcttcaaatcagccttcaggtttcccacagcatggcccctgctgacacgagaacccaaagttttcccaaatctaaatcatcaaaacagaatccccaccccaatcccaaattttgttttggttctaactacctccagaatgtgttcaataaaatgcttttataatataatcgacagctctctcgcccagcccagttctggaagggataaaaagggggcatcaccgttcctgggtaacagagccaccttctgcgtcctgctgagctctgttctctccagcacctcccaacccactagtgcctggttctcttgctccaccaggaacaagccaccatgtctcgccagtcaagtgtgtccttccggagcgggggcagtcgtagcttcagcaccgcctctgccatcaccccgtctgtctcccgcaccagcttcacctccgtgtcccggtccgggggtggcggtggtggtggcttcggcagggtcagccttgcgggtgcttgtggagtgggtggctatggcagccggagcctctacaacctggggggctccaagaggatatccatcagcactagtggtggcagcttcaggaaccggtttggtgctggtgctggaggcggctatggctttggaggtggtgccggtagtggatttggtttcggcggtggagctggtggtggctttgggctcggtggcggagctggctttggaggtggcttcggtggccctggctttcctgtctgccctcctggaggtatccaagaggtcactgtcaaccagagtctcctgactcccctcaacctgcaaatcgaccccagcatccagagggtgaggaccgaggagcgcgagcagatcaagaccctcaacaataagtttgcctccttcatcgacaaggtgcggttcctggagcagcagaacaaggttctggacaccaagtggaccctgctgcaggagcagggcaccaagactgtgaggcagaacctggagccgttgttcgagcagtacatcaacaacctcaggaggcagctggacagcatcgtgggggaacggggccgcctggactcagagctgagaaacatgcaggacctggtggaagacttcaagaacaagtatgaggatgaaatcaacaagcgtaccactgctgagaatgagtttgtgatgctgaagaaggatgtagatgctgcctacatgaacaaggtggagctggaggccaaggttgatgcactgatggatgagattaacttcatgaagatgttctttgatgcggagctgtcccagatgcagacgcatgtctctgacacctcagtggtcctctccatggacaacaaccgcaacctggacctggatagcatcatcgctgaggtcaaggcccagtatgaggagattgccaaccgcagccggacagaagccgagtcctggtatcagaccaagtatgaggagctgcagcagacagctggccggcatggcgatgacctccgcaacaccaagcatgagatctctgagatgaaccggatgatccagaggctgagagccgagattgacaatgtcaagaaacagtgcgccaatctgcagaacgccattgcggatgccgagcagcgtggggagctggccctcaaggatgccaggaacaagctggccgagctggaggaggccctgcagaaggccaagcaggacatggcccggctgctgcgtgagtaccaggagctcatgaacaccaagctggccctggacgtggagatcgccacttaccgcaagctgctggagggcgaggaatgcagactcagtggagaaggagttggaccagtcaacatctctgttgtcacaagcagtgtttcctctggatatggcagtggcagtggctatggcggtggcctcggtggaggtcttggcggcggcctcggtggaggtcttgccggaggtagcagtggaagctactactccagcagcagtgggggtgtcggcctaggtggtgggctcagtgtggggggctctggcttcagtgcaagcagtggccgagggctgggggtgggctttggcagtggcgggggtagcagctccagcgtcaaatttgtctccaccacctcctcctcccggaagagcttcaagagctaagaacctgctgcaagtcactgccttccaagtgcagcaacccagcccatggagattgcctcttctaggcagttgctcaagccatgttttatccttttctggagagtagtctagaccaagccaattgcagaaccacattctttggttcccaggagagccccattcccagcccctggtctcccgtgccgcagttctatattctgcttcaaatcagccttcaggtttcccacagcatggcccctgctgacacgagaacccaaagttttcccaaatctaaatcatcaaaacagaatccccaccccaatcccaaattttgttttggttctaactacctccagaatgtgttcaataaaatgcttttataatataatcgacagctctctcgcccagcccagttctggaagggataaaaagggggcatcaccgttcctgggtaacagagccaccttctgcgtcctgctgagctctgttctctccagcacctcccaacccactagtgcctggttctcttgctccaccaggaacaagccaccatgtctcgccagtcaagtgtgtccttccggagcgggggcagtcgtagcttcagcaccgcctctgccatcaccccgtctgtctcccgcaccagcttcacctccgtgtcccggtccgggggtggcggtggtggtggcttcggcagggtcagccttgcgggtgcttgtggagtgggtggctatggcagccggagcctctacaacctggggggctccaagaggatatccatcagcactagtggtggcagcttcaggaaccggtttggtgctggtgctggaggcggctatggctttggaggtggtgccggtagtggatttggtttcggcggtggagctggtggtggctttgggctcggtggcggagctggctttggaggtggcttcggtggccctggctttcctgtctgccctcctggaggtatccaagaggtcactgtcaaccagagtctcctgactcccctcaacctgcaaatcgaccccagcatccagagggtgaggaccgaggagcgcgagcagatcaagaccctcaacaataagtttgcctccttcatcgacaaggtgcggttcctggagcagcagaacaaggttctggacaccaagtggaccctgctgcaggagcagggcaccaagactgtgaggcagaacctggagccgttgttcgagcagtacatcaacaacctcaggaggcagctggacagcatcgtgggggaacggggccgcctggactcagagctgagaaacatgcaggacctggtggaagacttcaagaacaagtatgaggatgaaatcaacaagcgtaccactgctgagaatgagtttgtgatgctgaagaaggatgtagatgctgcctacatgaacaaggtggagctggaggccaaggttgatgcactgatggatgagattaacttcatgaagatgttctttgatgcggagctgtcccagatgcagacgcatgtctctgacacctcagtggtcctctccatggacaacaaccgcaacctggacctggatagcatcatcgctgaggtcaaggcccagtatgaggagattgccaaccgcagccggacagaagccgagtcctggtatcagaccaagtatgaggagctgcagcagacagctggccggcatggcgatgacctccgcaacaccaagcatgagatctctgagatgaaccggatgatccagaggctgagagccgagattgacaatgtcaagaaacagtgcgccaatctgcagaacgccattgcggatgccgagcagcgtggggagctggccctcaaggatgccaggaacaagctggccgagctggaggaggccctgcagaaggccaagcaggacatggcccggctgctgcgtgagtaccaggagctcatgaacaccaagctggccctggacgtggagatcgccacttaccgcaagctgctggagggcgaggaatgcagactcagtggagaaggagttggaccagtcaacatctctgttgtcacaagcagtgtttcctctggatatggcagtggcagtggctatggcggtggcctcggtggaggtcttggcggcggcctcggtggaggtcttgccggaggtagcagtggaagctactactccagcagcagtgggggtgtcggcctaggtggtgggctcagtgtggggggctctggcttcagtgcaagcagtggccgagggctgggggtgggctttggcagtggcgggggtagcagctccagcgtcaaatttgtctccaccacctcctcctcccggaagagcttcaagagctaagaacctgctgcaagtcactgccttccaagtgcagcaacccagcccatggagattgcctcttctaggcagttgctcaagccatgttttatccttttctggagagtagtctagaccaagccaattgcagaaccacattctttggttcccaggagagccccattcccagcccctggtctcccgtgccgcagttctatattctgcttcaaatcagccttcaggtttcccacagcatggcccctgctgacacgagaacccaaagttttcccaaatctaaatcatcaaaacagaatccccaccccaatcccaaattttgttttggttctaactacctccagaatgtgttcaataaaatgcttttataatataatcgacagctctctcgcccagcccagttctggaagggataaaaagggggcatcaccgttcctgggtaacagagccaccttctgcgtcctgctgagctctgttctctccagcacctcccaacccactagtgcctggttctcttgctccaccaggaacaagccaccatgtctcgccagtcaagtgtgtccttccggagcgggggcagtcgtagcttcagcaccgcctctgccatcaccccgtctgtctcccgcaccagcttcacctccgtgtcccggtccgggggtggcggtggtggtggcttcggcagggtcagccttgcgggtgcttgtggagtgggtggctatggcagccggagcctctacaacctggggggctccaagaggatatccatcagcactagtggtggcagcttcaggaaccggtttggtgctggtgctggaggcggctatggctttggaggtggtgccggtagtggatttggtttcggcggtggagctggtggtggctttgggctcggtggcggagctggctttggaggtggcttcggtggccctggctttcctgtctgccctcctggaggtatccaagaggtcactgtcaaccagagtctcctgactcccctcaacctgcaaatcgaccccagcatccagagggtgaggaccgaggagcgcgagcagatcaagaccctcaacaataagtttgcctccttcatcgacaaggtgcggttcctggagcagcagaacaaggttctggacaccaagtggaccctgctgcaggagcagggcaccaagactgtgaggcagaacctggagccgttgttcgagcagtacatcaacaacctcaggaggcagctggacagcatcgtgggggaacggggccgcctggactcagagctgagaaacatgcaggacctggtggaagacttcaagaacaagtatgaggatgaaatcaacaagcgtaccactgctgagaatgagtttgtgatgctgaagaaggatgtagatgctgcctacatgaacaaggtggagctggaggccaaggttgatgcactgatggatgagattaacttcatgaagatgttctttgatgcggagctgtcccagatgcagacgcatgtctctgacacctcagtggtcctctccatggacaacaaccgcaacctggacctggatagcatcatcgctgaggtcaaggcccagtatgaggagattgccaaccgcagccggacagaagccgagtcctggtatcagaccaagtatgaggagctgcagcagacagctggccggcatggcgatgacctccgcaacaccaagcatgagatctctgagatgaaccggatgatccagaggctgagagccgagattgacaatgtcaagaaacagtgcgccaatctgcagaacgccattgcggatgccgagcagcgtggggagctggccctcaaggatgccaggaacaagctggccgagctggaggaggccctgcagaaggccaagcaggacatggcccggctgctgcgtgagtaccaggagctcatgaacaccaagctggccctggacgtggagatcgccacttaccgcaagctgctggagggcgaggaatgcagactcagtggagaaggagttggaccagtcaacatctctgttgtcacaagcagtgtttcctctggatatggcagtggcagtggctatggcggtggcctcggtggaggtcttggcggcggcctcggtggaggtcttgccggaggtagcagtggaagctactactccagcagcagtgggggtgtcggcctaggtggtgggctcagtgtggggggctctggcttcagtgcaagcagtggccgagggctgggggtgggctttggcagtggcgggggtagcagctccagcgtcaaatttgtctccaccacctcctcctcccggaagagcttcaagagctaagaacctgctgcaagtcactgccttccaagtgcagcaacccagcccatggagattgcctcttctaggcagttgctcaagccatgttttatccttttctggagagtagtctagaccaagccaattgcagaaccacattctttggttcccaggagagccccattcccagcccctggtctcccgtgccgcagttctatattctgcttcaaatcagccttcaggtttcccacagcatggcccctgctgacacgagaacccaaagttttcccaaatctaaatcatcaaaacagaatccccaccccaatcccaaattttgttttggttctaactacctccagaatgtgttcaataaaatgcttttataatataatcgacagctctctcgcccagcccagttctggaagggataaaaagggggcatcaccgttcctgggtaacagagccaccttctgcgtcctgctgagctctgttctctccagcacctcccaacccactagtgcctggttctcttgctccaccaggaacaagccaccatgtctcgccagtcaagtgtgtccttccggagcgggggcagtcgtagcttcagcaccgcctctgccatcaccccgtctgtctcccgcaccagcttcacctccgtgtcccggtccgggggtggcggtggtggtggcttcggcagggtcagccttgcgggtgcttgtggagtgggtggctatggcagccggagcctctacaacctggggggctccaagaggatatccatcagcactagtggtggcagcttcaggaaccggtttggtgctggtgctggaggcggctatggctttggaggtggtgccggtagtggatttggtttcggcggtggagctggtggtggctttgggctcggtggcggagctggctttggaggtggcttcggtggccctggctttcctgtctgccctcctggaggtatccaagaggtcactgtcaaccagagtctcctgactcccctcaacctgcaaatcgaccccagcatccagagggtgaggaccgaggagcgcgagcagatcaagaccctcaacaataagtttgcctccttcatcgacaaggtgcggttcctggagcagcagaacaaggttctggacaccaagtggaccctgctgcaggagcagggcaccaagactgtgaggcagaacctggagccgttgttcgagcagtacatcaacaacctcaggaggcagctggacagcatcgtgggggaacggggccgcctggactcagagctgagaaacatgcaggacctggtggaagacttcaagaacaagtatgaggatgaaatcaacaagcgtaccactgctgagaatgagtttgtgatgctgaagaaggatgtagatgctgcctacatgaacaaggtggagctggaggccaaggttgatgcactgatggatgagattaacttcatgaagatgttctttgatgcggagctgtcccagatgcagacgcatgtctctgacacctcagtggtcctctccatggacaacaaccgcaacctggacctggatagcatcatcgctgaggtcaaggcccagtatgaggagattgccaaccgcagccggacagaagccgagtcctggtatcagaccaagtatgaggagctgcagcagacagctggccggcatggcgatgacctccgcaacaccaagcatgagatctctgagatgaaccggatgatccagaggctgagagccgagattgacaatgtcaagaaacagtgcgccaatctgcagaacgccattgcggatgccgagcagcgtggggagctggccctcaaggatgccaggaacaagctggccgagctggaggaggccctgcagaaggccaagcaggacatggcccggctgctgcgtgagtaccaggagctcatgaacaccaagctggccctggacgtggagatcgccacttaccgcaagctgctggagggcgaggaatgcagactcagtggagaaggagttggaccagtcaacatctctgttgtcacaagcagtgtttcctctggatatggcagtggcagtggctatggcggtggcctcggtggaggtcttggcggcggcctcggtggaggtcttgccggaggtagcagtggaagctactactccagcagcagtgggggtgtcggcctaggtggtgggctcagtgtggggggctctggcttcagtgcaagcagtggccgagggctgggggtgggctttggcagtggcgggggtagcagctccagcgtcaaatttgtctccaccacctcctcctcccggaagagcttcaagagctaagaacctgctgcaagtcactgccttccaagtgcagcaacccagcccatggagattgcctcttctaggcagttgctcaagccatgttttatccttttctggagagtagtctagaccaagccaattgcagaaccacattctttggttcccaggagagccccattcccagcccctggtctcccgtgccgcagttctatattctgcttcaaatcagccttcaggtttcccacagcatggcccctgctgacacgagaacccaaagttttcccaaatctaaatcatcaaaacagaatccccaccccaatcccaaattttgttttggttctaactacctccagaatgtgttcaataaaatgcttttataatataatcgacagctctctcgcccagcccagttctggaagggataaaaagggggcatcaccgttcctgggtaacagagccaccttctgcgtcctgctgagctctgttctctccagcacctcccaacccactagtgcctggttctcttgctccaccaggaacaagccaccatgtctcgccagtcaagtgtgtccttccggagcgggggcagtcgtagcttcagcaccgcctctgccatcaccccgtctgtctcccgcaccagcttcacctccgtgtcccggtccgggggtggcggtggtggtggcttcggcagggtcagccttgcgggtgcttgtggagtgggtggctatggcagccggagcctctacaacctggggggctccaagaggatatccatcagcactagtggtggcagcttcaggaaccggtttggtgctggtgctggaggcggctatggctttggaggtggtgccggtagtggatttggtttcggcggtggagctggtggtggctttgggctcggtggcggagctggctttggaggtggcttcggtggccctggctttcctgtctgccctcctggaggtatccaagaggtcactgtcaaccagagtctcctgactcccctcaacctgcaaatcgaccccagcatccagagggtgaggaccgaggagcgcgagcagatcaagaccctcaacaataagtttgcctccttcatcgacaaggtgcggttcctggagcagcagaacaaggttctggacaccaagtggaccctgctgcaggagcagggcaccaagactgtgaggcagaacctggagccgttgttcgagcagtacatcaacaacctcaggaggcagctggacagcatcgtgggggaacggggccgcctggactcagagctgagaaacatgcaggacctggtggaagacttcaagaacaagtatgaggatgaaatcaacaagcgtaccactgctgagaatgagtttgtgatgctgaagaaggatgtagatgctgcctacatgaacaaggtggagctggaggccaaggttgatgcactgatggatgagattaacttcatgaagatgttctttgatgcggagctgtcccagatgcagacgcatgtctctgacacctcagtggtcctctccatggacaacaaccgcaacctggacctggatagcatcatcgctgaggtcaaggcccagtatgaggagattgccaaccgcagccggacagaagccgagtcctggtatcagaccaagtatgaggagctgcagcagacagctggccggcatggcgatgacctccgcaacaccaagcatgagatctctgagatgaaccggatgatccagaggctgagagccgagattgacaatgtcaagaaacagtgcgccaatctgcagaacgccattgcggatgccgagcagcgtggggagctggccctcaaggatgccaggaacaagctggccgagctggaggaggccctgcagaaggccaagcaggacatggcccggctgctgcgtgagtaccaggagctcatgaacaccaagctggccctggacgtggagatcgccacttaccgcaagctgctggagggcgaggaatgcagactcagtggagaaggagttggaccagtcaacatctctgttgtcacaagcagtgtttcctctggatatggcagtggcagtggctatggcggtggcctcggtggaggtcttggcggcggcctcggtggaggtcttgccggaggtagcagtggaagctactactccagcagcagtgggggtgtcggcctaggtggtgggctcagtgtggggggctctggcttcagtgcaagcagtggccgagggctgggggtgggctttggcagtggcgggggtagcagctccagcgtcaaatttgtctccaccacctcctcctcccggaagagcttcaagagctaagaacctgctgcaagtcactgccttccaagtgcagcaacccagcccatggagattgcctcttctaggcagttgctcaagccatgttttatccttttctggagagtagtctagaccaagccaattgcagaaccacattctttggttcccaggagagccccattcccagcccctggtctcccgtgccgcagttctatattctgcttcaaatcagccttcaggtttcccacagcatggcccctgctgacacgagaacccaaagttttcccaaatctaaatcatcaaaacagaatccccaccccaatcccaaattttgttttggttctaactacctccagaatgtgttcaataaaatgcttttataatataatcgacagctctctcgcccagcccagttctggaagggataaaaagggggcatcaccgttcctgggtaacagagccaccttctgcgtcctgctgagctctgttctctccagcacctcccaacccactagtgcctggttctcttgctccaccaggaacaagccaccatgtctcgccagtcaagtgtgtccttccggagcgggggcagtcgtagcttcagcaccgcctctgccatcaccccgtctgtctcccgcaccagcttcacctccgtgtcccggtccgggggtggcggtggtggtggcttcggcagggtcagccttgcgggtgcttgtggagtgggtggctatggcagccggagcctctacaacctggggggctccaagaggatatccatcagcactagtggtggcagcttcaggaaccggtttggtgctggtgctggaggcggctatggctttggaggtggtgccggtagtggatttggtttcggcggtggagctggtggtggctttgggctcggtggcggagctggctttggaggtggcttcggtggccctggctttcctgtctgccctcctggaggtatccaagaggtcactgtcaaccagagtctcctgactcccctcaacctgcaaatcgaccccagcatccagagggtgaggaccgaggagcgcgagcagatcaagaccctcaacaataagtttgcctccttcatcgacaaggtgcggttcctggagcagcagaacaaggttctggacaccaagtggaccctgctgcaggagcagggcaccaagactgtgaggcagaacctggagccgttgttcgagcagtacatcaacaacctcaggaggcagctggacagcatcgtgggggaacggggccgcctggactcagagctgagaaacatgcaggacctggtggaagacttcaagaacaagtatgaggatgaaatcaacaagcgtaccactgctgagaatgagtttgtgatgctgaagaaggatgtagatgctgcctacatgaacaaggtggagctggaggccaaggttgatgcactgatggatgagattaacttcatgaagatgttctttgatgcggagctgtcccagatgcagacgcatgtctctgacacctcagtggtcctctccatggacaacaaccgcaacctggacctggatagcatcatcgctgaggtcaaggcccagtatgaggagattgccaaccgcagccggacagaagccgagtcctggtatcagaccaagtatgaggagctgcagcagacagctggccggcatggcgatgacctccgcaacaccaagcatgagatctctgagatgaaccggatgatccagaggctgagagccgagattgacaatgtcaagaaacagtgcgccaatctgcagaacgccattgcggatgccgagcagcgtggggagctggccctcaaggatgccaggaacaagctggccgagctggaggaggccctgcagaaggccaagcaggacatggcccggctgctgcgtgagtaccaggagctcatgaacaccaagctggccctggacgtggagatcgccacttaccgcaagctgctggagggcgaggaatgcagactcagtggagaaggagttggaccagtcaacatctctgttgtcacaagcagtgtttcctctggatatggcagtggcagtggctatggcggtggcctcggtggaggtcttggcggcggcctcggtggaggtcttgccggaggtagcagtggaagctactactccagcagcagtgggggtgtcggcctaggtggtgggctcagtgtggggggctctggcttcagtgcaagcagtggccgagggctgggggtgggctttggcagtggcgggggtagcagctccagcgtcaaatttgtctccaccacctcctcctcccggaagagcttcaagagctaagaacctgctgcaagtcactgccttccaagtgcagcaacccagcccatggagattgcctcttctaggcagttgctcaagccatgttttatccttttctggagagtagtctagaccaagccaattgcagaaccacattctttggttcccaggagagccccattcccagcccctggtctcccgtgccgcagttctatattctgcttcaaatcagccttcaggtttcccacagcatggcccctgctgacacgagaacccaaagttttcccaaatctaaatcatcaaaacagaatccccaccccaatcccaaattttgttttggttctaactacctccagaatgtgttcaataaaatgcttttataatataatcgacagctctctcgcccagcccagttctggaagggataaaaagggggcatcaccgttcctgggtaacagagccaccttctgcgtcctgctgagctctgttctctccagcacctcccaacccactagtgcctggttctcttgctccaccaggaacaagccaccatgtctcgccagtcaagtgtgtccttccggagcgggggcagtcgtagcttcagcaccgcctctgccatcaccccgtctgtctcccgcaccagcttcacctccgtgtcccggtccgggggtggcggtggtggtggcttcggcagggtcagccttgcgggtgcttgtggagtgggtggctatggcagccggagcctctacaacctggggggctccaagaggatatccatcagcactagtggtggcagcttcaggaaccggtttggtgctggtgctggaggcggctatggctttggaggtggtgccggtagtggatttggtttcggcggtggagctggtggtggctttgggctcggtggcggagctggctttggaggtggcttcggtggccctggctttcctgtctgccctcctggaggtatccaagaggtcactgtcaaccagagtctcctgactcccctcaacctgcaaatcgaccccagcatccagagggtgaggaccgaggagcgcgagcagatcaagaccctcaacaataagtttgcctccttcatcgacaaggtgcggttcctggagcagcagaacaaggttctggacaccaagtggaccctgctgcaggagcagggcaccaagactgtgaggcagaacctggagccgttgttcgagcagtacatcaacaacctcaggaggcagctggacagcatcgtgggggaacggggccgcctggactcagagctgagaaacatgcaggacctggtggaagacttcaagaacaagtatgaggatgaaatcaacaagcgtaccactgctgagaatgagtttgtgatgctgaagaaggatgtagatgctgcctacatgaacaaggtggagctggaggccaaggttgatgcactgatggatgagattaacttcatgaagatgttctttgatgcggagctgtcccagatgcagacgcatgtctctgacacctcagtggtcctctccatggacaacaaccgcaacctggacctggatagcatcatcgctgaggtcaaggcccagtatgaggagattgccaaccgcagccggacagaagccgagtcctggtatcagaccaagtatgaggagctgcagcagacagctggccggcatggcgatgacctccgcaacaccaagcatgagatctctgagatgaaccggatgatccagaggctgagagccgagattgacaatgtcaagaaacagtgcgccaatctgcagaacgccattgcggatgccgagcagcgtggggagctggccctcaaggatgccaggaacaagctggccgagctggaggaggccctgcagaaggccaagcaggacatggcccggctgctgcgtgagtaccaggagctcatgaacaccaagctggccctggacgtggagatcgccacttaccgcaagctgctggagggcgaggaatgcagactcagtggagaaggagttggaccagtcaacatctctgttgtcacaagcagtgtttcctctggatatggcagtggcagtggctatggcggtggcctcggtggaggtcttggcggcggcctcggtggaggtcttgccggaggtagcagtggaagctactactccagcagcagtgggggtgtcggcctaggtggtgggctcagtgtggggggctctggcttcagtgcaagcagtggccgagggctgggggtgggctttggcagtggcgggggtagcagctccagcgtcaaatttgtctccaccacctcctcctcccggaagagcttcaagagctaagaacctgctgcaagtcactgccttccaagtgcagcaacccagcccatggagattgcctcttctaggcagttgctcaagccatgttttatccttttctggagagtagtctagaccaagccaattgcagaaccacattctttggttcccaggagagccccattcccagcccctggtctcccgtgccgcagttctatattctgcttcaaatcagccttcaggtttcccacagcatggcccctgctgacacgagaacccaaagttttcccaaatctaaatcatcaaaacagaatccccaccccaatcccaaattttgttttggttctaactacctccagaatgtgttcaataaaatgcttttataatataatcgacagctctctcgcccagcccagttctggaagggataaaaagggggcatcaccgttcctgggtaacagagccaccttctgcgtcctgctgagctctgttctctccagcacctcccaacccactagtgcctggttctcttgctccaccaggaacaagccaccatgtctcgccagtcaagtgtgtccttccggagcgggggcagtcgtagcttcagcaccgcctctgccatcaccccgtctgtctcccgcaccagcttcacctccgtgtcccggtccgggggtggcggtggtggtggcttcggcagggtcagccttgcgggtgcttgtggagtgggtggctatggcagccggagcctctacaacctggggggctccaagaggatatccatcagcactagtggtggcagcttcaggaaccggtttggtgctggtgctggaggcggctatggctttggaggtggtgccggtagtggatttggtttcggcggtggagctggtggtggctttgggctcggtggcggagctggctttggaggtggcttcggtggccctggctttcctgtctgccctcctggaggtatccaagaggtcactgtcaaccagagtctcctgactcccctcaacctgcaaatcgaccccagcatccagagggtgaggaccgaggagcgcgagcagatcaagaccctcaacaataagtttgcctccttcatcgacaaggtgcggttcctggagcagcagaacaaggttctggacaccaagtggaccctgctgcaggagcagggcaccaagactgtgaggcagaacctggagccgttgttcgagcagtacatcaacaacctcaggaggcagctggacagcatcgtgggggaacggggccgcctggactcagagctgagaaacatgcaggacctggtggaagacttcaagaacaagtatgaggatgaaatcaacaagcgtaccactgctgagaatgagtttgtgatgctgaagaaggatgtagatgctgcctacatgaacaaggtggagctggaggccaaggttgatgcactgatggatgagattaacttcatgaagatgttctttgatgcggagctgtcccagatgcagacgcatgtctctgacacctcagtggtcctctccatggacaacaaccgcaacctggacctggatagcatcatcgctgaggtcaaggcccagtatgaggagattgccaaccgcagccggacagaagccgagtcctggtatcagaccaagtatgaggagctgcagcagacagctggccggcatggcgatgacctccgcaacaccaagcatgagatctctgagatgaaccggatgatccagaggctgagagccgagattgacaatgtcaagaaacagtgcgccaatctgcagaacgccattgcggatgccgagcagcgtggggagctggccctcaaggatgccaggaacaagctggccgagctggaggaggccctgcagaaggccaagcaggacatggcccggctgctgcgtgagtaccaggagctcatgaacaccaagctggccctggacgtggagatcgccacttaccgcaagctgctggagggcgaggaatgcagactcagtggagaaggagttggaccagtcaacatctctgttgtcacaagcagtgtttcctctggatatggcagtggcagtggctatggcggtggcctcggtggaggtcttggcggcggcctcggtggaggtcttgccggaggtagcagtggaagctactactccagcagcagtgggggtgtcggcctaggtggtgggctcagtgtggggggctctggcttcagtgcaagcagtggccgagggctgggggtgggctttggcagtggcgggggtagcagctccagcgtcaaatttgtctccaccacctcctcctcccggaagagcttcaagagctaagaacctgctgcaagtcactgccttccaagtgcagcaacccagcccatggagattgcctcttctaggcagttgctcaagccatgttttatccttttctggagagtagtctagaccaagccaattgcagaaccacattctttggttcccaggagagccccattcccagcccctggtctcccgtgccgcagttctatattctgcttcaaatcagccttcaggtttcccacagcatggcccctgctgacacgagaacccaaagttttcccaaatctaaatcatcaaaacagaatccccaccccaatcccaaattttgttttggttctaactacctccagaatgtgttcaataaaatgcttttataatataatcgacagctctctcgcccagcccagttctggaagggataaaaagggggcatcaccgttcctgggtaacagagccaccttctgcgtcctgctgagctctgttctctccagcacctcccaacccactagtgcctggttctcttgctccaccaggaacaagccaccatgtctcgccagtcaagtgtgtccttccggagcgggggcagtcgtagcttcagcaccgcctctgccatcaccccgtctgtctcccgcaccagcttcacctccgtgtcccggtccgggggtggcggtggtggtggcttcggcagggtcagccttgcgggtgcttgtggagtgggtggctatggcagccggagcctctacaacctggggggctccaagaggatatccatcagcactagtggtggcagcttcaggaaccggtttggtgctggtgctggaggcggctatggctttggaggtggtgccggtagtggatttggtttcggcggtggagctggtggtggctttgggctcggtggcggagctggctttggaggtggcttcggtggccctggctttcctgtctgccctcctggaggtatccaagaggtcactgtcaaccagagtctcctgactcccctcaacctgcaaatcgaccccagcatccagagggtgaggaccgaggagcgcgagcagatcaagaccctcaacaataagtttgcctccttcatcgacaaggtgcggttcctggagcagcagaacaaggttctggacaccaagtggaccctgctgcaggagcagggcaccaagactgtgaggcagaacctggagccgttgttcgagcagtacatcaacaacctcaggaggcagctggacagcatcgtgggggaacggggccgcctggactcagagctgagaaacatgcaggacctggtggaagacttcaagaacaagtatgaggatgaaatcaacaagcgtaccactgctgagaatgagtttgtgatgctgaagaaggatgtagatgctgcctacatgaacaaggtggagctggaggccaaggttgatgcactgatggatgagattaacttcatgaagatgttctttgatgcggagctgtcccagatgcagacgcatgtctctgacacctcagtggtcctctccatggacaacaaccgcaacctggacctggatagcatcatcgctgaggtcaaggcccagtatgaggagattgccaaccgcagccggacagaagccgagtcctggtatcagaccaagtatgaggagctgcagcagacagctggccggcatggcgatgacctccgcaacaccaagcatgagatctctgagatgaaccggatgatccagaggctgagagccgagattgacaatgtcaagaaacagtgcgccaatctgcagaacgccattgcggatgccgagcagcgtggggagctggccctcaaggatgccaggaacaagctggccgagctggaggaggccctgcagaaggccaagcaggacatggcccggctgctgcgtgagtaccaggagctcatgaacaccaagctggccctggacgtggagatcgccacttaccgcaagctgctggagggcgaggaatgcagactcagtggagaaggagttggaccagtcaacatctctgttgtcacaagcagtgtttcctctggatatggcagtggcagtggctatggcggtggcctcggtggaggtcttggcggcggcctcggtggaggtcttgccggaggtagcagtggaagctactactccagcagcagtgggggtgtcggcctaggtggtgggctcagtgtggggggctctggcttcagtgcaagcagtggccgagggctgggggtgggctttggcagtggcgggggtagcagctccagcgtcaaatttgtctccaccacctcctcctcccggaagagcttcaagagctaagaacctgctgcaagtcactgccttccaagtgcagcaacccagcccatggagattgcctcttctaggcagttgctcaagccatgttttatccttttctggagagtagtctagaccaagccaattgcagaaccacattctttggttcccaggagagccccattcccagcccctggtctcccgtgccgcagttctatattctgcttcaaatcagccttcaggtttcccacagcatggcccctgctgacacgagaacccaaagttttcccaaatctaaatcatcaaaacagaatccccaccccaatcccaaattttgttttggttctaactacctccagaatgtgttcaataaaatgcttttataatataatcgacagctctctcgcccagcccagttctggaagggataaaaagggggcatcaccgttcctgggtaacagagccaccttctgcgtcctgctgagctctgttctctccagcacctcccaacccactagtgcctggttctcttgctccaccaggaacaagccaccatgtctcgccagtcaagtgtgtccttccggagcgggggcagtcgtagcttcagcaccgcctctgccatcaccccgtctgtctcccgcaccagcttcacctccgtgtcccggtccgggggtggcggtggtggtggcttcggcagggtcagccttgcgggtgcttgtggagtgggtggctatggcagccggagcctctacaacctggggggctccaagaggatatccatcagcactagtggtggcagcttcaggaaccggtttggtgctggtgctggaggcggctatggctttggaggtggtgccggtagtggatttggtttcggcggtggagctggtggtggctttgggctcggtggcggagctggctttggaggtggcttcggtggccctggctttcctgtctgccctcctggaggtatccaagaggtcactgtcaaccagagtctcctgactcccctcaacctgcaaatcgaccccagcatccagagggtgaggaccgaggagcgcgagcagatcaagaccctcaacaataagtttgcctccttcatcgacaaggtgcggttcctggagcagcagaacaaggttctggacaccaagtggaccctgctgcaggagcagggcaccaagactgtgaggcagaacctggagccgttgttcgagcagtacatcaacaacctcaggaggcagctggacagcatcgtgggggaacggggccgcctggactcagagctgagaaacatgcaggacctggtggaagacttcaagaacaagtatgaggatgaaatcaacaagcgtaccactgctgagaatgagtttgtgatgctgaagaaggatgtagatgctgcctacatgaacaaggtggagctggaggccaaggttgatgcactgatggatgagattaacttcatgaagatgttctttgatgcggagctgtcccagatgcagacgcatgtctctgacacctcagtggtcctctccatggacaacaaccgcaacctggacctggatagcatcatcgctgaggtcaaggcccagtatgaggagattgccaaccgcagccggacagaagccgagtcctggtatcagaccaagtatgaggagctgcagcagacagctggccggcatggcgatgacctccgcaacaccaagcatgagatctctgagatgaaccggatgatccagaggctgagagccgagattgacaatgtcaagaaacagtgcgccaatctgcagaacgccattgcggatgccgagcagcgtggggagctggccctcaaggatgccaggaacaagctggccgagctggaggaggccctgcagaaggccaagcaggacatggcccggctgctgcgtgagtaccaggagctcatgaacaccaagctggccctggacgtggagatcgccacttaccgcaagctgctggagggcgaggaatgcagactcagtggagaaggagttggaccagtcaacatctctgttgtcacaagcagtgtttcctctggatatggcagtggcagtggctatggcggtggcctcggtggaggtcttggcggcggcctcggtggaggtcttgccggaggtagcagtggaagctactactccagcagcagtgggggtgtcggcctaggtggtgggctcagtgtggggggctctggcttcagtgcaagcagtggccgagggctgggggtgggctttggcagtggcgggggtagcagctccagcgtcaaatttgtctccaccacctcctcctcccggaagagcttcaagagctaagaacctgctgcaagtcactgccttccaagtgcagcaacccagcccatggagattgcctcttctaggcagttgctcaagccatgttttatccttttctggagagtagtctagaccaagccaattgcagaaccacattctttggttcccaggagagccccattcccagcccctggtctcccgtgccgcagttctatattctgcttcaaatcagccttcaggtttcccacagcatggcccctgctgacacgagaacccaaagttttcccaaatctaaatcatcaaaacagaatccccaccccaatcccaaattttgttttggttctaactacctccagaatgtgttcaataaaatgcttttataatataatcgacagctctctcgcccagcccagttctggaagggataaaaagggggcatcaccgttcctgggtaacagagccaccttctgcgtcctgctgagctctgttctctccagcacctcccaacccactagtgcctggttctcttgctccaccaggaacaagccaccatgtctcgccagtcaagtgtgtccttccggagcgggggcagtcgtagcttcagcaccgcctctgccatcaccccgtctgtctcccgcaccagcttcacctccgtgtcccggtccgggggtggcggtggtggtggcttcggcagggtcagccttgcgggtgcttgtggagtgggtggctatggcagccggagcctctacaacctggggggctccaagaggatatccatcagcactagtggtggcagcttcaggaaccggtttggtgctggtgctggaggcggctatggctttggaggtggtgccggtagtggatttggtttcggcggtggagctggtggtggctttgggctcggtggcggagctggctttggaggtggcttcggtggccctggctttcctgtctgccctcctggaggtatccaagaggtcactgtcaaccagagtctcctgactcccctcaacctgcaaatcgaccccagcatccagagggtgaggaccgaggagcgcgagcagatcaagaccctcaacaataagtttgcctccttcatcgacaaggtgcggttcctggagcagcagaacaaggttctggacaccaagtggaccctgctgcaggagcagggcaccaagactgtgaggcagaacctggagccgttgttcgagcagtacatcaacaacctcaggaggcagctggacagcatcgtgggggaacggggccgcctggactcagagctgagaaacatgcaggacctggtggaagacttcaagaacaagtatgaggatgaaatcaacaagcgtaccactgctgagaatgagtttgtgatgctgaagaaggatgtagatgctgcctacatgaacaaggtggagctggaggccaaggttgatgcactgatggatgagattaacttcatgaagatgttctttgatgcggagctgtcccagatgcagacgcatgtctctgacacctcagtggtcctctccatggacaacaaccgcaacctggacctggatagcatcatcgctgaggtcaaggcccagtatgaggagattgccaaccgcagccggacagaagccgagtcctggtatcagaccaagtatgaggagctgcagcagacagctggccggcatggcgatgacctccgcaacaccaagcatgagatctctgagatgaaccggatgatccagaggctgagagccgagattgacaatgtcaagaaacagtgcgccaatctgcagaacgccattgcggatgccgagcagcgtggggagctggccctcaaggatgccaggaacaagctggccgagctggaggaggccctgcagaaggccaagcaggacatggcccggctgctgcgtgagtaccaggagctcatgaacaccaagctggccctggacgtggagatcgccacttaccgcaagctgctggagggcgaggaatgcagactcagtggagaaggagttggaccagtcaacatctctgttgtcacaagcagtgtttcctctggatatggcagtggcagtggctatggcggtggcctcggtggaggtcttggcggcggcctcggtggaggtcttgccggaggtagcagtggaagctactactccagcagcagtgggggtgtcggcctaggtggtgggctcagtgtggggggctctggcttcagtgcaagcagtggccgagggctgggggtgggctttggcagtggcgggggtagcagctccagcgtcaaatttgtctccaccacctcctcctcccggaagagcttcaagagctaagaacctgctgcaagtcactgccttccaagtgcagcaacccagcccatggagattgcctcttctaggcagttgctcaagccatgttttatccttttctggagagtagtctagaccaagccaattgcagaaccacattctttggttcccaggagagccccattcccagcccctggtctcccgtgccgcagttctatattctgcttcaaatcagccttcaggtttcccacagcatggcccctgctgacacgagaacccaaagttttcccaaatctaaatcatcaaaacagaatccccaccccaatcccaaattttgttttggttctaactacctccagaatgtgttcaataaaatgcttttataatataatcgacagctctctcgcccagcccagttctggaagggataaaaagggggcatcaccgttcctgggtaacagagccaccttctgcgtcctgctgagctctgttctctccagcacctcccaacccactagtgcctggttctcttgctccaccaggaacaagccaccatgtctcgccagtcaagtgtgtccttccggagcgggggcagtcgtagcttcagcaccgcctctgccatcaccccgtctgtctcccgcaccagcttcacctccgtgtcccggtccgggggtggcggtggtggtggcttcggcagggtcagccttgcgggtgcttgtggagtgggtggctatggcagccggagcctc

SEQ ID NO: 618 - DNA, 2014 bp, Homo sapiens
  misc_feature (1282)..(1282): second gene starts at position 1282
atggccgagagcatcataattcgtgtccagtccccggatggagtgaagcggatcacagcaacaaagagagaaacagcagcaacatttttgaaaaaggttgcaaaggagtttggcttccaaaataatggcttctcggtttacatcaatagaaacaagactggagagataacagcctcctccaacaaatccctcaacttgctaaaaatcaagcatggcgatttgttgttcctgtttccctcgagccttgctgggccctcatctgaaatggagacgtcagttccaccgggcttcaaagtctttggcgctcccaacgtggtggaggatgagattgatcagtacctcagcaaacaggacgggaagatttacagaagccgagacccacagctatgccgccacggccctttggggaaatgcgtgcactgcgtccctctagagccattcgatgaggactatctaaaccatctcgagcctcccgtgaagcacatgtccttccacgcctacatccggaagctgactggaggggctgacaaggggaagtttgttgccctggagaacatcagctgcaagattaagtcagggtgcgaggggcacctcccgtggccgaatggcatctgtactaagtgccagccgagcgccatcacgctgaacagacagaagtacaggcatgtggacaatatcatgtttgagaatcacaccgtcgctgaccgctttcttgacttctggagaaagacagggaaccagcattttgggtacttatacggacggtacacggagcacaaagacattccccttggcatcagggctgaagtggctgcgatttatgagccacctcagattggtacacagaacagcttggagcttcttgaggatccaaaagctgaagtggtcgatgaaattgctgccaaacttggcctgcggaaggttggctggatatttacagacctcgtctcagaagatacccgaaagggtaccgtccgctacagtcgaaataaggacacctatttcctaagttcagaagagtgcatcactgcaggagacttccagaacaagcatcccaacatgtgccggctctctccagacggacattttggatccaagtttgttactgcagtggctacaggtggtcctgacaaccaagtccactttgaagggtaccaggtgtccaatcagtgtatggcactggtccgtgatgagtgtttgctgccatgcaaggacgccccggagcttggctacgccaaggagtctagcagtgagcagtacgtgcctgatgtgttttataaggtttggggacgacatccctggaatggaaggcctgggaacagacatcacagtcatctgcccttgggaggccttcaaccacctggagctgcacgagctggcccaatatggcatcatctagcacgaggccctgctgaagtccagaccctccccctcctgcccactgtgctctaaaccctgctcaggattcctgttgaggagatgcctccctagcccagatggcacctggacaccaggatgggactgcaacctcaggtctccccctacatattaataccagtcaccaggagcccaccacctccctctaggatgccccctcaggggctggccaggccctgctcaacatctggagatacaggcccacccctcagtcctgcccacagagaggcttggtcggtctccactcccagggagaacgggaagtggaccccagcccgggagcctgctggaccccagatcgtcccctcctcccagctggaaagctagggcaggtctccccagagtgcttctgcaccccagccccctgtcctgcctgtaaggggatacagagaagctccccgtctctgcatcccttcccaggggggtgcccttagtttggacatgctgggtagcaggactccagggcgtgcacggtgagcagatgaggccccaagctcatcacaccagggggccatccttctcaatacagcctgcccttgcagtccctatttcaaaataaaattagtgtgtccttgcc

SEQ ID NO: 619 - DNA, 2014 bp, Homo sapiens
  misc_feature (1282)..(1282): second gene starts at position 1282
atggccgagagcatcataattcgtgtccagtccccggatggagtgaagcggatcacagcaacaaagagagaaacagcagcaacatttttgaaaaaggttgcaaaggagtttggcttccaaaataatggcttctcggtttacatcaatagaaacaagactggagagataacagcctcctccaacaaatccctcaacttgctaaaaatcaagcatggcgatttgttgttcctgtttccctcgagccttgctgggccctcatctgaaatggagacgtcagttccaccgggcttcaaagtctttggcgctcccaacgtggtggaggatgagattgatcagtacctcagcaaacaggacgggaagatttacagaagccgagacccacagctatgccgccacggccctttggggaaatgcgtgcactgcgtccctctagagccattcgatgaggactatctaaaccatctcgagcctcccgtgaagcacatgtccttccacgcctacatccggaagctgactggaggggctgacaaggggaagtttgttgccctggagaacatcagctgcaagattaagtcagggtgcgaggggcacctcccgtggccgaatggcatctgtactaagtgccagccgagcgccatcacgctgaacagacagaagtacaggcatgtggacaatatcatgtttgagaatcacaccgtcgctgaccgctttcttgacttctggagaaagacagggaaccagcattttgggtacttatacggacggtacacggagcacaaagacattccccttggcatcagggctgaagtggctgcgatttatgagccacctcagattggtacacagaacagcttggagcttcttgaggatccaaaagctgaagtggtcgatgaaattgctgccaaacttggcctgcggaaggttggctggatatttacagacctcgtctcagaagatacccgaaagggtaccgtccgctacagtcgaaataaggacacctatttcctaagttcagaagagtgcatcactgcaggagacttccagaacaagcatcccaacatgtgccggctctctccagacggacattttggatccaagtttgttactgcagtggctacaggtggtcctgacaaccaagtccactttgaagggtaccaggtgtccaatcagtgtatggcactggtccgtgatgagtgtttgctgccatgcaaggacgccccggagcttggctacgccaaggagtctagcagtgagcagtacgtgcctgatgtgttttataagggcaaggacacactaattttattttgaaatagggactgcaagggcaggctgtattgagaaggatggccccctggtgtgatgagcttggggcctcatctgctcaccgtgcacgccctggagtcctgctacccagcatgtccaaactaagggcacccccctgggaagggatgcagagacggggagcttctctgtatccccttacaggcaggacagggggctggggtgcagaagcactctggggagacctgccctagctttccagctgggaggaggggacgatctggggtccagcaggctcccgggctggggtccacttcccgttctccctgggagtggagaccgaccaagcctctctgtgggcaggactgaggggtgggcctgtatctccagatgttgagcagggcctggccagcccctgagggggcatcctagagggaggtggtgggctcctggtgactggtattaatatgtagggggagacctgaggttgcagtcccatcctggtgtccaggtgccatctgggctagggaggcatctcctcaacaggaatcctgagcagggtttagagcacagtgggcaggagggggagggtctggacttcagcagggcctcgtgctagatgatgccatattgggccagctcgtgcagctccaggtggttgaaggcctcccaagggcagatgactgtgatgtctgttcccaggccttccattccagggatgtcgtccccaaac

SEQ ID NO: 620 - DNA, 1447 bp, Homo sapiens
  misc_feature (86)..(86): second gene starts at position 86
atgggagtgcaggtggaaaccatctccccaggagacgggcgcaccttccccaagcgcggccagacctgcgtggtgcactacaccgggtgttctgagaatcagccatgtcatccctgtacccatctctagaggacctaaaagtggaccaagccattcaggcccaggtcagagcctcacccaagatgccagccctgccagtccaggcaacagccatttccccaccaccagttttgtacccaaacttggcagaactggaaaattatatgggtctttccctctccagccaagaagtccaggagagcctgcttcagattccagagggtgacagtacagcggtctcgggccccgggcccggccagatggtggcaccggtaaccgggtacagcctgggcgtgcggcgagctgagatcaagcccggggtgcgcgagatccacctgtgcaaggacgagcgcggcaagaccgggctgaggctgcggaaggtcgaccaggggctctttgtgcagttggtccaggccaacacccctgcatcccttgtggggctgcgctttggggaccagctcctgcagattgacgggcgtgactgtgctgggtggagctcgcacaaagcccatcaggtggtgaagaaggcatcaggcgataagattgtcgtggtggttcgggacaggccgttccagcggactgtcaccatgcacaaggacagcatgggccacgtcggcttcgtgatcaagaaggggaagattgtctctctggtcaaagggagttctgcggcccgcaacgggctcctcaccaaccactacgtgtgtgaggtggacgggcagaatgttatcgggctgaaggacaaaaagatcatggagattctggccacggctgggaacgttgtcaccctgaccatcatccccagtgtgatctacgagcacatggtcaaaaagttgcctccagtcctgctccaccacaccatggaccactccatcccagatgcctgaagccactgcagggcagggcaggcagggggggcttcccgccctcctgcagcaaagggcaaccaccctcggatgatgggttgcagccggcctgctgcttaaggtgggggctgccatgaggggggcgtgtccaggagggtgaccatgggatggcttatacacacaggcctccttggagcctcagactccaagctaggctgaggctcaggcagggcccacaggcagccgattctcttgtgctgatttaaatgctggacacggaggcaggctgtttaaacgctgcttaaagtcgcaactgggcccctttcaagaaattttgctctaccaggaaaacagttacacattttaagagaacagagctacgttctttgtgagagctttttccttgccttgacttgctctttgtcacagactgcataagttgtcagccttgactatcttttgaataaagatttgattttaaacaa

SEQ ID NO: 621 - DNA, 1447 bp, Homo sapiens; identical to SEQ ID NO: 620
  misc_feature (86)..(86): second gene starts at position 86

SEQ ID NO: 622 - DNA, 1447 bp, Homo sapiens; identical to SEQ ID NO: 620
  misc_feature (86)..(86): second gene starts at position 86

SEQ ID NO: 623 - DNA, 1447 bp, Homo sapiens; identical to SEQ ID NO: 620
  misc_feature (86)..(86): second gene starts at position 86

SEQ ID NO: 624 - DNA, 877 bp, Homo sapiens
  misc_feature (125)..(125): second gene starts at position 125
atggaggcccagtcccacagctccacgaccactgaaaagaaaaaagttgagaattccatagtgaagtgctccactcgaacagatgtgagcgagaaagccgttgcctccagcaccacttctaatgactgaataacgatgccaagaatgccatagaagcacttggaagtaaagaaatcaggaacatgaaattcaggtctagctgggtatttattgcagcaaaaggcttggaactcccttccgaaattcagagagaaaagatcaaccactctgatgctaagaacaacagatattctggctggcctgcagagatccagatagaaggctgcatacccaaagaacgaagctgacactgcagggtcctgagtaaatgtgttctgtataaacaaatgcagctggaatcgctcaagaatcttatttttctaaatccaacagcccatatttgatgagtattttgggtttgttgtaaaccaatgaacatttgctagttgtatcaaatcttggtacgcagtatttttataccagtattttatgtagtgaagatgtcaattagcaggaaactaaaatgaatggaaattcttaaagggaatgatgtgattcaagctggaaagagggttgggagaaacagcttgtccaggtggagctatgttatgatcagatcgaagtgtgacccctgtgtggtccagacagccctgcagagagaaaacctttattccattatcaccaagcacctcctagtttccgacagtcatctccttctgctgggagaattagcagcagttcagggggcttatgttatgtccttgttcaactcaacttgagctcttgaactcctcctgtgggcctgtgaatgtattcattcattccacaactctgggtg

SEQ ID NO: 625 - DNA, 877 bp, Homo sapiens; identical to SEQ ID NO: 624
  misc_feature (125)..(125): second gene starts at position 125

SEQ ID NO: 626 - DNA, 32765 bp, Homo sapiens
  misc_feature (63)..(63): second gene starts at positio 63
atgtccatccacttcagctccccggtattcacctcgcgctcagccgccttctcgggccgcggcgcccaggtgcgcctgagctccgctcgccccggcggccttggcagcagcagcctctacggcctcggcgcctcacggccgcgcgtggccgtgcgctctgcctatgggggcccggtgggcgccggcatccgcgaggtcaccattaaccagagcctgctggccccgctgcggctggacgccgacccctccctccagcgggtgcgccaggaggagagcgagcagatcaagaccctcaacaacaagtttgcctccttcatcgacaaggtgcggtttctggagcagcagaacaagctgctggagaccaagtggacgctgctgcaggagcagaagtcggccaagagcagccgcctcccagacatctttgaggcccagattgctggccttcggggtcagcttgaggcactgcaggtggatgggggccgcctggaggcggagctgcggagcatgcaggatgtggtggaggacttcaagaataagtacgaagatgaaattaaccaccgcacagctgctgagaatgagtttgtggtgctgaagaaggatgtggatgctgcctacatgagcaaggtggagctggaggccaaggtggatgccctgaatgatgagatcaacttcctcaggaccctcaatgagacggagttgacagagctgcagtcccagatctccgacacatctgtggtgctgtccatggacaacagtcgctccctggacctggacggcatcatcgctgaggtcaaggcgcagtatgaggagatggccaaatgcagccgggctgaggctgaagcctggtaccagaccaagtttgagaccctccaggcccaggctgggaagcatggggacgacctccggaatacccggaatgagatttcagagatgaaccgggccatccagaggctgcaggctgagatcgacaacatcaagaaccagcgtgccaagttggaggccgccattgccgaggctgaggagcgtggggagctggcgctcaaggatgctcgtgccaagcaggcttccagctcctccctggagaagagctacgagctgcctgacggccaggtcatcaccattggcaatgagcggttccgctgccctgaggcactcttccagccttccttcctgggcatggagtcctgtggcatccacgaaactaccttcaactccatcatgaagtgtgacgtggacatccgcaaagacctgtacgccaacacagtgctgtctggcggcaccaccatgtaccctggcattgccgacaggatgcagaaggagatcactgccctggcacccagcacaatgaagatcaagatcattgctcctcctgagcgcaagtactccgtgtggatcggcggctccatcctggcctcgctgtccaccttccagcagatgtggatcagcaagcaggagtatgacgagtccggcccctccatcgtccaccgcaaatgcttctaggcggactatgacttagttgcgttacaccctttcttgacaaaacctaacttgcgcagaaaacaagatgagattggcatggctttatttgttttttttgttttgttttggttttttttttttttttggcttgactcaggatttaaaaactggaacggtgaaggtgacagcagtcggttggagcgagcatcccccaaagttcacaatgtggccgaggactttgattgcacattgttgtttttttaatagtcattccaaatatgagatgcgttgttacaggaagtcccttgccatcctaaaagccaccccacttctctctaaggagaatggcccagtcctctcccaagtccacacaggggaggtgatagcattgctttcgtgtaaattatgtaatgcaaaatttttttaatcttcgccttaatacttttttattttgttttattttgaatgatgagccttcgtgcccccccttcccccttttttgtcccccaacttgagatgtatgaaggcttttggtctccctgggagtgggtggaggcagccagggcttacctgtacactgacttgagaccagttgaataaaagtgcacaccttaaaaatgaaccgccgagaccgcgtccgccccgcgagcacagagcctcgcctttgccgatccgccgcccgtccacacccgccgccagctcaccatggatgatgatatcgccgcgctcgtcgtcgacaacggctccggcatgtgcaaggccggcttcgcgggcgacgatgccccccgggccgtcttcccctccatcgtggggcgccccaggcaccagggcgtgatggtgggcatgggtcagaaggattcctatgtgggcgacgaggcccagagcaagagaggcatcctcaccctgaagtaccccatcgagcacggcatcgtcaccaactgggacgacatggagaaaatctggcaccacaccttctacaatgagctgcgtgtggctcccgaggagcaccccgtgctgctgaccgaggcccccctgaaccccaaggccaaccgcgagaagatgacccagatcatgtttgagaccttcaacaccccagccatgtacgttgctatccaggctgtgctatccctgtacgcctctggccgtaccactggcatcgtgatggactccggtgacggggtcacccacactgtgcccatctacgaggggtatgccctcccccatgccatcctgcgtctggacctggctggccgggacctgactgactacctcatgaagatcctcaccgagcgcggctacagcttcaccaccacggccgagcgggaaatcgtgcgtgacattaaggagaagctgtgctacgtcgccctggacttcgagcaagagatggccacggctgcttccagctcctccctggagaagagctacgagctgcctgacggccaggtcatcaccattggcaatgagcggttccgctgccctgaggcactcttccagccttccttcctgggcatggagtcctgtggcatccacgaaactaccttcaactccatcatgaagtgtgacgtggacatccgcaaagacctgtacgccaacacagtgctgtctggcggcaccaccatgtaccctggcattgccgacaggatgcagaaggagatcactgccctggcacccagcacaatgaagatcaagatcattgctcctcctgagcgcaagtactccgtgtggatcggcggctccatcctggcctcgctgtccaccttccagcagatgtggatcagcaagcaggagtatgacgagtccggcccctccatcgtccaccgcaaatgcttctaggcggactatgacttagttgcgttacaccctttcttgacaaaacctaacttgcgcagaaaacaagatgagattggcatggctttatttgttttttttgttttgttttggttttttttttttttttggcttgactcaggatttaaaaactggaacggtgaaggtgacagcagtcggttggagcgagcatcccccaaagttcacaatgtggccgaggactttgattgcacattgttgtttttttaatagtcattccaaatatgagatgcgttgttacaggaagtcccttgccatcctaaaagccaccccacttctctctaaggagaatggcccagtcctctcccaagtccacacaggggaggtgatagcattgctttcgtgtaaattatgtaatgcaaaatttttttaatcttcgccttaatacttttttattttgttttattttgaatgatgagccttcgtgcccccccttcccccttttttgtcccccaacttgagatgtatgaaggcttttggtctccctgggagtgggtggaggcagccagggcttacctgtacactgacttgagaccagttgaataaaagtgcacaccttaaaaatgaaccgccgagaccgcgtccgccccgcgagcacagagcctcgcctttgccgatccgccgcccgtccacacccgccgccagctcaccatggatgatgatatcgccgcgctcgtcgtcgacaacggctccggcatgtgcaaggccggcttcgcgggcgacgatgccccccgggccgtcttcccctccatcgtggggcgccccaggcaccagggcgtgatggtgggcatgggtcagaaggattcctatgtgggcgacgaggcccagagcaagagaggcatcctcaccctgaagtaccccatcgagcacggcatcgtcaccaactgggacgacatggagaaaatctggcaccacaccttctacaatgagctgcgtgtggctcccgaggagcaccccgtgctgctgaccgaggcccccctgaaccccaaggccaaccgcgagaagatgacccagatcatgtttgagaccttcaacaccccagccatgtacgttgctatccaggctgtgctatccctgtacgcctctggccgtaccactggcatcgtgatggactccggtgacggggtcacccacactgtgcccatctacgaggggtatgccctcccccatgccatcctgcgtctggacctggctggccgggacctgactgactacctcatgaagatcctcaccgagcgcggctacagcttcaccaccacggccgagcgggaaatcgtgcgtgacattaaggagaagctgtgctacgtcgccctggacttcgagcaagagatggccacggctgcttccagctcctccctggagaagagctacgagctgcctgacggccaggtcatcaccattggcaatgagcggttccgctgccctgaggcactcttccagccttccttcctgggcatggagtcctgtggcatccacgaaactaccttcaactccatcatgaagtgtgacgtggacatccgcaaagacctgtacgccaacacagtgctgtctggcggcaccaccatgtaccctggcattgccgacaggatgcagaaggagatcactgccctggcacccagcacaatgaagatcaagatcattgctcctcctgagcgcaagtactccgtgtggatcggcggctccatcctggcctcgctgtccaccttccagcagatgtggatcagcaagcaggagtatgacgagtccggcccctccatcgtccaccgcaaatgcttctaggcggactatgacttagttgcgttacaccctttcttgacaaaacctaacttgcgcagaaaacaagatgagattggcatggctttatttgttttttttgttttgttttggttttttttttttttttggcttgactcaggatttaaaaactggaacggtgaaggtgacagcagtcggttggagcgagcatcccccaaagttcacaatgtggccgaggactttgattgcacattgttgtttttttaatagtcattccaaatatgagatgcgttgttacaggaagtcccttgccatcctaaaagccaccccacttctctctaaggagaatggcccagtcctctcccaagtccacacaggggaggtgatagcattgctttcgtgtaaattatgtaatgcaaaatttttttaatcttcgccttaatacttttttattttgttttattttgaatgatgagccttcgtgcccccccttcccccttttttgtcccccaacttgagatgtatgaaggcttttggtctccctgggagtgggtggaggcagccagggcttacctgtacactgacttgagaccagttgaataaaagtgcacaccttaaaaatgaaccgccgagaccgcgtccgccccgcgagcacagagcctcgcctttgccgatccgccgcccgtccacacccgccgccagctcaccatggatgatgatatcgccgcgctcgtcgtcgacaacggctccggcatgtgcaaggccggcttcgcgggcgacgatgccccccgggccgtcttcccctccatcgtggggcgccccaggcaccagggcgtgatggtgggcatgggtcagaaggattcctatgtgggcgacgaggcccagagcaagagaggcatcctcaccctgaagtaccccatcgagcacggcatcgtcaccaactgggacgacatggagaaaatctggcaccacaccttctacaatgagctgcgtgtggctcccgaggagcaccccgtgctgctgaccgaggcccccctgaaccccaaggccaaccgcgagaagatgacccagatcatgtttgagaccttcaacaccccagccatgtacgttgctatccaggctgtgctatccctgtacgcctctggccgtaccactggcatcgtgatggactccggtgacggggtcacccacactgtgcccatctacgaggggtatgccctcccccatgccatcctgcgtctggacctggctggccgggacctgactgactacctcatgaagatcctcaccgagcgcggctacagcttcaccaccacggccgagcgggaaatcgtgcgtgacattaaggagaagctgtgctacgtcgccctggacttcgagcaagagatggccacggctgcttccagctcctccctggagaagagctacgagctgcctgacggccaggtcatcaccattggcaatgagcggttccgctgccctgaggcactcttccagccttccttcctgggcatggagtcctgtggcatccacgaaactaccttcaactccatcatgaagtgtgacgtggacatccgcaaagacctgtacgccaacacagtgctgtctggcggcaccaccatgtaccctggcattgccgacaggatgcagaaggagatcactgccctggcacccagcacaatgaagatcaagatcattgctcctcctgagcgcaagtactccgtgtggatcggcggctccatcctggcctcgctgtccaccttccagcagatgtggatcagcaagcaggagtatgacgagtccggcccctccatcgtccaccgcaaatgcttctaggcggactatgacttagttgcgttacaccctttcttgacaaaacctaacttgcgcagaaaacaagatgagattggcatggctttatttgttttttttgttttgttttggttttttttttttttttggcttgactcaggatttaaaaactggaacggtgaaggtgacagcagtcggttggagcgagcatcccccaaagttcacaatgtggccgaggactttgattgcacattgttgtttttttaatagtcattccaaatatgagatgcgttgttacaggaagtcccttgccatcctaaaagccaccccacttctctctaaggagaatggcccagtcctctcccaagtccacacaggggaggtgatagcattgctttcgtgtaaattatgtaatgcaaaatttttttaatcttcgccttaatacttttttattttgttttattttgaatgatgagccttcgtgcccccccttcccccttttttgtcccccaacttgagatgtatgaaggcttttggtctccctgggagtgggtggaggcagccagggcttacctgtacactgacttgagaccagttgaataaaagtgcacaccttaaaaatgaaccgccgagaccgcgtccgccccgcgagcacagagcctcgcctttgccgatccgccgcccgtccacacccgccgccagctcaccatggatgatgatatcgccgcgctcgtcgtcgacaacggctccggcatgtgcaaggccggcttcgcgggcgacgatgccccccgggccgtcttcccctccatcgtggggcgccccaggcaccagggcgtgatggtgggcatgggtcagaaggattcctatgtgggcgacgaggcccagagcaagagaggcatcctcaccctgaagtaccccatcgagcacggcatcgtcaccaactgggacgacatggagaaaatctggcaccacaccttctacaatgagctgcgtgtggctcccgaggagcaccccgtgctgctgaccgaggcccccctgaaccccaaggccaaccgcgagaagatgacccagatcatgtttgagaccttcaacaccccagccatgtacgttgctatccaggctgtgctatccctgtacgcctctggccgtaccactggcatcgtgatggactccggtgacggggtcacccacactgtgcccatctacgaggggtatgccctcccccatgccatcctgcgtctggacctggctggccgggacctgactgactacctcatgaagatcctcaccgagcgcggctacagcttcaccaccacggccgagcgggaaatcgtgcgtgacattaaggagaagctgtgctacgtcgccctggacttcgagcaagagatggccacggctgcttccagctcctccctggagaagagctacgagctgcctgacggccaggtcatcaccattggcaatgagcggttccgctgccctgaggcactcttccagccttccttcctgggcatggagtcctgtggcatccacgaaactaccttcaactccatcatgaagtgtgacgtggacatccgcaaagacctgtacgccaacacagtgctgtctggcggcaccaccatgtaccctggcattgccgacaggatgcagaaggagatcactgccctggcacccagcacaatgaagatcaagatcattgctcctcctgagcgcaagtactccgtgtggatcggcggctccatcctggcctcgctgtccaccttccagcagatgtggatcagcaagcaggagtatgacgagtccggcccctccatcgtccaccgcaaatgcttctaggcggactatgacttagttgcgttacaccctttcttgacaaaacctaacttgcgcagaaaacaagatgagattggcatggctttatttgttttttttgttttgttttggttttttttttttttttggcttgactcaggatttaaaaactggaacggtgaaggtgacagcagtcggttggagcgagcatcccccaaagttcacaatgtggccgaggactttgattgcacattgttgtttttttaatagtcattccaaatatgagatgcgttgttacaggaagtcccttgccatcctaaaagccaccccacttctctctaaggagaatggcccagtcctctcccaagtccacacaggggaggtgatagcattgctttcgtgtaaattatgtaatgcaaaatttttttaatcttcgccttaatacttttttattttgttttattttgaatgatgagccttcgtgcccccccttcccccttttttgtcccccaacttgagatgtatgaaggcttttggtctccctgggagtgggtggaggcagccagggcttacctgtacactgacttgagaccagttgaataaaagtgcacaccttaaaaatgaaccgccgagaccgcgtccgccccgcgagcacagagcctcgcctttgccgatccgccgcccgtccacacccgccgccagctcaccatggatgatgatatcgccgcgctcgtcgtcgacaacggctccggcatgtgcaaggccggcttcgcgggcgacgatgccccccgggccgtcttcccctccatcgtggggcgccccaggcaccagggcgtgatggtgggcatgggtcagaaggattcctatgtgggcgacgaggcccagagcaagagaggcatcctcaccctgaagtaccccatcgagcacggcatcgtcaccaactgggacgacatggagaaaatctggcaccacaccttctacaatgagctgcgtgtggctcccgaggagcaccccgtgctgctgaccgaggcccccctgaaccccaaggccaaccgcgagaagatgacccagatcatgtttgagaccttcaacaccccagccatgtacgttgctatccaggctgtgctatccctgtacgcctctggccgtaccactggcatcgtgatggactccggtgacggggtcacccacactgtgcccatctacgaggggtatgccctcccccatgccatcctgcgtctggacctggctggccgggacctgactgactacctcatgaagatcctcaccgagcgcggctacagcttcaccaccacggccgagcgggaaatcgtgcgtgacattaaggagaagctgtgctacgtcgccctggacttcgagcaagagatggccacggctgcttccagctcctccctggagaagagctacgagctgcctgacggccaggtcatcaccattggcaatgagcggttccgctgccctgaggcactcttccagccttccttcctgggcatggagtcctgtggcatccacgaaactaccttcaactccatcatgaagtgtgacgtggacatccgcaaagacctgtacgccaacacagtgctgtctggcggcaccaccatgtaccctggcattgccgacaggatgcagaaggagatcactgccctggcacccagcacaatgaagatcaagatcattgctcctcctgagcgcaagtactccgtgtggatcggcggctccatcctggcctcgctgtccaccttccagcagatgtggatcagcaagcaggagtatgacgagtccggcccctccatcgtccaccgcaaatgcttctaggcggactatgacttagttgcgttacaccctttcttgacaaaacctaacttgcgcagaaaacaagatgagattggcatggctttatttgttttttttgttttgttttggttttttttttttttttggcttgactcaggatttaaaaactggaacggtgaaggtgacagcagtcggttggagcgagcatcccccaaagttcacaatgtggccgaggactttgattgcacattgttgtttttttaatagtcattccaaatatgagatgcgttgttacaggaagtcccttgccatcctaaaagccaccccacttctctctaaggagaatggcccagtcctctcccaagtccacacaggggaggtgatagcattgctttcgtgtaaattatgtaatgcaaaatttttttaatcttcgccttaatacttttttattttgttttattttgaatgatgagccttcgtgcccccccttcccccttttttgtcccccaacttgagatgtatgaaggcttttggtctccctgggagtgggtggaggcagccagggcttacctgtacactgacttgagaccagttgaataaaagtgcacaccttaaaaatgaaccgccgagaccgcgtccgccccgcgagcacagagcctcgcctttgccgatccgccgcccgtccacacccgccgccagctcaccatggatgatgatatcgccgcgctcgtcgtcgacaacggctccggcatgtgcaaggccggcttcgcgggcgacgatgccccccgggccgtcttcccctccatcgtggggcgccccaggcaccagggcgtgatggtgggcatgggtcagaaggattcctatgtgggcgacgaggcccagagcaagagaggcatcctcaccctgaagtaccccatcgagcacggcatcgtcaccaactgggacgacatggagaaaatctggcaccacaccttctacaatgagctgcgtgtggctcccgaggagcaccccgtgctgctgaccgaggcccccctgaaccccaaggccaaccgcgagaagatgacccagatcatgtttgagaccttcaacaccccagccatgtacgttgctatccaggctgtgctatccctgtacgcctctggccgtaccactggcatcgtgatggactccggtgacggggtcacccacactgtgcccatctacgaggggtatgccctcccccatgccatcctgcgtctggacctggctggccgggacctgactgactacctcatgaagatcctcaccgagcgcggctacagcttcaccaccacggccgagcgggaaatcgtgcgtgacattaaggagaagctgtgctacgtcgccctggacttcgagcaagagatggccacggctgcttccagctcctccctggagaagagctacgagctgcctgacggccaggtcatcaccattggcaatgagcggttccgctgccctgaggcactcttccagccttccttcctgggcatggagtcctgtggcatccacgaaactaccttcaactccatcatgaagtgtgacgtggacatccgcaaagacctgtacgccaacacagtgctgtctggcggcaccaccatgtaccctggcattgccgacaggatgcagaaggagatcactgccctggcacccagcacaatgaagatcaagatcattgctcctcctgagcgcaagtactccgtgtggatcggcggctccatcctggcctcgctgtccaccttccagcagatgtggatcagcaagcaggagtatgacgagtccggcccctccatcgtccaccgcaaatgcttctaggcggactatgacttagttgcgttacaccctttcttgacaaaacctaacttgcgcagaaaacaagatgagattggcatggctttatttgttttttttgttttgttttggttttttttttttttttggcttgactcaggatttaaaaactggaacggtgaaggtgacagcagtcggttggagcgagcatcccccaaagttcacaatgtggccgaggactttgattgcacattgttgtttttttaatagtcattccaaatatgagatgcgttgttacaggaagtcccttgccatcctaaaagccaccccacttctctctaaggagaatggcccagtcctctcccaagtccacacaggggaggtgatagcattgctttcgtgtaaattatgtaatgcaaaatttttttaatcttcgccttaatacttttttattttgttttattttgaatgatgagccttcgtgcccccccttcccccttttttgtcccccaacttgagatgtatgaaggcttttggtctccctgggagtgggtggaggcagccagggcttacctgtacactgacttgagaccagttgaataaaagtgcacaccttaaaaatgaaccgccgagaccgcgtccgccccgcgagcacagagcctcgcctttgccgatccgccgcccgtccacacccgccgccagctcaccatggatgatgatatcgccgcgctcgtcgtcgacaacggctccggcatgtgcaaggccggcttcgcgggcgacgatgccccccgggccgtcttcccctccatcgtggggcgccccaggcaccagggcgtgatggtgggcatgggtcagaaggattcctatgtgggcgacgaggcccagagcaagagaggcatcctcaccctgaagtaccccatcgagcacggcatcgtcaccaactgggacgacatggagaaaatctggcaccacaccttctacaatgagctgcgtgtggctcccgaggagcaccccgtgctgctgaccgaggcccccctgaaccccaaggccaaccgcgagaagatgacccagatcatgtttgagaccttcaacaccccagccatgtacgttgctatccaggctgtgctatccctgtacgcctctggccgtaccactggcatcgtgatggactccggtgacggggtcacccacactgtgcccatctacgaggggtatgccctcccccatgccatcctgcgtctggacctggctggccgggacctgactgactacctcatgaagatcctcaccgagcgcggctacagcttcaccaccacggccgagcgggaaatcgtgcgtgacattaaggagaagctgtgctacgtcgccctggacttcgagcaagagatggccacggctgcttccagctcctccctggagaagagctacgagctgcctgacggccaggtcatcaccattggcaatgagcggttccgctgccctgaggcactcttccagccttccttcctgggcatggagtcctgtggcatccacgaaactaccttcaactccatcatgaagtgtgacgtggacatccgcaaagacctgtacgccaacacagtgctgtctggcggcaccaccatgtaccctggcattgccgacaggatgcagaaggagatcactgccctggcacccagcacaatgaagatcaagatcattgctcctcctgagcgcaagtactccgtgtggatcggcggctccatcctggcctcgctgtccaccttccagcagatgtggatcagcaagcaggagtatgacgagtccggcccctccatcgtccaccgcaaatgcttctaggcggactatgacttagttgcgttacaccctttcttgacaaaacctaacttgcgcagaaaacaagatgagattggcatggctttatttgttttttttgttttgttttggttttttttttttttttggcttgactcaggatttaaaaactggaacggtgaaggtgacagcagtcggttggagcgagcatcccccaaagttcacaatgtggccgaggactttgattgcacattgttgtttttttaatagtcattccaaatatgagatgcgttgttacaggaagtcccttgccatcctaaaagccaccccacttctctctaaggagaatggcccagtcctctcccaagtccacacaggggaggtgatagcattgctttcgtgtaaattatgtaatgcaaaatttttttaatcttcgccttaatacttttttattttgttttattttgaatgatgagccttcgtgcccccccttcccccttttttgtcccccaacttgagatgtatgaaggcttttggtctccctgggagtgggtggaggcagccagggcttacctgtacactgacttgagaccagttgaataaaagtgcacaccttaaaaatgaaccgccgagaccgcgtccgccccgcgagcacagagcctcgcctttgccgatccgccgcccgtccacacccgccgccagctcaccatggatgatgatatcgccgcgctcgtcgtcgacaacggctccggcatgtgcaaggccggcttcgcgggcgacgatgccccccgggccgtcttcccctccatcgtggggcgccccaggcaccagggcgtgatggtgggcatgggtcagaaggattcctatgtgggcgacgaggcccagagcaagagaggcatcctcaccctgaagtaccccatcgagcacggcatcgtcaccaactgggacgacatggagaaaatctggcaccacaccttctacaatgagctgcgtgtggctcccgaggagcaccccgtgctgctgaccgaggcccccctgaaccccaaggccaaccgcgagaagatgacccagatcatgtttgagaccttcaacaccccagccatgtacgttgctatccaggctgtgctatccctgtacgcctctggccgtaccactggcatcgtgatggactccggtgacggggtcacccacactgtgcccatctacgaggggtatgccctcccccatgccatcctgcgtctggacctggctggccgggacctgactgactacctcatgaagatcctcaccgagcgcggctacagcttcaccaccacggccgagcgggaaatcgtgcgtgacattaaggagaagctgtgctacgtcgccctggacttcgagcaagagatggccacggctgcttccagctcctccctggagaagagctacgagctgcctgacggccaggtcatcaccattggcaatgagcggttccgctgccctgaggcactcttccagccttccttcctgggcatggagtcctgtggcatccacgaaactaccttcaactccatcatgaagtgtgacgtggacatccgcaaagacctgtacgccaacacagtgctgtctggcggcaccaccatgtaccctggcattgccgacaggatgcagaaggagatcactgccctggcacccagcacaatgaagatcaagatcattgctcctcctgagcgcaagtactccgtgtggatcggcggctccatcctggcctcgctgtccaccttccagcagatgtggatcagcaagcaggagtatgacgagtccggcccctccatcgtccaccgcaaatgcttctaggcggactatgacttagttgcgttacaccctttcttgacaaaacctaacttgcgcagaaaacaagatgagattggcatggctttatttgttttttttgttttgttttggttttttttttttttttggcttgactcaggatttaaaaactggaacggtgaaggtgacagcagtcggttggagcgagcatcccccaaagttcacaatgtggccgaggactttgattgcacattgttgtttttttaatagtcattccaaatatgagatgcgttgttacaggaagtcccttgccatcctaaaagccaccccacttctctctaaggagaatggcccagtcctctcccaagtccacacaggggaggtgatagcattgctttcgtgtaaattatgtaatgcaaaatttttttaatcttcgccttaatacttttttattttgttttattttgaatgatgagccttcgtgcccccccttcccccttttttgtcccccaacttgagatgtatgaaggcttttggtctccctgggagtgggtggaggcagccagggcttacctgtacactgacttgagaccagttgaataaaagtgcacaccttaaaaatgaaccgccgagaccgcgtccgccccgcgagcacagagcctcgcctttgccgatccgccgcccgtccacacccgccgccagctcaccatggatgatgatatcgccgcgctcgtcgtcgacaacggctccggcatgtgcaaggccggcttcgcgggcgacgatgccccccgggccgtcttcccctccatcgtggggcgccccaggcaccagggcgtgatggtgggcatgggtcagaaggattcctatgtgggcgacgaggcccagagcaagagaggcatcctcaccctgaagtaccccatcgagcacggcatcgtcaccaactgggacgacatggagaaaatctggcaccacaccttctacaatgagctgcgtgtggctcccgaggagcaccccgtgctgctgaccgaggcccccctgaaccccaaggccaaccgcgagaagatgacccagatcatgtttgagaccttcaacaccccagccatgtacgttgctatccaggctgtgctatccctgtacgcctctggccgtaccactggcatcgtgatggactccggtgacggggtcacccacactgtgcccatctacgaggggtatgccctcccccatgccatcctgcgtctggacctggctggccgggacctgactgactacctcatgaagatcctcaccgagcgcggctacagcttcaccaccacggccgagcgggaaatcgtgcgtgacattaaggagaagctgtgctacgtcgccctggacttcgagcaagagatggccacggctgcttccagctcctccctggagaagagctacgagctgcctgacggccaggtcatcaccattggcaatgagcggttccgctgccctgaggcactcttccagccttccttcctgggcatggagtcctgtggcatccacgaaactaccttcaactccatcatgaagtgtgacgtggacatccgcaaagacctgtacgccaacacagtgctgtctggcggcaccaccatgtaccctggcattgccgacaggatgcagaaggagatcactgccctggcacccagcacaatgaagatcaagatcattgctcctcctgagcgcaagtactccgtgtggatcggcggctccatcctggcctcgctgtccaccttccagcagatgtggatcagcaagcaggagtatgacgagtccggcccctccatcgtccaccgcaaatgcttctaggcggactatgacttagttgcgttacaccctttcttgacaaaacctaacttgcgcagaaaacaagatgagattggcatggctttatttgttttttttgttttgttttggttttttttttttttttggcttgactcaggatttaaaaactggaacggtgaaggtgacagcagtcggttggagcgagcatcccccaaagttcacaatgtggccgaggactttgattgcacattgttgtttttttaatagtcattccaaatatgagatgcgttgttacaggaagtcccttgccatcctaaaagccaccccacttctctctaaggagaatggcccagtcctctcccaagtccacacaggggaggtgatagcattgctttcgtgtaaattatgtaatgcaaaatttttttaatcttcgccttaatacttttttattttgttttattttgaatgatgagccttcgtgcccccccttcccccttttttgtcccccaacttgagatgtatgaaggcttttggtctccctgggagtgggtggaggcagccagggcttacctgtacactgacttgagaccagttgaataaaagtgcacaccttaaaaatgaaccgccgagaccgcgtccgccccgcgagcacagagcctcgcctttgccgatccgccgcccgtccacacccgccgccagctcaccatggatgatgatatcgccgcgctcgtcgtcgacaacggctccggcatgtgcaaggccggcttcgcgggcgacgatgccccccgggccgtcttcccctccatcgtggggcgccccaggcaccagggcgtgatggtgggcatgggtcagaaggattcctatgtgggcgacgaggcccagagcaagagaggcatcctcaccctgaagtaccccatcgagcacggcatcgtcaccaactgggacgacatggagaaaatctggcaccacaccttctacaatgagctgcgtgtggctcccgaggagcaccccgtgctgctgaccgaggcccccctgaaccccaaggccaaccgcgagaagatgacccagatcatgtttgagaccttcaacaccccagccatgtacgttgctatccaggctgtgctatccctgtacgcctctggccgtaccactggcatcgtgatggactccggtgacggggtcacccacactgtgcccatctacgaggggtatgccctcccccatgccatcctgcgtctggacctggctggccgggacctgactgactacctcatgaagatcctcaccgagcgcggctacagcttcaccaccacggccgagcgggaaatcgtgcgtgacattaaggagaagctgtgctacgtcgccctggacttcgagcaagagatggccacggctgcttccagctcctccctggagaagagctacgagctgcctgacggccaggtcatcaccattggcaatgagcggttccgctgccctgaggcactcttccagccttccttcctgggcatggagtcctgtggcatccacgaaactaccttcaactccatcatgaagtgtgacgtggacatccgcaaagacctgtacgccaacacagtgctgtctggcggcaccaccatgtaccctggcattgccgacaggatgcagaaggagatcactgccctggcacccagcacaatgaagatcaagatcattgctcctcctgagcgcaagtactccgtgtggatcggcggctccatcctggcctcgctgtccaccttccagcagatgtggatcagcaagcaggagtatgacgagtccggcccctccatcgtccaccgcaaatgcttctaggcggactatgacttagttgcgttacaccctttcttgacaaaacctaacttgcgcagaaaacaagatgagattggcatggctttatttgttttttttgttttgttttggttttttttttttttttggcttgactcaggatttaaaaactggaacggtgaaggtgacagcagtcggttggagcgagcatcccccaaagttcacaatgtggccgaggactttgattgcacattgttgtttttttaatagtcattccaaatatgagatgcgttgttacaggaagtcccttgccatcctaaaagccaccccacttctctctaaggagaatggcccagtcctctcccaagtccacacaggggaggtgatagcattgctttcgtgtaaattatgtaatgcaaaatttttttaatcttcgccttaatacttttttattttgttttattttgaatgatgagccttcgtgcccccccttcccccttttttgtcccccaacttgagatgtatgaaggcttttggtctccctgggagtgggtggaggcagccagggcttacctgtacactgacttgagaccagttgaataaaagtgcacaccttaaaaatgaaccgccgagaccgcgtccgccccgcgagcacagagcctcgcctttgccgatccgccgcccgtccacacccgccgccagctcaccatggatgatgatatcgccgcgctcgtcgtcgacaacggctccggcatgtgcaaggccggcttcgcgggcgacgatgccccccgggccgtcttcccctccatcgtggggcgccccaggcaccagggcgtgatggtgggcatgggtcagaaggattcctatgtgggcgacgaggcccagagcaagagaggcatcctcaccctgaagtaccccatcgagcacggcatcgtcaccaactgggacgacatggagaaaatctggcaccacaccttctacaatgagctgcgtgtggctcccgaggagcaccccgtgctgctgaccgaggcccccctgaaccccaaggccaaccgcgagaagatgacccagatcatgtttgagaccttcaacaccccagccatgtacgttgctatccaggctgtgctatccctgtacgcctctggccgtaccactggcatcgtgatggactccggtgacggggtcacccacactgtgcccatctacgaggggtatgccctcccccatgccatcctgcgtctggacctggctggccgggacctgactgactacctcatgaagatcctcaccgagcgcggctacagcttcaccaccacggccgagcgggaaatcgtgcgtgacattaaggagaagctgtgctacgtcgccctggacttcgagcaagagatggccacggctgcttccagctcctccctggagaagagctacgagctgcctgacggccaggtcatcaccattggcaatgagcggttccgctgccctgaggcactcttccagccttccttcctgggcatggagtcctgtggcatccacgaaactaccttcaactccatcatgaagtgtgacgtggacatccgcaaagacctgtacgccaacacagtgctgtctggcggcaccaccatgtaccctggcattgccgacaggatgcagaaggagatcactgccctggcacccagcacaatgaagatcaagatcattgctcctcctgagcgcaagtactccgtgtggatcggcggctccatcctggcctcgctgtccaccttccagcagatgtggatcagcaagcaggagtatgacgagtccggcccctccatcgtccaccgcaaatgcttctaggcggactatgacttagttgcgttacaccctttcttgacaaaacctaacttgcgcagaaaacaagatgagattggcatggctttatttgttttttttgttttgttttggttttttttttttttttggcttgactcaggatttaaaaactggaacggtgaaggtgacagcagtcggttggagcgagcatcccccaaagttcacaatgtggccgaggactttgattgcacattgttgtttttttaatagtcattccaaatatgagatgcgttgttacaggaagtcccttgccatcctaaaagccaccccacttctctctaaggagaatggcccagtcctctcccaagtccacacaggggaggtgatagcattgctttcgtgtaaattatgtaatgcaaaatttttttaatcttcgccttaatacttttttattttgttttattttgaatgatgagccttcgtgcccccccttcccccttttttgtcccccaacttgagatgtatgaaggcttttggtctccctgggagtgggtggaggcagccagggcttacctgtacactgacttgagaccagttgaataaaagtgcacaccttaaaaatgaaccgccgagaccgcgtccgccccgcgagcacagagcctcgcctttgccgatccgccgcccgtccacacccgccgccagctcaccatggatgatgatatcgccgcgctcgtcgtcgacaacggctccggcatgtgcaaggccggcttcgcgggcgacgatgccccccgggccgtcttcccctccatcgtggggcgccccaggcaccagggcgtgatggtgggcatgggtcagaaggattcctatgtgggcgacgaggcccagagcaagagaggcatcctcaccctgaagtaccccatcgagcacggcatcgtcaccaactgggacgacatggagaaaatctggcaccacaccttctacaatgagctgcgtgtggctcccgaggagcaccccgtgctgctgaccgaggcccccctgaaccccaaggccaaccgcgagaagatgacccagatcatgtttgagaccttcaacaccccagccatgtacgttgctatccaggctgtgctatccctgtacgcctctggccgtaccactggcatcgtgatggactccggtgacggggtcacccacactgtgcccatctacgaggggtatgccctcccccatgccatcctgcgtctggacctggctggccgggacctgactgactacctcatgaagatcctcaccgagcgcggctacagcttcaccaccacggccgagcgggaaatcgtgcgtgacattaaggagaagctgtgctacgtcgccctggacttcgagcaagagatggccacggctgcttccagctcctccctggagaagagctacgagctgcctgacggccaggtcatcaccattggcaatgagcggttccgctgccctgaggcactcttccagccttccttcctgggcatggagtcctgtggcatccacgaaactaccttcaactccatcatgaagtgtgacgtggacatccgcaaagacctgtacgccaacacagtgctgtctggcggcaccaccatgtaccctggcattgccgacaggatgcagaaggagatcactgccctggcacccagcacaatgaagatcaagatcattgctcctcctgagcgcaagtactccgtgtggatcggcggctccatcctggcctcgctgtccaccttccagcagatgtggatcagcaagcaggagtatgacgagtccggcccctccatcgtccaccgcaaatgcttctaggcggactatgacttagttgcgttacaccctttcttgacaaaacctaacttgcgcagaaaacaagatgagattggcatggctttatttgttttttttgttttgttttggttttttttttttttttggcttgactcaggatttaaaaactggaacggtgaaggtgacagcagtcggttggagcgagcatcccccaaagttcacaatgtggccgaggactttgattgcacattgttgtttttttaatagtcattccaaatatgagatgcgttgttacaggaagtcccttgccatcctaaaagccaccccacttctctctaaggagaatggcccagtcctctcccaagtccacacaggggaggtgatagcattgctttcgtgtaaattatgtaatgcaaaatttttttaatcttcgccttaatacttttttattttgttttattttgaatgatgagccttcgtgcccccccttcccccttttttgtcccccaacttgagatgtatgaaggcttttggtctccctgggagtgggtggaggcagccagggcttacctgtacactgacttgagaccagttgaataaaagtgcacaccttaaaaatgaaccgccgagaccgcgtccgccccgcgagcacagagcctcgcctttgccgatccgccgcccgtccacacccgccgccagctcaccatggatgatgatatcgccgcgctcgtcgtcgacaacggctccggcatgtgcaaggccggcttcgcgggcgacgatgccccccgggccgtcttcccctccatcgtggggcgccccaggcaccagggcgtgatggtgggcatgggtcagaaggattcctatgtgggcgacgaggcccagagcaagagaggcatcctcaccctgaagtaccccatcgagcacggcatcgtcaccaactgggacgacatggagaaaatctggcaccacaccttctacaatgagctgcgtgtggctcccgaggagcaccccgtgctgctgaccgaggcccccctgaaccccaaggccaaccgcgagaagatgacccagatcatgtttgagaccttcaacaccccagccatgtacgttgctatccaggctgtgctatccctgtacgcctctggccgtaccactggcatcgtgatggactccggtgacggggtcacccacactgtgcccatctacgaggggtatgccctcccccatgccatcctgcgtctggacctggctggccgggacctgactgactacctcatgaagatcctcaccgagcgcggctacagcttcaccaccacggccgagcgggaaatcgtgcgtgacattaaggagaagctgtgctacgtcgccctggacttcgagcaagagatggccacggctgcttccagctcctccctggagaagagctacgagctgcctgacggccaggtcatcaccattggcaatgagcggttccgctgccctgaggcactcttccagccttccttcctgggcatggagtcctgtggcatccacgaaactaccttcaactccatcatgaagtgtgacgtggacatccgcaaagacctgtacgccaacacagtgctgtctggcggcaccaccatgtaccctggcattgccgacaggatgcagaaggagatcactgccctggcacccagcacaatgaagatcaagatcattgctcctcctgagcgcaagtactccgtgtggatcggcggctccatcctggcctcgctgtccaccttccagcagatgtggatcagcaagcaggagtatgacgagtccggcccctccatcgtccaccgcaaatgcttctaggcggactatgacttagttgcgttacaccctttcttgacaaaacctaacttgcgcagaaaacaagatgagattggcatggctttatttgttttttttgttttgttttggttttttttttttttttggcttgactcaggatttaaaaactggaacggtgaaggtgacagcagtcggttggagcgagcatcccccaaagttcacaatgtggccgaggactttgattgcacattgttgtttttttaatagtcattccaaatatgagatgcgttgttacaggaagtcccttgccatcctaaaagccaccccacttctctctaaggagaatggcccagtcctctcccaagtccacacaggggaggtgatagcattgctttcgtgtaaattatgtaatgcaaaatttttttaatcttcgccttaatacttttttattttgttttattttgaatgatgagccttcgtgcccccccttcccccttttttgtcccccaacttgagatgtatgaaggcttttggtctccctgggagtgggtggaggcagccagggcttacctgtacactgacttgagaccagttgaataaaagtgcacaccttaaaaatgaaccgccgagaccgcgtccgccccgcgagcacagagcctcgcctttgccgatccgccgcccgtccacacccgccgccagctcaccatggatgatgatatcgccgcgctcgtcgtcgacaacggctccggcatgtgcaaggccggcttcgcgggcgacgatgccccccgggccgtcttcccctccatcgtggggcgccccaggcaccagggcgtgatggtgggcatgggtcagaaggattcctatgtgggcgacgaggcccagagcaagagaggcatcctcaccctgaagtaccccatcgagcacggcatcgtcaccaactgggacgacatggagaaaatctggcaccacaccttctacaatgagctgcgtgtggctcccgaggagcaccccgtgctgctgaccgaggcccccctgaaccccaaggccaaccgcgagaagatgacccagatcatgtttgagaccttcaacaccccagccatgtacgttgctatccaggctgtgctatccctgtacgcctctggccgtaccactggcatcgtgatggactccggtgacggggtcacccacactgtgcccatctacgaggggtatgccctcccccatgccatcctgcgtctggacctggctggccgggacctgactgactacctcatgaagatcctcaccgagcgcggctacagcttcaccaccacggccgagcgggaaatcgtgcgtgacattaaggagaagctgtgctacgtcgccctggacttcgagcaagagatggccacggctgcttccagctcctccctggagaagagctacgagctgcctgacggccaggtcatcaccattggcaatgagcggttccgctgccctgaggcactcttccagccttccttcctgggcatggagtcctgtggcatccacgaaactaccttcaactccatcatgaagtgtgacgtggacatccgcaaagacctgtacgccaacacagtgctgtctggcggcaccaccatgtaccctggcattgccgacaggatgcagaaggagatcactgccctggcacccagcacaatgaagatcaagatcattgctcctcctgagcgcaagtactccgtgtggatcggcggctccatcctggcctcgctgtccaccttccagcagatgtggatcagcaagcaggagtatgacgagtccggcccctccatcgtccaccgcaaatgcttctaggcggactatgacttagttgcgttacaccctttcttgacaaaacctaacttgcgcagaaaacaagatgagattggcatggctttatttgttttttttgttttgttttggttttttttttttttttggcttgactcaggatttaaaaactggaacggtgaaggtgacagcagtcggttggagcgagcatcccccaaagttcacaatgtggccgaggactttgattgcacattgttgtttttttaatagtcattccaaatatgagatgcgttgttacaggaagtcccttgccatcctaaaagccaccccacttctctctaaggagaatggcccagtcctctcccaagtccacacaggggaggtgatagcattgctttcgtgtaaattatgtaatgcaaaatttttttaatcttcgccttaatacttttttattttgttttattttgaatgatgagccttcgtgcccccccttcccccttttttgtcccccaacttgagatgtatgaaggcttttggtctccctgggagtgggtggaggcagccagggcttacctgtacactgacttgagaccagttgaataaaagtgcacaccttaaaaatgaaccgccgagaccgcgtccgccccgcgagcacagagcctcgcctttgccgatccgccgcccgtccacacccgccgccagctcaccatggatgatgatatcgccgcgctcgtcgtcgacaacggctccggcatgtgcaaggccggcttcgcgggcgacgatgccccccgggccgtcttcccctccatcgtggggcgccccaggcaccagggcgtgatggtgggcatgggtcagaaggattcctatgtgggcgacgaggcccagagcaagagaggcatcctcaccctgaagtaccccatcgagcacggcatcgtcaccaactgggacgacatggagaaaatctggcaccacaccttctacaatgagctgcgtgtggctcccgaggagcaccccgtgctgctgaccgaggcccccctgaaccccaaggccaaccgcgagaagatgacccagatcatgtttgagaccttcaacaccccagccatgtacgttgctatccaggctgtgctatccctgtacgcctctggccgtaccactggcatcgtgatggactccggtgacggggtcacccacactgtgcccatctacgaggggtatgccctcccccatgccatcctgcgtctggacctggctggccgggacctgactgactacctcatgaagatcctcaccgagcgcggctacagcttcaccaccacggccgagcgggaaatcgtgcgtgacattaaggagaagctgtgctacgtcgccctggacttcgagcaagagatggccacggctgcttccagctcctccctggagaagagctacgagctgcctgacggccaggtcatcaccattggcaatgagcggttccgctgccctgaggcactcttccagccttccttcctgggcatggagtcctgtggcatccacgaaactaccttcaactccatcatgaagtgtgacgtggacatccgcaaagacctgtacgccaacacagtgctgtctggcggcaccaccatgtaccctggcattgccgacaggatgcagaaggagatcactgccctggcacccagcacaatgaagatcaagatcattgctcctcctgagcgcaagtactccgtgtggatcggcggctccatcctggcctcgctgtccaccttccagcagatgtggatcagcaagcaggagtatgacgagtccggcccctccatcgtccaccgcaaatgcttctaggcggactatgacttagttgcgttacaccctttcttgacaaaacctaacttgcgcagaaaacaagatgagattggcatggctttatttgttttttttgttttgttttggttttttttttttttttggcttgactcaggatttaaaaactggaacggtgaaggtgacagcagtcggttggagcgagcatcccccaaagttcacaatgtggccgaggactttgattgcacattgttgtttttttaatagtcattccaaatatgagatgcgttgttacaggaagtcccttgccatcctaaaagccaccccacttctctctaaggagaatggcccagtcctctcccaagtccacacaggggaggtgatagcattgctttcgtgtaaattatgtaatgcaaaatttttttaatcttcgccttaatacttttttattttgttttattttgaatgatgagccttcgtgcccccccttcccccttttttgtcccccaacttgagatgtatgaaggcttttggtctccctgggagtgggtggaggcagccagggcttacctgtacactgacttgagaccagttgaataaaagtgcacaccttaaaaatgaaccgccgagaccgcgtccgccccgcgagcacagagcctcgcctttgccgatccgccgcccgtccacacccgccgccagctcaccatggatgatgatatcgccgcgctcgtcgtcgacaacggctccggcatgtgcaaggccggcttcgcgggcgacgatgccccccgggccgtcttcccctccatcgtggggcgccccaggcaccagggcgtgatggtgggcatgggtcagaaggattcctatgtgggcgacgaggcccagagcaagagaggcatcctcaccctgaagtaccccatcgagcacggcatcgtcaccaactgggacgacatggagaaaatctggcaccacaccttctacaatgagctgcgtgtggctcccgaggagcaccccgtgctgctgaccgaggcccccctgaaccccaaggccaaccgcgagaagatgacccagatcatgtttgagaccttcaacaccccagccatgtacgttgctatccaggctgtgctatccctgtacgcctctggccgtaccactggcatcgtgatggactccggtgacggggtcacccacactgtgcccatctacgaggggtatgccctcccccatgccatcctgcgtctggacctggctggccgggacctgactgactacctcatgaagatcctcaccgagcgcggctacagcttcaccaccacggccgagcgggaaatcgtgcgtgacattaaggagaagctgtgctacgtcgccctggacttcgagcaagagatggccacggctgcttccagctcctccctggagaagagctacgagctgcctgacggccaggtcatcaccattggcaatgagcggttccgctgccctgaggcactcttccagccttccttcctgggcatggagtcctgtggcatccacgaaactaccttcaactccatcatgaagtgtgacgtggacatccgcaaagacctgtacgccaacacagtgctgtctggcggcaccaccatgtaccctggcattgccgacaggatgcagaaggagatcactgccctggcacccagcacaatgaagatcaagatcattgctcctcctgagcgcaagtactccgtgtggatcggcggctccatcctggcctcgctgtccaccttccagcagatgtggatcagcaagcaggagtatgacgagtccggcccctccatcgtccaccgcaaatgcttctaggcggactatgacttagttgcgttacaccctttcttgacaaaacctaacttgcgcagaaaacaagatgagattggcatggctttatttgttttttttgttttgttttggttttttttttttttttggcttgactcaggatttaaaaactggaacggtgaaggtgacagcagtcggttggagcgagcatcccccaaagttcacaatgtggccgaggactttgattgcacattgttgtttttttaatagtcattccaaatatgagatgcgttgttacaggaagtcccttgccatcctaaaagccaccccacttctctctaaggagaatggcccagtcctctcccaagtccacacaggggaggtgatagcattgctttcgtgtaaattatgtaatgcaaaatttttttaatcttcgccttaatacttttttattttgttttattttgaatgatgagccttcgtgcccccccttcccccttttttgtcccccaacttgagatgtatgaaggcttttggtctccctgggagtgggtggaggcagccagggcttacctgtacactgacttgagaccagttgaataaaagtgcacaccttaaaaatgaaccgccgagaccgcgtccgccccgcgagcacagagcctcgcctttgccgatccgccgcccgtccacacccgccgccagctcaccatggatgatgatatcgccgcgctcgtcgtcgacaacggctccggcatgtgcaaggccggcttcgcgggcgacgatgccccccgggccgtcttcccctccatcgtggggcgccccaggcaccagggcgtgatggtgggcatgggtcagaaggattcctatgtgggcgacgaggcccagagcaagagaggcatcctcaccctgaagtaccccatcgagcacggcatcgtcaccaactgggacgacatggagaaaatctggcaccacaccttctacaatgagctgcgtgtggctcccgaggagcaccccgtgctgctgaccgaggcccccctgaaccccaaggccaaccgcgagaagatgacccagatcatgtttgagaccttcaacaccccagccatgtacgttgctatccaggctgtgctatccctgtacgcctctggccgtaccactggcatcgtgatggactccggtgacggggtcacccacactgtgcccatctacgaggggtatgccctcccccatgccatcctgcgtctggacctggctggccgggacctgactgactacctcatgaagatcctcaccgagcgcggctacagcttcaccaccacggccgagcgggaaatcgtgcgtgacattaaggagaagctgtgctacgtcgccctggacttcgagcaagagatggccacggctgcttccagctcctccctggagaagagctacgagctgcctgacggccaggtcatcaccattggcaatgagcggttccgctgccctgaggcactcttccagccttccttcctgggcatggagtcctgtggcatccacgaaactaccttcaactccatcatgaagtgtgacgtggacatccgcaaagacctgtacgccaacacagtgctgtctggcggcaccaccatgtaccctggcattgccgacaggatgcagaaggagatcactgccctggcacccagcacaatgaagatcaagatcattgctcctcctgagcgcaagtactccgtgtggatcggcggctccatcctggcctcgctgtccaccttccagcagatgtggatcagcaagcaggagtatgacgagtccggcccctccatcgtccaccgcaaatgcttctaggcggactatgacttagttgcgttacaccctttcttgacaaaacctaacttgcgcagaaaacaagatgagattggcatggctttatttgttttttttgttttgttttggttttttttttttttttggcttgactcaggatttaaaaactggaacggtgaaggtgacagcagtcggttggagcgagcatcccccaaagttcacaatgtggccgaggactttgattgcacattgttgtttttttaatagtcattccaaatatgagatgcgttgttacaggaagtcccttgccatcctaaaagccaccccacttctctctaaggagaatggcccagtcctctcccaagtccacacaggggaggtgatagcattgctttcgtgtaaattatgtaatgcaaaatttttttaatcttcgccttaatacttttttattttgttttattttgaatgatgagccttcgtgc

SEQ ID NO: 627 - DNA, 32765 bp, Homo sapiens
  misc_feature (102)..(102): second gene starts at position 102
atgcgtccaatgcgaatttttgtgaatgatgaccgccatgtgatggcaaagcattcttccgtttatccaacacaagaggagctggaggcagtccagaacatggtgtcccacacggagcgggcgctcaaagctgtgtccgactggatagacgagcaggaaaagggtagcagcgagcaggcagagtccgataacatggatgtgcccccagaggacgacagtaaagaaggggctggggaacagaagacggagcacatgaccagaaccctgcggggagtgatgcgggtgggcctggtggcaaagggcctcctactcaagggggacttggatctggagctggtgctgctgtgtaaggagaagcccacaaccgccctcctggacaaggtggccgacaacctggccatccagcttgctgctgtaacagaagacaagtacgaaatactgcaatctgtcgacgatgctgcgattgtgataaaaaacacaaaagagcctccattgtccctgaccatccacctgacatcccctgttgtcagagaagaaatggagaaagtattagctggagaaacgctatcagtcaacgaccccccggacgttctggacaggcagaaatgccttgctgccttggcgtccctccgacacgccaagtggttccaggccagagccaacgggctgaagtcttgtgtcattgtgatccgggtcttgagggacctgtgcactcgcgtgcccacctggggtcccctccgaggctggcctctcgagctcctgtgtgagaaatccattggcacggccaacagaccgatgggtgctggcgaggccctgcggagagtgctggagtgcctggcgtcgggcatcgtgatgccagatggttctggcatttatgacccttgtgaaaaagaagccactgatgctattgggcatctagacagacagcaacgggaagatatcacacagagtgcgcagcacgcactgcggctcgctgccttcggccagctccataaagtcctaggcatggaccctctgccttccaagatgcccaagaaaccaaagaatgaaaacccagtggactacaccgttcagatcccaccaagcaccacctatgccattacgcccatgaaacgcccaatggaggaggacggggaggagaagtcgcccagcaaaaagaagaagaagattcagaagaaagaggagaaggcagagcccccccaggctatgaatgccctgatgcggttgaaccagctgaagccagggctgcagtacaagctggtgtcccagactgggcccgtccatgcccccatctttaccatgtctgtggaggttgatggcaattcattcgaggcctctgggccctccaaaaagacggccaagctgcacgtggccgttaaggtgttacaggacatgggcttgccgacgggtgctgaaggcagggactcgagcaagggggaggactcggctgaggagaccgaggcgaagccagcagtggtggcccctgccccagtggtagaagctgtctccacccctagtgcggcctttccctcagatgccactgccgagcaggggccgatcctgacaaagcacggcaagaacccagtcatggagctgaacgagaagaggcgtgggctcaagtacgagctcatctccgagaccgggggcagccacgacaagcgcttcgtcatggaggtcgaagtggatggacagaagttccaaggtgctggttccaacaaaaaggtggcgaaggcctacgctgctcttgctgccctagaaaagcttttccctgacacccctctcgcccttgatgccaacaaaaagaagagagccccagtacccgtcagagggggaccgaaatttgctgctaagccacataaccctggcttcggcatgggaggccccatgcacaacgaagtgcccccaccccccaaccttcgagggcggggaagaggcgggagcatccggggacgagggcgcgggcgaggatttggtggcgccaaccatggaggctacatgaatgccggtgctgggtatggaagctatgggtacggaggcaactcggcgacagcaggctacagtcagttctacagcaacggagggcattctgggaatgccagtggagctggtggtggctttgggctcggtggcggagctggctttggaggtggcttcggtggccctggctttcctgtctgccctcctggaggtatccaagaggtcactgtcaaccagagtctcctgactcccctcaacctgcaaatcgaccccagcatccagagggtgaggaccgaggagcgcgagcagatcaagaccctcaacaataagtttgcctccttcatcgacaaggtgcggttcctggagcagcagaacaaggttctggacaccaagtggaccctgctgcaggagcagggcaccaagactgtgaggcagaacctggagccgttgttcgagcagtacatcaacaacctcaggaggcagctggacagcatcgtgggggaacggggccgcctggactcagagctgagaaacatgcaggacctggtggaagacttcaagaacaagtatgaggatgaaatcaacaagcgtaccactgctgagaatgagtttgtgatgctgaagaaggatgtagatgctgcctacatgaacaaggtggagctggaggccaaggttgatgcactgatggatgagattaacttcatgaagatgttctttgatgcggagctgtcccagatgcagacgcatgtctctgacacctcagtggtcctctccatggacaacaaccgcaacctggacctggatagcatcatcgctgaggtcaaggcccagtatgaggagattgccaaccgcagccggacagaagccgagtcctggtatcagaccaagtatgaggagctgcagcagacagctggccggcatggcgatgacctccgcaacaccaagcatgagatctctgagatgaaccggatgatccagaggctgagagccgagattgacaatgtcaagaaacagtgcgccaatctgcagaacgccattgcggatgccgagcagcgtggggagctggccctcaaggatgccaggaacaagctggccgagctggaggaggccctgcagaaggccaagcaggacatggcccggctgctgcgtgagtaccaggagctcatgaacaccaagctggccctggacgtggagatcgccacttaccgcaagctgctggagggcgaggaatgcagactcagtggagaaggagttggaccagtcaacatctctgttgtcacaagcagtgtttcctctggatatggcagtggcagtggctatggcggtggcctcggtggaggtcttggcggcggcctcggtggaggtcttgccggaggtagcagtggaagctactactccagcagcagtgggggtgtcggcctaggtggtgggctcagtgtggggggctctggcttcagtgcaagcagtggccgagggctgggggtgggctttggcagtggcgggggtagcagctccagcgtcaaatttgtctccaccacctcctcctcccggaagagcttcaagagctaagaacctgctgcaagtcactgccttccaagtgcagcaacccagcccatggagattgcctcttctaggcagttgctcaagccatgttttatccttttctggagagtagtctagaccaagccaattgcagaaccacattctttggttcccaggagagccccattcccagcccctggtctcccgtgccgcagttctatattctgcttcaaatcagccttcaggtttcccacagcatggcccctgctgacacgagaacccaaagttttcccaaatctaaatcatcaaaacagaatccccaccccaatcccaaattttgttttggttctaactacctccagaatgtgttcaataaaatgcttttataatataatcgacagctctctcgcccagcccagttctggaagggataaaaagggggcatcaccgttcctgggtaacagagccaccttctgcgtcctgctgagctctgttctctccagcacctcccaacccactagtgcctggttctcttgctccaccaggaacaagccaccatgtctcgccagtcaagtgtgtccttccggagcgggggcagtcgtagcttcagcaccgcctctgccatcaccccgtctgtctcccgcaccagcttcacctccgtgtcccggtccgggggtggcggtggtggtggcttcggcagggtcagccttgcgggtgcttgtggagtgggtggctatggcagccggagcctctacaacctggggggctccaagaggatatccatcagcactagtggtggcagcttcaggaaccggtttggtgctggtgctggaggcggctatggctttggaggtggtgccggtagtggatttggtttcggcggtggagctggtggtggctttgggctcggtggcggagctggctttggaggtggcttcggtggccctggctttcctgtctgccctcctggaggtatccaagaggtcactgtcaaccagagtctcctgactcccctcaacctgcaaatcgaccccagcatccagagggtgaggaccgaggagcgcgagcagatcaagaccctcaacaataagtttgcctccttcatcgacaaggtgcggttcctggagcagcagaacaaggttctggacaccaagtggaccctgctgcaggagcagggcaccaagactgtgaggcagaacctggagccgttgttcgagcagtacatcaacaacctcaggaggcagctggacagcatcgtgggggaacggggccgcctggactcagagctgagaaacatgcaggacctggtggaagacttcaagaacaagtatgaggatgaaatcaacaagcgtaccactgctgagaatgagtttgtgatgctgaagaaggatgtagatgctgcctacatgaacaaggtggagctggaggccaaggttgatgcactgatggatgagattaacttcatgaagatgttctttgatgcggagctgtcccagatgcagacgcatgtctctgacacctcagtggtcctctccatggacaacaaccgcaacctggacctggatagcatcatcgctgaggtcaaggcccagtatgaggagattgccaaccgcagccggacagaagccgagtcctggtatcagaccaagtatgaggagctgcagcagacagctggccggcatggcgatgacctccgcaacaccaagcatgagatctctgagatgaaccggatgatccagaggctgagagccgagattgacaatgtcaagaaacagtgcgccaatctgcagaacgccattgcggatgccgagcagcgtggggagctggccctcaaggatgccaggaacaagctggccgagctggaggaggccctgcagaaggccaagcaggacatggcccggctgctgcgtgagtaccaggagctcatgaacaccaagctggccctggacgtggagatcgccacttaccgcaagctgctggagggcgaggaatgcagactcagtggagaaggagttggaccagtcaacatctctgttgtcacaagcagtgtttcctctggatatggcagtggcagtggctatggcggtggcctcggtggaggtcttggcggcggcctcggtggaggtcttgccggaggtagcagtggaagctactactccagcagcagtgggggtgtcggcctaggtggtgggctcagtgtggggggctctggcttcagtgcaagcagtggccgagggctgggggtgggctttggcagtggcgggggtagcagctccagcgtcaaatttgtctccaccacctcctcctcccggaagagcttcaagagctaagaacctgctgcaagtcactgccttccaagtgcagcaacccagcccatggagattgcctcttctaggcagttgctcaagccatgttttatccttttctggagagtagtctagaccaagccaattgcagaaccacattctttggttcccaggagagccccattcccagcccctggtctcccgtgccgcagttctatattctgcttcaaatcagccttcaggtttcccacagcatggcccctgctgacacgagaacccaaagttttcccaaatctaaatcatcaaaacagaatccccaccccaatcccaaattttgttttggttctaactacctccagaatgtgttcaataaaatgcttttataatataatcgacagctctctcgcccagcccagttctggaagggataaaaagggggcatcaccgttcctgggtaacagagccaccttctgcgtcctgctgagctctgttctctccagcacctcccaacccactagtgcctggttctcttgctccaccaggaacaagccaccatgtctcgccagtcaagtgtgtccttccggagcgggggcagtcgtagcttcagcaccgcctctgccatcaccccgtctgtctcccgcaccagcttcacctccgtgtcccggtccgggggtggcggtggtggtggcttcggcagggtcagccttgcgggtgcttgtggagtgggtggctatggcagccggagcctctacaacctggggggctccaagaggatatccatcagcactagtggtggcagcttcaggaaccggtttggtgctggtgctggaggcggctatggctttggaggtggtgccggtagtggatttggtttcggcggtggagctggtggtggctttgggctcggtggcggagctggctttggaggtggcttcggtggccctggctttcctgtctgccctcctggaggtatccaagaggtcactgtcaaccagagtctcctgactcccctcaacctgcaaatcgaccccagcatccagagggtgaggaccgaggagcgcgagcagatcaagaccctcaacaataagtttgcctccttcatcgacaaggtgcggttcctggagcagcagaacaaggttctggacaccaagtggaccctgctgcaggagcagggcaccaagactgtgaggcagaacctggagccgttgttcgagcagtacatcaacaacctcaggaggcagctggacagcatcgtgggggaacggggccgcctggactcagagctgagaaacatgcaggacctggtggaagacttcaagaacaagtatgaggatgaaatcaacaagcgtaccactgctgagaatgagtttgtgatgctgaagaaggatgtagatgctgcctacatgaacaaggtggagctggaggccaaggttgatgcactgatggatgagattaacttcatgaagatgttctttgatgcggagctgtcccagatgcagacgcatgtctctgacacctcagtggtcctctccatggacaacaaccgcaacctggacctggatagcatcatcgctgaggtcaaggcccagtatgaggagattgccaaccgcagccggacagaagccgagtcctggtatcagaccaagtatgaggagctgcagcagacagctggccggcatggcgatgacctccgcaacaccaagcatgagatctctgagatgaaccggatgatccagaggctgagagccgagattgacaatgtcaagaaacagtgcgccaatctgcagaacgccattgcggatgccgagcagcgtggggagctggccctcaaggatgccaggaacaagctggccgagctggaggaggccctgcagaaggccaagcaggacatggcccggctgctgcgtgagtaccaggagctcatgaacaccaagctggccctggacgtggagatcgccacttaccgcaagctgctggagggcgaggaatgcagactcagtggagaaggagttggaccagtcaacatctctgttgtcacaagcagtgtttcctctggatatggcagtggcagtggctatggcggtggcctcggtggaggtcttggcggcggcctcggtggaggtcttgccggaggtagcagtggaagctactactccagcagcagtgggggtgtcggcctaggtggtgggctcagtgtggggggctctggcttcagtgcaagcagtggccgagggctgggggtgggctttggcagtggcgggggtagcagctccagcgtcaaatttgtctccaccacctcctcctcccggaagagcttcaagagctaagaacctgctgcaagtcactgccttccaagtgcagcaacccagcccatggagattgcctcttctaggcagttgctcaagccatgttttatccttttctggagagtagtctagaccaagccaattgcagaaccacattctttggttcccaggagagccccattcccagcccctggtctcccgtgccgcagttctatattctgcttcaaatcagccttcaggtttcccacagcatggcccctgctgacacgagaacccaaagttttcccaaatctaaatcatcaaaacagaatccccaccccaatcccaaattttgttttggttctaactacctccagaatgtgttcaataaaatgcttttataatataatcgacagctctctcgcccagcccagttctggaagggataaaaagggggcatcaccgttcctgggtaacagagccaccttctgcgtcctgctgagctctgttctctccagcacctcccaacccactagtgcctggttctcttgctccaccaggaacaagccaccatgtctcgccagtcaagtgtgtccttccggagcgggggcagtcgtagcttcagcaccgcctctgccatcaccccgtctgtctcccgcaccagcttcacctccgtgtcccggtccgggggtggcggtggtggtggcttcggcagggtcagccttgcgggtgcttgtggagtgggtggctatggcagccggagcctctacaacctggggggctccaagaggatatccatcagcactagtggtggcagcttcaggaaccggtttggtgctggtgctggaggcggctatggctttggaggtggtgccggtagtggatttggtttcggcggtggagctggtggtggctttgggctcggtggcggagctggctttggaggtggcttcggtggccctggctttcctgtctgccctcctggaggtatccaagaggtcactgtcaaccagagtctcctgactcccctcaacctgcaaatcgaccccagcatccagagggtgaggaccgaggagcgcgagcagatcaagaccctcaacaataagtttgcctccttcatcgacaaggtgcggttcctggagcagcagaacaaggttctggacaccaagtggaccctgctgcaggagcagggcaccaagactgtgaggcagaacctggagccgttgttcgagcagtacatcaacaacctcaggaggcagctggacagcatcgtgggggaacggggccgcctggactcagagctgagaaacatgcaggacctggtggaagacttcaagaacaagtatgaggatgaaatcaacaagcgtaccactgctgagaatgagtttgtgatgctgaagaaggatgtagatgctgcctacatgaacaaggtggagctggaggccaaggttgatgcactgatggatgagattaacttcatgaagatgttctttgatgcggagctgtcccagatgcagacgcatgtctctgacacctcagtggtcctctccatggacaacaaccgcaacctggacctggatagcatcatcgctgaggtcaaggcccagtatgaggagattgccaaccgcagccggacagaagccgagtcctggtatcagaccaagtatgaggagctgcagcagacagctggccggcatggcgatgacctccgcaacaccaagcatgagatctctgagatgaaccggatgatccagaggctgagagccgagattgacaatgtcaagaaacagtgcgccaatctgcagaacgccattgcggatgccgagcagcgtggggagctggccctcaaggatgccaggaacaagctggccgagctggaggaggccctgcagaaggccaagcaggacatggcccggctgctgcgtgagtaccaggagctcatgaacaccaagctggccctggacgtggagatcgccacttaccgcaagctgctggagggcgaggaatgcagactcagtggagaaggagttggaccagtcaacatctctgttgtcacaagcagtgtttcctctggatatggcagtggcagtggctatggcggtggcctcggtggaggtcttggcggcggcctcggtggaggtcttgccggaggtagcagtggaagctactactccagcagcagtgggggtgtcggcctaggtggtgggctcagtgtggggggctctggcttcagtgcaagcagtggccgagggctgggggtgggctttggcagtggcgggggtagcagctccagcgtcaaatttgtctccaccacctcctcctcccggaagagcttcaagagctaagaacctgctgcaagtcactgccttccaagtgcagcaacccagcccatggagattgcctcttctaggcagttgctcaagccatgttttatccttttctggagagtagtctagaccaagccaattgcagaaccacattctttggttcccaggagagccccattcccagcccctggtctcccgtgccgcagttctatattctgcttcaaatcagccttcaggtttcccacagcatggcccctgctgacacgagaacccaaagttttcccaaatctaaatcatcaaaacagaatccccaccccaatcccaaattttgttttggttctaactacctccagaatgtgttcaataaaatgcttttataatataatcgacagctctctcgcccagcccagttctggaagggataaaaagggggcatcaccgttcctgggtaacagagccaccttctgcgtcctgctgagctctgttctctccagcacctcccaacccactagtgcctggttctcttgctccaccaggaacaagccaccatgtctcgccagtcaagtgtgtccttccggagcgggggcagtcgtagcttcagcaccgcctctgccatcaccccgtctgtctcccgcaccagcttcacctccgtgtcccggtccgggggtggcggtggtggtggcttcggcagggtcagccttgcgggtgcttgtggagtgggtggctatggcagccggagcctctacaacctggggggctccaagaggatatccatcagcactagtggtggcagcttcaggaaccggtttggtgctggtgctggaggcggctatggctttggaggtggtgccggtagtggatttggtttcggcggtggagctggtggtggctttgggctcggtggcggagctggctttggaggtggcttcggtggccctggctttcctgtctgccctcctggaggtatccaagaggtcactgtcaaccagagtctcctgactcccctcaacctgcaaatcgaccccagcatccagagggtgaggaccgaggagcgcgagcagatcaagaccctcaacaataagtttgcctccttcatcgacaaggtgcggttcctggagcagcagaacaaggttctggacaccaagtggaccctgctgcaggagcagggcaccaagactgtgaggcagaacctggagccgttgttcgagcagtacatcaacaacctcaggaggcagctggacagcatcgtgggggaacggggccgcctggactcagagctgagaaacatgcaggacctggtggaagacttcaagaacaagtatgaggatgaaatcaacaagcgtaccactgctgagaatgagtttgtgatgctgaagaaggatgtagatgctgcctacatgaacaaggtggagctggaggccaaggttgatgcactgatggatgagattaacttcatgaagatgttctttgatgcggagctgtcccagatgcagacgcatgtctctgacacctcagtggtcctctccatggacaacaaccgcaacctggacctggatagcatcatcgctgaggtcaaggcccagtatgaggagattgccaaccgcagccggacagaagccgagtcctggtatcagaccaagtatgaggagctgcagcagacagctggccggcatggcgatgacctccgcaacaccaagcatgagatctctgagatgaaccggatgatccagaggctgagagccgagattgacaatgtcaagaaacagtgcgccaatctgcagaacgccattgcggatgccgagcagcgtggggagctggccctcaaggatgccaggaacaagctggccgagctggaggaggccctgcagaaggccaagcaggacatggcccggctgctgcgtgagtaccaggagctcatgaacaccaagctggccctggacgtggagatcgccacttaccgcaagctgctggagggcgaggaatgcagactcagtggagaaggagttggaccagtcaacatctctgttgtcacaagcagtgtttcctctggatatggcagtggcagtggctatggcggtggcctcggtggaggtcttggcggcggcctcggtggaggtcttgccggaggtagcagtggaagctactactccagcagcagtgggggtgtcggcctaggtggtgggctcagtgtggggggctctggcttcagtgcaagcagtggccgagggctgggggtgggctttggcagtggcgggggtagcagctccagcgtcaaatttgtctccaccacctcctcctcccggaagagcttcaagagctaagaacctgctgcaagtcactgccttccaagtgcagcaacccagcccatggagattgcctcttctaggcagttgctcaagccatgttttatccttttctggagagtagtctagaccaagccaattgcagaaccacattctttggttcccaggagagccccattcccagcccctggtctcccgtgccgcagttctatattctgcttcaaatcagccttcaggtttcccacagcatggcccctgctgacacgagaacccaaagttttcccaaatctaaatcatcaaaacagaatccccaccccaatcccaaattttgttttggttctaactacctccagaatgtgttcaataaaatgcttttataatataatcgacagctctctcgcccagcccagttctggaagggataaaaagggggcatcaccgttcctgggtaacagagccaccttctgcgtcctgctgagctctgttctctccagcacctcccaacccactagtgcctggttctcttgctccaccaggaacaagccaccatgtctcgccagtcaagtgtgtccttccggagcgggggcagtcgtagcttcagcaccgcctctgccatcaccccgtctgtctcccgcaccagcttcacctccgtgtcccggtccgggggtggcggtggtggtggcttcggcagggtcagccttgcgggtgcttgtggagtgggtggctatggcagccggagcctctacaacctggggggctccaagaggatatccatcagcactagtggtggcagcttcaggaaccggtttggtgctggtgctggaggcggctatggctttggaggtggtgccggtagtggatttggtttcggcggtggagctggtggtggctttgggctcggtggcggagctggctttggaggtggcttcggtggccctggctttcctgtctgccctcctggaggtatccaagaggtcactgtcaaccagagtctcctgactcccctcaacctgcaaatcgaccccagcatccagagggtgaggaccgaggagcgcgagcagatcaagaccctcaacaataagtttgcctccttcatcgacaaggtgcggttcctggagcagcagaacaaggttctggacaccaagtggaccctgctgcaggagcagggcaccaagactgtgaggcagaacctggagccgttgttcgagcagtacatcaacaacctcaggaggcagctggacagcatcgtgggggaacggggccgcctggactcagagctgagaaacatgcaggacctggtggaagacttcaagaacaagtatgaggatgaaatcaacaagcgtaccactgctgagaatgagtttgtgatgctgaagaaggatgtagatgctgcctacatgaacaaggtggagctggaggccaaggttgatgcactgatggatgagattaacttcatgaagatgttctttgatgcggagctgtcccagatgcagacgcatgtctctgacacctcagtggtcctctccatggacaacaaccgcaacctggacctggatagcatcatcgctgaggtcaaggcccagtatgaggagattgccaaccgcagccggacagaagccgagtcctggtatcagaccaagtatgaggagctgcagcagacagctggccggcatggcgatgacctccgcaacaccaagcatgagatctctgagatgaaccggatgatccagaggctgagagccgagattgacaatgtcaagaaacagtgcgccaatctgcagaacgccattgcggatgccgagcagcgtggggagctggccctcaaggatgccaggaacaagctggccgagctggaggaggccctgcagaaggccaagcaggacatggcccggctgctgcgtgagtaccaggagctcatgaacaccaagctggccctggacgtggagatcgccacttaccgcaagctgctggagggcgaggaatgcagactcagtggagaaggagttggaccagtcaacatctctgttgtcacaagcagtgtttcctctggatatggcagtggcagtggctatggcggtggcctcggtggaggtcttggcggcggcctcggtggaggtcttgccggaggtagcagtggaagctactactccagcagcagtgggggtgtcggcctaggtggtgggctcagtgtggggggctctggcttcagtgcaagcagtggccgagggctgggggtgggctttggcagtggcgggggtagcagctccagcgtcaaatttgtctccaccacctcctcctcccggaagagcttcaagagctaagaacctgctgcaagtcactgccttccaagtgcagcaacccagcccatggagattgcctcttctaggcagttgctcaagccatgttttatccttttctggagagtagtctagaccaagccaattgcagaaccacattctttggttcccaggagagccccattcccagcccctggtctcccgtgccgcagttctatattctgcttcaaatcagccttcaggtttcccacagcatggcccctgctgacacgagaacccaaagttttcccaaatctaaatcatcaaaacagaatccccaccccaatcccaaattttgttttggttctaactacctccagaatgtgttcaataaaatgcttttataatataatcgacagctctctcgcccagcccagttctggaagggataaaaagggggcatcaccgttcctgggtaacagagccaccttctgcgtcctgctgagctctgttctctccagcacctcccaacccactagtgcctggttctcttgctccaccaggaacaagccaccatgtctcgccagtcaagtgtgtccttccggagcgggggcagtcgtagcttcagcaccgcctctgccatcaccccgtctgtctcccgcaccagcttcacctccgtgtcccggtccgggggtggcggtggtggtggcttcggcagggtcagccttgcgggtgcttgtggagtgggtggctatggcagccggagcctctacaacctggggggctccaagaggatatccatcagcactagtggtggcagcttcaggaaccggtttggtgctggtgctggaggcggctatggctttggaggtggtgccggtagtggatttggtttcggcggtggagctggtggtggctttgggctcggtggcggagctggctttggaggtggcttcggtggccctggctttcctgtctgccctcctggaggtatccaagaggtcactgtcaaccagagtctcctgactcccctcaacctgcaaatcgaccccagcatccagagggtgaggaccgaggagcgcgagcagatcaagaccctcaacaataagtttgcctccttcatcgacaaggtgcggttcctggagcagcagaacaaggttctggacaccaagtggaccctgctgcaggagcagggcaccaagactgtgaggcagaacctggagccgttgttcgagcagtacatcaacaacctcaggaggcagctggacagcatcgtgggggaacggggccgcctggactcagagctgagaaacatgcaggacctggtggaagacttcaagaacaagtatgaggatgaaatcaacaagcgtaccactgctgagaatgagtttgtgatgctgaagaaggatgtagatgctgcctacatgaacaaggtggagctggaggccaaggttgatgcactgatggatgagattaacttcatgaagatgttctttgatgcggagctgtcccagatgcagacgcatgtctctgacacctcagtggtcctctccatggacaacaaccgcaacctggacctggatagcatcatcgctgaggtcaaggcccagtatgaggagattgccaaccgcagccggacagaagccgagtcctggtatcagaccaagtatgaggagctgcagcagacagctggccggcatggcgatgacctccgcaacaccaagcatgagatctctgagatgaaccggatgatccagaggctgagagccgagattgacaatgtcaagaaacagtgcgccaatctgcagaacgccattgcggatgccgagcagcgtggggagctggccctcaaggatgccaggaacaagctggccgagctggaggaggccctgcagaaggccaagcaggacatggcccggctgctgcgtgagtaccaggagctcatgaacaccaagctggccctggacgtggagatcgccacttaccgcaagctgctggagggcgaggaatgcagactcagtggagaaggagttggaccagtcaacatctctgttgtcacaagcagtgtttcctctggatatggcagtggcagtggctatggcggtggcctcggtggaggtcttggcggcggcctcggtggaggtcttgccggaggtagcagtggaagctactactccagcagcagtgggggtgtcggcctaggtggtgggctcagtgtggggggctctggcttcagtgcaagcagtggccgagggctgggggtgggctttggcagtggcgggggtagcagctccagcgtcaaatttgtctccaccacctcctcctcccggaagagcttcaagagctaagaacctgctgcaagtcactgccttccaagtgcagcaacccagcccatggagattgcctcttctaggcagttgctcaagccatgttttatccttttctggagagtagtctagaccaagccaattgcagaaccacattctttggttcccaggagagccccattcccagcccctggtctcccgtgccgcagttctatattctgcttcaaatcagccttcaggtttcccacagcatggcccctgctgacacgagaacccaaagttttcccaaatctaaatcatcaaaacagaatccccaccccaatcccaaattttgttttggttctaactacctccagaatgtgttcaataaaatgcttttataatataatcgacagctctctcgcccagcccagttctggaagggataaaaagggggcatcaccgttcctgggtaacagagccaccttctgcgtcctgctgagctctgttctctccagcacctcccaacccactagtgcctggttctcttgctccaccaggaacaagccaccatgtctcgccagtcaagtgtgtccttccggagcgggggcagtcgtagcttcagcaccgcctctgccatcaccccgtctgtctcccgcaccagcttcacctccgtgtcccggtccgggggtggcggtggtggtggcttcggcagggtcagccttgcgggtgcttgtggagtgggtggctatggcagccggagcctctacaacctggggggctccaagaggatatccatcagcactagtggtggcagcttcaggaaccggtttggtgctggtgctggaggcggctatggctttggaggtggtgccggtagtggatttggtttcggcggtggagctggtggtggctttgggctcggtggcggagctggctttggaggtggcttcggtggccctggctttcctgtctgccctcctggaggtatccaagaggtcactgtcaaccagagtctcctgactcccctcaacctgcaaatcgaccccagcatccagagggtgaggaccgaggagcgcgagcagatcaagaccctcaacaataagtttgcctccttcatcgacaaggtgcggttcctggagcagcagaacaaggttctggacaccaagtggaccctgctgcaggagcagggcaccaagactgtgaggcagaacctggagccgttgttcgagcagtacatcaacaacctcaggaggcagctggacagcatcgtgggggaacggggccgcctggactcagagctgagaaacatgcaggacctggtggaagacttcaagaacaagtatgaggatgaaatcaacaagcgtaccactgctgagaatgagtttgtgatgctgaagaaggatgtagatgctgcctacatgaacaaggtggagctggaggccaaggttgatgcactgatggatgagattaacttcatgaagatgttctttgatgcggagctgtcccagatgcagacgcatgtctctgacacctcagtggtcctctccatggacaacaaccgcaacctggacctggatagcatcatcgctgaggtcaaggcccagtatgaggagattgccaaccgcagccggacagaagccgagtcctggtatcagaccaagtatgaggagctgcagcagacagctggccggcatggcgatgacctccgcaacaccaagcatgagatctctgagatgaaccggatgatccagaggctgagagccgagattgacaatgtcaagaaacagtgcgccaatctgcagaacgccattgcggatgccgagcagcgtggggagctggccctcaaggatgccaggaacaagctggccgagctggaggaggccctgcagaaggccaagcaggacatggcccggctgctgcgtgagtaccaggagctcatgaacaccaagctggccctggacgtggagatcgccacttaccgcaagctgctggagggcgaggaatgcagactcagtggagaaggagttggaccagtcaacatctctgttgtcacaagcagtgtttcctctggatatggcagtggcagtggctatggcggtggcctcggtggaggtcttggcggcggcctcggtggaggtcttgccggaggtagcagtggaagctactactccagcagcagtgggggtgtcggcctaggtggtgggctcagtgtggggggctctggcttcagtgcaagcagtggccgagggctgggggtgggctttggcagtggcgggggtagcagctccagcgtcaaatttgtctccaccacctcctcctcccggaagagcttcaagagctaagaacctgctgcaagtcactgccttccaagtgcagcaacccagcccatggagattgcctcttctaggcagttgctcaagccatgttttatccttttctggagagtagtctagaccaagccaattgcagaaccacattctttggttcccaggagagccccattcccagcccctggtctcccgtgccgcagttctatattctgcttcaaatcagccttcaggtttcccacagcatggcccctgctgacacgagaacccaaagttttcccaaatctaaatcatcaaaacagaatccccaccccaatcccaaattttgttttggttctaactacctccagaatgtgttcaataaaatgcttttataatataatcgacagctctctcgcccagcccagttctggaagggataaaaagggggcatcaccgttcctgggtaacagagccaccttctgcgtcctgctgagctctgttctctccagcacctcccaacccactagtgcctggttctcttgctccaccaggaacaagccaccatgtctcgccagtcaagtgtgtccttccggagcgggggcagtcgtagcttcagcaccgcctctgccatcaccccgtctgtctcccgcaccagcttcacctccgtgtcccggtccgggggtggcggtggtggtggcttcggcagggtcagccttgcgggtgcttgtggagtgggtggctatggcagccggagcctctacaacctggggggctccaagaggatatccatcagcactagtggtggcagcttcaggaaccggtttggtgctggtgctggaggcggctatggctttggaggtggtgccggtagtggatttggtttcggcggtggagctggtggtggctttgggctcggtggcggagctggctttggaggtggcttcggtggccctggctttcctgtctgccctcctggaggtatccaagaggtcactgtcaaccagagtctcctgactcccctcaacctgcaaatcgaccccagcatccagagggtgaggaccgaggagcgcgagcagatcaagaccctcaacaataagtttgcctccttcatcgacaaggtgcggttcctggagcagcagaacaaggttctggacaccaagtggaccctgctgcaggagcagggcaccaagactgtgaggcagaacctggagccgttgttcgagcagtacatcaacaacctcaggaggcagctggacagcatcgtgggggaacggggccgcctggactcagagctgagaaacatgcaggacctggtggaagacttcaagaacaagtatgaggatgaaatcaacaagcgtaccactgctgagaatgagtttgtgatgctgaagaaggatgtagatgctgcctacatgaacaaggtggagctggaggccaaggttgatgcactgatggatgagattaacttcatgaagatgttctttgatgcggagctgtcccagatgcagacgcatgtctctgacacctcagtggtcctctccatggacaacaaccgcaacctggacctggatagcatcatcgctgaggtcaaggcccagtatgaggagattgccaaccgcagccggacagaagccgagtcctggtatcagaccaagtatgaggagctgcagcagacagctggccggcatggcgatgacctccgcaacaccaagcatgagatctctgagatgaaccggatgatccagaggctgagagccgagattgacaatgtcaagaaacagtgcgccaatctgcagaacgccattgcggatgccgagcagcgtggggagctggccctcaaggatgccaggaacaagctggccgagctggaggaggccctgcagaaggccaagcaggacatggcccggctgctgcgtgagtaccaggagctcatgaacaccaagctggccctggacgtggagatcgccacttaccgcaagctgctggagggcgaggaatgcagactcagtggagaaggagttggaccagtcaacatctctgttgtcacaagcagtgtttcctctggatatggcagtggcagtggctatggcggtggcctcggtggaggtcttggcggcggcctcggtggaggtcttgccggaggtagcagtggaagctactactccagcagcagtgggggtgtcggcctaggtggtgggctcagtgtggggggctctggcttcagtgcaagcagtggccgagggctgggggtgggctttggcagtggcgggggtagcagctccagcgtcaaatttgtctccaccacctcctcctcccggaagagcttcaagagctaagaacctgctgcaagtcactgccttccaagtgcagcaacccagcccatggagattgcctcttctaggcagttgctcaagccatgttttatccttttctggagagtagtctagaccaagccaattgcagaaccacattctttggttcccaggagagccccattcccagcccctggtctcccgtgccgcagttctatattctgcttcaaatcagccttcaggtttcccacagcatggcccctgctgacacgagaacccaaagttttcccaaatctaaatcatcaaaacagaatccccaccccaatcccaaattttgttttggttctaactacctccagaatgtgttcaataaaatgcttttataatataatcgacagctctctcgcccagcccagttctggaagggataaaaagggggcatcaccgttcctgggtaacagagccaccttctgcgtcctgctgagctctgttctctccagcacctcccaacccactagtgcctggttctcttgctccaccaggaacaagccaccatgtctcgccagtcaagtgtgtccttccggagcgggggcagtcgtagcttcagcaccgcctctgccatcaccccgtctgtctcccgcaccagcttcacctccgtgtcccggtccgggggtggcggtggtggtggcttcggcagggtcagccttgcgggtgcttgtggagtgggtggctatggcagccggagcctctacaacctggggggctccaagaggatatccatcagcactagtggtggcagcttcaggaaccggtttggtgctggtgctggaggcggctatggctttggaggtggtgccggtagtggatttggtttcggcggtggagctggtggtggctttgggctcggtggcggagctggctttggaggtggcttcggtggccctggctttcctgtctgccctcctggaggtatccaagaggtcactgtcaaccagagtctcctgactcccctcaacctgcaaatcgaccccagcatccagagggtgaggaccgaggagcgcgagcagatcaagaccctcaacaataagtttgcctccttcatcgacaaggtgcggttcctggagcagcagaacaaggttctggacaccaagtggaccctgctgcaggagcagggcaccaagactgtgaggcagaacctggagccgttgttcgagcagtacatcaacaacctcaggaggcagctggacagcatcgtgggggaacggggccgcctggactcagagctgagaaacatgcaggacctggtggaagacttcaagaacaagtatgaggatgaaatcaacaagcgtaccactgctgagaatgagtttgtgatgctgaagaaggatgtagatgctgcctacatgaacaaggtggagctggaggccaaggttgatgcactgatggatgagattaacttcatgaagatgttctttgatgcggagctgtcccagatgcagacgcatgtctctgacacctcagtggtcctctccatggacaacaaccgcaacctggacctggatagcatcatcgctgaggtcaaggcccagtatgaggagattgccaaccgcagccggacagaagccgagtcctggtatcagaccaagtatgaggagctgcagcagacagctggccggcatggcgatgacctccgcaacaccaagcatgagatctctgagatgaaccggatgatccagaggctgagagccgagattgacaatgtcaagaaacagtgcgccaatctgcagaacgccattgcggatgccgagcagcgtggggagctggccctcaaggatgccaggaacaagctggccgagctggaggaggccctgcagaaggccaagcaggacatggcccggctgctgcgtgagtaccaggagctcatgaacaccaagctggccctggacgtggagatcgccacttaccgcaagctgctggagggcgaggaatgcagactcagtggagaaggagttggaccagtcaacatctctgttgtcacaagcagtgtttcctctggatatggcagtggcagtggctatggcggtggcctcggtggaggtcttggcggcggcctcggtggaggtcttgccggaggtagcagtggaagctactactccagcagcagtgggggtgtcggcctaggtggtgggctcagtgtggggggctctggcttcagtgcaagcagtggccgagggctgggggtgggctttggcagtggcgggggtagcagctccagcgtcaaatttgtctccaccacctcctcctcccggaagagcttcaagagctaagaacctgctgcaagtcactgccttccaagtgcagcaacccagcccatggagattgcctcttctaggcagttgctcaagccatgttttatccttttctggagagtagtctagaccaagccaattgcagaaccacattctttggttcccaggagagccccattcccagcccctggtctcccgtgccgcagttctatattctgcttcaaatcagccttcaggtttcccacagcatggcccctgctgacacgagaacccaaagttttcccaaatctaaatcatcaaaacagaatccccaccccaatcccaaattttgttttggttctaactacctccagaatgtgttcaataaaatgcttttataatataatcgacagctctctcgcccagcccagttctggaagggataaaaagggggcatcaccgttcctgggtaacagagccaccttctgcgtcctgctgagctctgttctctccagcacctcccaacccactagtgcctggttctcttgctccaccaggaacaagccaccatgtctcgccagtcaagtgtgtccttccggagcgggggcagtcgtagcttcagcaccgcctctgccatcaccccgtctgtctcccgcaccagcttcacctccgtgtcccggtccgggggtggcggtggtggtggcttcggcagggtcagccttgcgggtgcttgtggagtgggtggctatggcagccggagcctctacaacctggggggctccaagaggatatccatcagcactagtggtggcagcttcaggaaccggtttggtgctggtgctggaggcggctatggctttggaggtggtgccggtagtggatttggtttcggcggtggagctggtggtggctttgggctcggtggcggagctggctttggaggtggcttcggtggccctggctttcctgtctgccctcctggaggtatccaagaggtcactgtcaaccagagtctcctgactcccctcaacctgcaaatcgaccccagcatccagagggtgaggaccgaggagcgcgagcagatcaagaccctcaacaataagtttgcctccttcatcgacaaggtgcggttcctggagcagcagaacaaggttctggacaccaagtggaccctgctgcaggagcagggcaccaagactgtgaggcagaacctggagccgttgttcgagcagtacatcaacaacctcaggaggcagctggacagcatcgtgggggaacggggccgcctggactcagagctgagaaacatgcaggacctggtggaagacttcaagaacaagtatgaggatgaaatcaacaagcgtaccactgctgagaatgagtttgtgatgctgaagaaggatgtagatgctgcctacatgaacaaggtggagctggaggccaaggttgatgcactgatggatgagattaacttcatgaagatgttctttgatgcggagctgtcccagatgcagacgcatgtctctgacacctcagtggtcctctccatggacaacaaccgcaacctggacctggatagcatcatcgctgaggtcaaggcccagtatgaggagattgccaaccgcagccggacagaagccgagtcctggtatcagaccaagtatgaggagctgcagcagacagctggccggcatggcgatgacctccgcaacaccaagcatgagatctctgagatgaaccggatgatccagaggctgagagccgagattgacaatgtcaagaaacagtgcgccaatctgcagaacgccattgcggatgccgagcagcgtggggagctggccctcaaggatgccaggaacaagctggccgagctggaggaggccctgcagaaggccaagcaggacatggcccggctgctgcgtgagtaccaggagctcatgaacaccaagctggccctggacgtggagatcgccacttaccgcaagctgctggagggcgaggaatgcagactcagtggagaaggagttggaccagtcaacatctctgttgtcacaagcagtgtttcctctggatatggcagtggcagtggctatggcggtggcctcggtggaggtcttggcggcggcctcggtggaggtcttgccggaggtagcagtggaagctactactccagcagcagtgggggtgtcggcctaggtggtgggctcagtgtggggggctctggcttcagtgcaagcagtggccgagggctgggggtgggctttggcagtggcgggggtagcagctccagcgtcaaatttgtctccaccacctcctcctcccggaagagcttcaagagctaagaacctgctgcaagtcactgccttccaagtgcagcaacccagcccatggagattgcctcttctaggcagttgctcaagccatgttttatccttttctggagagtagtctagaccaagccaattgcagaaccacattctttggttcccaggagagccccattcccagcccctggtctcccgtgccgcagttctatattctgcttcaaatcagccttcaggtttcccacagcatggcccctgctgacacgagaacccaaagttttcccaaatctaaatcatcaaaacagaatccccaccccaatcccaaattttgttttggttctaactacctccagaatgtgttcaataaaatgcttttataatataatcgacagctctctcgcccagcccagttctggaagggataaaaagggggcatcaccgttcctgggtaacagagccaccttctgcgtcctgctgagctctgttctctccagcacctcccaacccactagtgcctggttctcttgctccaccaggaacaagccaccatgtctcgccagtcaagtgtgtccttccggagcgggggcagtcgtagcttcagcaccgcctctgccatcaccccgtctgtctcccgcaccagcttcacctccgtgtcccggtccgggggtggcggtggtggtggcttcggcagggtcagccttgcgggtgcttgtggagtgggtggctatggcagccggagcctctacaacctggggggctccaagaggatatccatcagcactagtggtggcagcttcaggaaccggtttggtgctggtgctggaggcggctatggctttggaggtggtgccggtagtggatttggtttcggcggtggagctggtggtggctttgggctcggtggcggagctggctttggaggtggcttcggtggccctggctttcctgtctgccctcctggaggtatccaagaggtcactgtcaaccagagtctcctgactcccctcaacctgcaaatcgaccccagcatccagagggtgaggaccgaggagcgcgagcagatcaagaccctcaacaataagtttgcctccttcatcgacaaggtgcggttcctggagcagcagaacaaggttctggacaccaagtggaccctgctgcaggagcagggcaccaagactgtgaggcagaacctggagccgttgttcgagcagtacatcaacaacctcaggaggcagctggacagcatcgtgggggaacggggccgcctggactcagagctgagaaacatgcaggacctggtggaagacttcaagaacaagtatgaggatgaaatcaacaagcgtaccactgctgagaatgagtttgtgatgctgaagaaggatgtagatgctgcctacatgaacaaggtggagctggaggccaaggttgatgcactgatggatgagattaacttcatgaagatgttctttgatgcggagctgtcccagatgcagacgcatgtctctgacacctcagtggtcctctccatggacaacaaccgcaacctggacctggatagcatcatcgctgaggtcaaggcccagtatgaggagattgccaaccgcagccggacagaagccgagtcctggtatcagaccaagtatgaggagctgcagcagacagctggccggcatggcgatgacctccgcaacaccaagcatgagatctctgagatgaaccggatgatccagaggctgagagccgagattgacaatgtcaagaaacagtgcgccaatctgcagaacgccattgcggatgccgagcagcgtggggagctggccctcaaggatgccaggaacaagctggccgagctggaggaggccctgcagaaggccaagcaggacatggcccggctgctgcgtgagtaccaggagctcatgaacaccaagctggccctggacgtggagatcgccacttaccgcaagctgctggagggcgaggaatgcagactcagtggagaaggagttggaccagtcaacatctctgttgtcacaagcagtgtttcctctggatatggcagtggcagtggctatggcggtggcctcggtggaggtcttggcggcggcctcggtggaggtcttgccggaggtagcagtggaagctactactccagcagcagtgggggtgtcggcctaggtggtgggctcagtgtggggggctctggcttcagtgcaagcagtggccgagggctgggggtgggctttggcagtggcgggggtagcagctccagcgtcaaatttgtctccaccacctcctcctcccggaagagcttcaagagctaagaacctgctgcaagtcactgccttccaagtgcagcaacccagcccatggagattgcctcttctaggcagttgctcaagccatgttttatccttttctggagagtagtctagaccaagccaattgcagaaccacattctttggttcccaggagagccccattcccagcccctggtctcccgtgccgcagttctatattctgcttcaaatcagccttcaggtttcccacagcatggcccctgctgacacgagaacccaaagttttcccaaatctaaatcatcaaaacagaatccccaccccaatcccaaattttgttttggttctaactacctccagaatgtgttcaataaaatgcttttataatataatcgacagctctctcgcccagcccagttctggaagggataaaaagggggcatcaccgttcctgggtaacagagccaccttctgcgtcctgctgagctctgttctctccagcacctcccaacccactagtgcctggttctcttgctccaccaggaacaagccaccatgtctcgccagtcaagtgtgtccttccggagcgggggcagtcgtagcttcagcaccgcctctgccatcaccccgtctgtctcccgcaccagcttcacctccgtgtcccggtccgggggtggcggtggtggtggcttcggcagggtcagccttgcgggtgcttgtggagtgggtggctatggcagccggagcctctacaacctggggggctccaagaggatatccatcagcactagtggtggcagcttcaggaaccggtttggtgctggtgctggaggcggctatggctttggaggtggtgccggtagtggatttggtttcggcggtggagctggtggtggctttgggctcggtggcggagctggctttggaggtggcttcggtggccctggctttcctgtctgccctcctggaggtatccaagaggtcactgtcaaccagagtctcctgactcccctcaacctgcaaatcgaccccagcatccagagggtgaggaccgaggagcgcgagcagatcaagaccctcaacaataagtttgcctccttcatcgacaaggtgcggttcctggagcagcagaacaaggttctggacaccaagtggaccctgctgcaggagcagggcaccaagactgtgaggcagaacctggagccgttgttcgagcagtacatcaacaacctcaggaggcagctggacagcatcgtgggggaacggggccgcctggactcagagctgagaaacatgcaggacctggtggaagacttcaagaacaagtatgaggatgaaatcaacaagcgtaccactgctgagaatgagtttgtgatgctgaagaaggatgtagatgctgcctacatgaacaaggtggagctggaggccaaggttgatgcactgatggatgagattaacttcatgaagatgttctttgatgcggagctgtcccagatgcagacgcatgtctctgacacctcagtggtcctctccatggacaacaaccgcaacctggacctggatagcatcatcgctgaggtcaaggcccagtatgaggagattgccaaccgcagccggacagaagccgagtcctggtatcagaccaagtatgaggagctgcagcagacagctggccggcatggcgatgacctccgcaacaccaagcatgagatctctgagatgaaccggatgatccagaggctgagagccgagattgacaatgtcaagaaacagtgcgccaatctgcagaacgccattgcggatgccgagcagcgtggggagctggccctcaaggatgccaggaacaagctggccgagctggaggaggccctgcagaaggccaagcaggacatggcccggctgctgcgtgagtaccaggagctcatgaacaccaagctggccctggacgtggagatcgccacttaccgcaagctgctggagggcgaggaatgcagactcagtggagaaggagttggaccagtcaacatctctgttgtcacaagcagtgtttcctctggatatggcagtggcagtggctatggcggtggcctcggtggaggtcttggcggcggcctcggtggaggtcttgccggaggtagcagtggaagctactactccagcagcagtgggggtgtcggcctaggtggtgggctcagtgtggggggctctggcttcagtgcaagcagtggccgagggctgggggtgggctttggcagtggcgggggtagcagctccagcgtcaaatttgtctccaccacctcctcctcccggaagagcttcaagagctaagaacctgctgcaagtcactgccttccaagtgcagcaacccagcccatggagattgcctcttctaggcagttgctcaagccatgttttatccttttctggagagtagtctagaccaagccaattgcagaaccacattctttggttcccaggagagccccattcccagcccctggtctcccgtgccgcagttctatattctgcttcaaatcagccttcaggtttcccacagcatggcccctgctgacacgagaacccaaagttttcccaaatctaaatcatcaaaacagaatccccaccccaatcccaaattttgttttggttctaactacctccagaatgtgttcaataaaatgcttttataatataatcgacagctctctcgcccagcccagttctggaagggataaaaagggggcatcaccgttcctgggtaacagagccaccttctgcgtcctgctgagctctgttctctccagcacctcccaacccactagtgcctggttctcttgctccaccaggaacaagccaccatgtctcgccagtcaagtgtgtccttccggagcgggggcagtcgtagcttcagcaccgcctctgccatcaccccgtctgtctcccgcaccagcttcacctccgtgtcccggtccgggggtggcggtggtggtggcttcggcagggtcagccttgcgggtgcttgtggagtgggtggctatggcagccggagcctctacaacctggggggctccaagaggatatccatcagcactagtggtggcagcttcaggaaccggtttggtgctggtgctggaggcggctatggctttggaggtggtgccggtagtggatttggtttcggcggtggagctggtggtggctttgggctcggtggcggagctggctttggaggtggcttcggtggccctggctttcctgtctgccctcctggaggtatccaagaggtcactgtcaaccagagtctcctgactcccctcaacctgcaaatcgaccccagcatccagagggtgaggaccgaggagcgcgagcagatcaagaccctcaacaataagtttgcctccttcatcgacaaggtgcggttcctggagcagcagaacaaggttctggacaccaagtggaccctgctgcaggagcagggcaccaagactgtgaggcagaacctggagccgttgttcgagcagtacatcaacaacctcaggaggcagctggacagcatcgtgggggaacggggccgcctggactcagagctgagaaacatgcaggacctggtggaagacttcaagaacaagtatgaggatgaaatcaacaagcgtaccactgctgagaatgagtttgtgatgctgaagaaggatgtagatgctgcctacatgaacaaggtggagctggaggccaaggttgatgcactgatggatgagattaacttcatgaagatgttctttgatgcggagctgtcccagatgcagacgcatgtctctgacacctcagtggtcctctccatggacaacaaccgcaacctggacctggatagcatcatcgctgaggtcaaggcccagtatgaggagattgccaac

SEQ ID NO: 628 - DNA, 32765 bp, Homo sapiens
  misc_feature (114)..(114): second gene starts at position 114
atgcgtccaatgcgaatttttgtgaatgatgaccgccatgtgatggcaaagcattcttccgtttatccaacacaagaggagctggaggcagtccagaacatggtgtcccacacggagcgggcgctcaaagctgtgtccgactggatagacgagcaggaaaagggtagcagcgagcaggcagagtccgataacatggatgtgcccccagaggacgacagtaaagaaggggctggggaacagaagacggagcacatgaccagaaccctgcggggagtgatgcgggtgggcctggtggcaaagggcctcctactcaagggggacttggatctggagctggtgctgctgtgtaaggagaagcccacaaccgccctcctggacaaggtggccgacaacctggccatccagcttgctgctgtaacagaagacaagtacgaaatactgcaatctgtcgacgatgctgcgattgtgataaaaaacacaaaagagcctccattgtccctgaccatccacctgacatcccctgttgtcagagaagaaatggagaaagtattagctggagaaacgctatcagtcaacgaccccccggacgttctggacaggcagaaatgccttgctgccttggcgtccctccgacacgccaagtggttccaggccagagccaacgggctgaagtcttgtgtcattgtgatccgggtcttgagggacctgtgcactcgcgtgcccacctggggtcccctccgaggctggcctctcgagctcctgtgtgagaaatccattggcacggccaacagaccgatgggtgctggcgaggccctgcggagagtgctggagtgcctggcgtcgggcatcgtgatgccagatggttctggcatttatgacccttgtgaaaaagaagccactgatgctattgggcatctagacagacagcaacgggaagatatcacacagagtgcgcagcacgcactgcggctcgctgccttcggccagctccataaagtcctaggcatggaccctctgccttccaagatgcccaagaaaccaaagaatgaaaacccagtggactacaccgttcagatcccaccaagcaccacctatgccattacgcccatgaaacgcccaatggaggaggacggggaggagaagtcgcccagcaaaaagaagaagaagattcagaagaaagaggagaaggcagagcccccccaggctatgaatgccctgatgcggttgaaccagctgaagccagggctgcagtacaagctggtgtcccagactgggcccgtccatgcccccatctttaccatgtctgtggaggttgatggcaattcattcgaggcctctgggccctccaaaaagacggccaagctgcacgtggccgttaaggtgttacaggacatgggcttgccgacgggtgctgaaggcagggactcgagcaagggggaggactcggctgaggagaccgaggcgaagccagcagtggtggcccctgccccagtggtagaagctgtctccacccctagtgcggcctttccctcagatgccactgccgagaacgtaaaacagcaggggccgatcctgacaaagcacggcaagaacccagtcatggagctgaacgagaagaggcgtgggctcaagtacgagctcatctccgagaccgggggcagccacgacaagcgcttcgtcatggaggtcgaagtggatggacagaagttccaaggtgctggttccaacaaaaaggtggcgaaggcctacgctgctcttgctgccctagaaaagcttttccctgacacccctctcgcccttgatgccaacaaaaagaagagagccccagtacccgtcagagggggaccgaaatttgctgctaagccacataaccctggcttcggcatgggaggccccatgcacaacgaagtgcccccaccccccaaccttcgagggcggggaagaggcgggagcatccggggacgagggcgcgggcgaggatttggtggcgccaaccatggaggctacatgaatgccggtgctgggtatggaagctatgggtacggaggcaactcggcgacagcaggctacagtcagttctacagcaacggagggcattctgggaatgccagtggagctggtggtggctttgggctcggtggcggagctggctttggaggtggcttcggtggccctggctttcctgtctgccctcctggaggtatccaagaggtcactgtcaaccagagtctcctgactcccctcaacctgcaaatcgaccccagcatccagagggtgaggaccgaggagcgcgagcagatcaagaccctcaacaataagtttgcctccttcatcgacaaggtgcggttcctggagcagcagaacaaggttctggacaccaagtggaccctgctgcaggagcagggcaccaagactgtgaggcagaacctggagccgttgttcgagcagtacatcaacaacctcaggaggcagctggacagcatcgtgggggaacggggccgcctggactcagagctgagaaacatgcaggacctggtggaagacttcaagaacaagtatgaggatgaaatcaacaagcgtaccactgctgagaatgagtttgtgatgctgaagaaggatgtagatgctgcctacatgaacaaggtggagctggaggccaaggttgatgcactgatggatgagattaacttcatgaagatgttctttgatgcggagctgtcccagatgcagacgcatgtctctgacacctcagtggtcctctccatggacaacaaccgcaacctggacctggatagcatcatcgctgaggtcaaggcccagtatgaggagattgccaaccgcagccggacagaagccgagtcctggtatcagaccaagtatgaggagctgcagcagacagctggccggcatggcgatgacctccgcaacaccaagcatgagatctctgagatgaaccggatgatccagaggctgagagccgagattgacaatgtcaagaaacagtgcgccaatctgcagaacgccattgcggatgccgagcagcgtggggagctggccctcaaggatgccaggaacaagctggccgagctggaggaggccctgcagaaggccaagcaggacatggcccggctgctgcgtgagtaccaggagctcatgaacaccaagctggccctggacgtggagatcgccacttaccgcaagctgctggagggcgaggaatgcagactcagtggagaaggagttggaccagtcaacatctctgttgtcacaagcagtgtttcctctggatatggcagtggcagtggctatggcggtggcctcggtggaggtcttggcggcggcctcggtggaggtcttgccggaggtagcagtggaagctactactccagcagcagtgggggtgtcggcctaggtggtgggctcagtgtggggggctctggcttcagtgcaagcagtggccgagggctgggggtgggctttggcagtggcgggggtagcagctccagcgtcaaatttgtctccaccacctcctcctcccggaagagcttcaagagctaagaacctgctgcaagtcactgccttccaagtgcagcaacccagcccatggagattgcctcttctaggcagttgctcaagccatgttttatccttttctggagagtagtctagaccaagccaattgcagaaccacattctttggttcccaggagagccccattcccagcccctggtctcccgtgccgcagttctatattctgcttcaaatcagccttcaggtttcccacagcatggcccctgctgacacgagaacccaaagttttcccaaatctaaatcatcaaaacagaatccccaccccaatcccaaattttgttttggttctaactacctccagaatgtgttcaataaaatgcttttataatataatcgacagctctctcgcccagcccagttctggaagggataaaaagggggcatcaccgttcctgggtaacagagccaccttctgcgtcctgctgagctctgttctctccagcacctcccaacccactagtgcctggttctcttgctccaccaggaacaagccaccatgtctcgccagtcaagtgtgtccttccggagcgggggcagtcgtagcttcagcaccgcctctgccatcaccccgtctgtctcccgcaccagcttcacctccgtgtcccggtccgggggtggcggtggtggtggcttcggcagggtcagccttgcgggtgcttgtggagtgggtggctatggcagccggagcctctacaacctggggggctccaagaggatatccatcagcactagtggtggcagcttcaggaaccggtttggtgctggtgctggaggcggctatggctttggaggtggtgccggtagtggatttggtttcggcggtggagctggtggtggctttgggctcggtggcggagctggctttggaggtggcttcggtggccctggctttcctgtctgccctcctggaggtatccaagaggtcactgtcaaccagagtctcctgactcccctcaacctgcaaatcgaccccagcatccagagggtgaggaccgaggagcgcgagcagatcaagaccctcaacaataagtttgcctccttcatcgacaaggtgcggttcctggagcagcagaacaaggttctggacaccaagtggaccctgctgcaggagcagggcaccaagactgtgaggcagaacctggagccgttgttcgagcagtacatcaacaacctcaggaggcagctggacagcatcgtgggggaacggggccgcctggactcagagctgagaaacatgcaggacctggtggaagacttcaagaacaagtatgaggatgaaatcaacaagcgtaccactgctgagaatgagtttgtgatgctgaagaaggatgtagatgctgcctacatgaacaaggtggagctggaggccaaggttgatgcactgatggatgagattaacttcatgaagatgttctttgatgcggagctgtcccagatgcagacgcatgtctctgacacctcagtggtcctctccatggacaacaaccgcaacctggacctggatagcatcatcgctgaggtcaaggcccagtatgaggagattgccaaccgcagccggacagaagccgagtcctggtatcagaccaagtatgaggagctgcagcagacagctggccggcatggcgatgacctccgcaacaccaagcatgagatctctgagatgaaccggatgatccagaggctgagagccgagattgacaatgtcaagaaacagtgcgccaatctgcagaacgccattgcggatgccgagcagcgtggggagctggccctcaaggatgccaggaacaagctggccgagctggaggaggccctgcagaaggccaagcaggacatggcccggctgctgcgtgagtaccaggagctcatgaacaccaagctggccctggacgtggagatcgccacttaccgcaagctgctggagggcgaggaatgcagactcagtggagaaggagttggaccagtcaacatctctgttgtcacaagcagtgtttcctctggatatggcagtggcagtggctatggcggtggcctcggtggaggtcttggcggcggcctcggtggaggtcttgccggaggtagcagtggaagctactactccagcagcagtgggggtgtcggcctaggtggtgggctcagtgtggggggctctggcttcagtgcaagcagtggccgagggctgggggtgggctttggcagtggcgggggtagcagctccagcgtcaaatttgtctccaccacctcctcctcccggaagagcttcaagagctaagaacctgctgcaagtcactgccttccaagtgcagcaacccagcccatggagattgcctcttctaggcagttgctcaagccatgttttatccttttctggagagtagtctagaccaagccaattgcagaaccacattctttggttcccaggagagccccattcccagcccctggtctcccgtgccgcagttctatattctgcttcaaatcagccttcaggtttcccacagcatggcccctgctgacacgagaacccaaagttttcccaaatctaaatcatcaaaacagaatccccaccccaatcccaaattttgttttggttctaactacctccagaatgtgttcaataaaatgcttttataatataatcgacagctctctcgcccagcccagttctggaagggataaaaagggggcatcaccgttcctgggtaacagagccaccttctgcgtcctgctgagctctgttctctccagcacctcccaacccactagtgcctggttctcttgctccaccaggaacaagccaccatgtctcgccagtcaagtgtgtccttccggagcgggggcagtcgtagcttcagcaccgcctctgccatcaccccgtctgtctcccgcaccagcttcacctccgtgtcccggtccgggggtggcggtggtggtggcttcggcagggtcagccttgcgggtgcttgtggagtgggtggctatggcagccggagcctctacaacctggggggctccaagaggatatccatcagcactagtggtggcagcttcaggaaccggtttggtgctggtgctggaggcggctatggctttggaggtggtgccggtagtggatttggtttcggcggtggagctggtggtggctttgggctcggtggcggagctggctttggaggtggcttcggtggccctggctttcctgtctgccctcctggaggtatccaagaggtcactgtcaaccagagtctcctgactcccctcaacctgcaaatcgaccccagcatccagagggtgaggaccgaggagcgcgagcagatcaagaccctcaacaataagtttgcctccttcatcgacaaggtgcggttcctggagcagcagaacaaggttctggacaccaagtggaccctgctgcaggagcagggcaccaagactgtgaggcagaacctggagccgttgttcgagcagtacatcaacaacctcaggaggcagctggacagcatcgtgggggaacggggccgcctggactcagagctgagaaacatgcaggacctggtggaagacttcaagaacaagtatgaggatgaaatcaacaagcgtaccactgctgagaatgagtttgtgatgctgaagaaggatgtagatgctgcctacatgaacaaggtggagctggaggccaaggttgatgcactgatggatgagattaacttcatgaagatgttctttgatgcggagctgtcccagatgcagacgcatgtctctgacacctcagtggtcctctccatggacaacaaccgcaacctggacctggatagcatcatcgctgaggtcaaggcccagtatgaggagattgccaaccgcagccggacagaagccgagtcctggtatcagaccaagtatgaggagctgcagcagacagctggccggcatggcgatgacctccgcaacaccaagcatgagatctctgagatgaaccggatgatccagaggctgagagccgagattgacaatgtcaagaaacagtgcgccaatctgcagaacgccattgcggatgccgagcagcgtggggagctggccctcaaggatgccaggaacaagctggccgagctggaggaggccctgcagaaggccaagcaggacatggcccggctgctgcgtgagtaccaggagctcatgaacaccaagctggccctggacgtggagatcgccacttaccgcaagctgctggagggcgaggaatgcagactcagtggagaaggagttggaccagtcaacatctctgttgtcacaagcagtgtttcctctggatatggcagtggcagtggctatggcggtggcctcggtggaggtcttggcggcggcctcggtggaggtcttgccggaggtagcagtggaagctactactccagcagcagtgggggtgtcggcctaggtggtgggctcagtgtggggggctctggcttcagtgcaagcagtggccgagggctgggggtgggctttggcagtggcgggggtagcagctccagcgtcaaatttgtctccaccacctcctcctcccggaagagcttcaagagctaagaacctgctgcaagtcactgccttccaagtgcagcaacccagcccatggagattgcctcttctaggcagttgctcaagccatgttttatccttttctggagagtagtctagaccaagccaattgcagaaccacattctttggttcccaggagagccccattcccagcccctggtctcccgtgccgcagttctatattctgcttcaaatcagccttcaggtttcccacagcatggcccctgctgacacgagaacccaaagttttcccaaatctaaatcatcaaaacagaatccccaccccaatcccaaattttgttttggttctaactacctccagaatgtgttcaataaaatgcttttataatataatcgacagctctctcgcccagcccagttctggaagggataaaaagggggcatcaccgttcctgggtaacagagccaccttctgcgtcctgctgagctctgttctctccagcacctcccaacccactagtgcctggttctcttgctccaccaggaacaagccaccatgtctcgccagtcaagtgtgtccttccggagcgggggcagtcgtagcttcagcaccgcctctgccatcaccccgtctgtctcccgcaccagcttcacctccgtgtcccggtccgggggtggcggtggtggtggcttcggcagggtcagccttgcgggtgcttgtggagtgggtggctatggcagccggagcctctacaacctggggggctccaagaggatatccatcagcactagtggtggcagcttcaggaaccggtttggtgctggtgctggaggcggctatggctttggaggtggtgccggtagtggatttggtttcggcggtggagctggtggtggctttgggctcggtggcggagctggctttggaggtggcttcggtggccctggctttcctgtctgccctcctggaggtatccaagaggtcactgtcaaccagagtctcctgactcccctcaacctgcaaatcgaccccagcatccagagggtgaggaccgaggagcgcgagcagatcaagaccctcaacaataagtttgcctccttcatcgacaaggtgcggttcctggagcagcagaacaaggttctggacaccaagtggaccctgctgcaggagcagggcaccaagactgtgaggcagaacctggagccgttgttcgagcagtacatcaacaacctcaggaggcagctggacagcatcgtgggggaacggggccgcctggactcagagctgagaaacatgcaggacctggtggaagacttcaagaacaagtatgaggatgaaatcaacaagcgtaccactgctgagaatgagtttgtgatgctgaagaaggatgtagatgctgcctacatgaacaaggtggagctggaggccaaggttgatgcactgatggatgagattaacttcatgaagatgttctttgatgcggagctgtcccagatgcagacgcatgtctctgacacctcagtggtcctctccatggacaacaaccgcaacctggacctggatagcatcatcgctgaggtcaaggcccagtatgaggagattgccaaccgcagccggacagaagccgagtcctggtatcagaccaagtatgaggagctgcagcagacagctggccggcatggcgatgacctccgcaacaccaagcatgagatctctgagatgaaccggatgatccagaggctgagagccgagattgacaatgtcaagaaacagtgcgccaatctgcagaacgccattgcggatgccgagcagcgtggggagctggccctcaaggatgccaggaacaagctggccgagctggaggaggccctgcagaaggccaagcaggacatggcccggctgctgcgtgagtaccaggagctcatgaacaccaagctggccctggacgtggagatcgccacttaccgcaagctgctggagggcgaggaatgcagactcagtggagaaggagttggaccagtcaacatctctgttgtcacaagcagtgtttcctctggatatggcagtggcagtggctatggcggtggcctcggtggaggtcttggcggcggcctcggtggaggtcttgccggaggtagcagtggaagctactactccagcagcagtgggggtgtcggcctaggtggtgggctcagtgtggggggctctggcttcagtgcaagcagtggccgagggctgggggtgggctttggcagtggcgggggtagcagctccagcgtcaaatttgtctccaccacctcctcctcccggaagagcttcaagagctaagaacctgctgcaagtcactgccttccaagtgcagcaacccagcccatggagattgcctcttctaggcagttgctcaagccatgttttatccttttctggagagtagtctagaccaagccaattgcagaaccacattctttggttcccaggagagccccattcccagcccctggtctcccgtgccgcagttctatattctgcttcaaatcagccttcaggtttcccacagcatggcccctgctgacacgagaacccaaagttttcccaaatctaaatcatcaaaacagaatccccaccccaatcccaaattttgttttggttctaactacctccagaatgtgttcaataaaatgcttttataatataatcgacagctctctcgcccagcccagttctggaagggataaaaagggggcatcaccgttcctgggtaacagagccaccttctgcgtcctgctgagctctgttctctccagcacctcccaacccactagtgcctggttctcttgctccaccaggaacaagccaccatgtctcgccagtcaagtgtgtccttccggagcgggggcagtcgtagcttcagcaccgcctctgccatcaccccgtctgtctcccgcaccagcttcacctccgtgtcccggtccgggggtggcggtggtggtggcttcggcagggtcagccttgcgggtgcttgtggagtgggtggctatggcagccggagcctctacaacctggggggctccaagaggatatccatcagcactagtggtggcagcttcaggaaccggtttggtgctggtgctggaggcggctatggctttggaggtggtgccggtagtggatttggtttcggcggtggagctggtggtggctttgggctcggtggcggagctggctttggaggtggcttcggtggccctggctttcctgtctgccctcctggaggtatccaagaggtcactgtcaaccagagtctcctgactcccctcaacctgcaaatcgaccccagcatccagagggtgaggaccgaggagcgcgagcagatcaagaccctcaacaataagtttgcctccttcatcgacaaggtgcggttcctggagcagcagaacaaggttctggacaccaagtggaccctgctgcaggagcagggcaccaagactgtgaggcagaacctggagccgttgttcgagcagtacatcaacaacctcaggaggcagctggacagcatcgtgggggaacggggccgcctggactcagagctgagaaacatgcaggacctggtggaagacttcaagaacaagtatgaggatgaaatcaacaagcgtaccactgctgagaatgagtttgtgatgctgaagaaggatgtagatgctgcctacatgaacaaggtggagctggaggccaaggttgatgcactgatggatgagattaacttcatgaagatgttctttgatgcggagctgtcccagatgcagacgcatgtctctgacacctcagtggtcctctccatggacaacaaccgcaacctggacctggatagcatcatcgctgaggtcaaggcccagtatgaggagattgccaaccgcagccggacagaagccgagtcctggtatcagaccaagtatgaggagctgcagcagacagctggccggcatggcgatgacctccgcaacaccaagcatgagatctctgagatgaaccggatgatccagaggctgagagccgagattgacaatgtcaagaaacagtgcgccaatctgcagaacgccattgcggatgccgagcagcgtggggagctggccctcaaggatgccaggaacaagctggccgagctggaggaggccctgcagaaggccaagcaggacatggcccggctgctgcgtgagtaccaggagctcatgaacaccaagctggccctggacgtggagatcgccacttaccgcaagctgctggagggcgaggaatgcagactcagtggagaaggagttggaccagtcaacatctctgttgtcacaagcagtgtttcctctggatatggcagtggcagtggctatggcggtggcctcggtggaggtcttggcggcggcctcggtggaggtcttgccggaggtagcagtggaagctactactccagcagcagtgggggtgtcggcctaggtggtgggctcagtgtggggggctctggcttcagtgcaagcagtggccgagggctgggggtgggctttggcagtggcgggggtagcagctccagcgtcaaatttgtctccaccacctcctcctcccggaagagcttcaagagctaagaacctgctgcaagtcactgccttccaagtgcagcaacccagcccatggagattgcctcttctaggcagttgctcaagccatgttttatccttttctggagagtagtctagaccaagccaattgcagaaccacattctttggttcccaggagagccccattcccagcccctggtctcccgtgccgcagttctatattctgcttcaaatcagccttcaggtttcccacagcatggcccctgctgacacgagaacccaaagttttcccaaatctaaatcatcaaaacagaatccccaccccaatcccaaattttgttttggttctaactacctccagaatgtgttcaataaaatgcttttataatataatcgacagctctctcgcccagcccagttctggaagggataaaaagggggcatcaccgttcctgggtaacagagccaccttctgcgtcctgctgagctctgttctctccagcacctcccaacccactagtgcctggttctcttgctccaccaggaacaagccaccatgtctcgccagtcaagtgtgtccttccggagcgggggcagtcgtagcttcagcaccgcctctgccatcaccccgtctgtctcccgcaccagcttcacctccgtgtcccggtccgggggtggcggtggtggtggcttcggcagggtcagccttgcgggtgcttgtggagtgggtggctatggcagccggagcctctacaacctggggggctccaagaggatatccatcagcactagtggtggcagcttcaggaaccggtttggtgctggtgctggaggcggctatggctttggaggtggtgccggtagtggatttggtttcggcggtggagctggtggtggctttgggctcggtggcggagctggctttggaggtggcttcggtggccctggctttcctgtctgccctcctggaggtatccaagaggtcactgtcaaccagagtctcctgactcccctcaacctgcaaatcgaccccagcatccagagggtgaggaccgaggagcgcgagcagatcaagaccctcaacaataagtttgcctccttcatcgacaaggtgcggttcctggagcagcagaacaaggttctggacaccaagtggaccctgctgcaggagcagggcaccaagactgtgaggcagaacctggagccgttgttcgagcagtacatcaacaacctcaggaggcagctggacagcatcgtgggggaacggggccgcctggactcagagctgagaaacatgcaggacctggtggaagacttcaagaacaagtatgaggatgaaatcaacaagcgtaccactgctgagaatgagtttgtgatgctgaagaaggatgtagatgctgcctacatgaacaaggtggagctggaggccaaggttgatgcactgatggatgagattaacttcatgaagatgttctttgatgcggagctgtcccagatgcagacgcatgtctctgacacctcagtggtcctctccatggacaacaaccgcaacctggacctggatagcatcatcgctgaggtcaaggcccagtatgaggagattgccaaccgcagccggacagaagccgagtcctggtatcagaccaagtatgaggagctgcagcagacagctggccggcatggcgatgacctccgcaacaccaagcatgagatctctgagatgaaccggatgatccagaggctgagagccgagattgacaatgtcaagaaacagtgcgccaatctgcagaacgccattgcggatgccgagcagcgtggggagctggccctcaaggatgccaggaacaagctggccgagctggaggaggccctgcagaaggccaagcaggacatggcccggctgctgcgtgagtaccaggagctcatgaacaccaagctggccctggacgtggagatcgccacttaccgcaagctgctggagggcgaggaatgcagactcagtggagaaggagttggaccagtcaacatctctgttgtcacaagcagtgtttcctctggatatggcagtggcagtggctatggcggtggcctcggtggaggtcttggcggcggcctcggtggaggtcttgccggaggtagcagtggaagctactactccagcagcagtgggggtgtcggcctaggtggtgggctcagtgtggggggctctggcttcagtgcaagcagtggccgagggctgggggtgggctttggcagtggcgggggtagcagctccagcgtcaaatttgtctccaccacctcctcctcccggaagagcttcaagagctaagaacctgctgcaagtcactgccttccaagtgcagcaacccagcccatggagattgcctcttctaggcagttgctcaagccatgttttatccttttctggagagtagtctagaccaagccaattgcagaaccacattctttggttcccaggagagccccattcccagcccctggtctcccgtgccgcagttctatattctgcttcaaatcagccttcaggtttcccacagcatggcccctgctgacacgagaacccaaagttttcccaaatctaaatcatcaaaacagaatccccaccccaatcccaaattttgttttggttctaactacctccagaatgtgttcaataaaatgcttttataatataatcgacagctctctcgcccagcccagttctggaagggataaaaagggggcatcaccgttcctgggtaacagagccaccttctgcgtcctgctgagctctgttctctccagcacctcccaacccactagtgcctggttctcttgctccaccaggaacaagccaccatgtctcgccagtcaagtgtgtccttccggagcgggggcagtcgtagcttcagcaccgcctctgccatcaccccgtctgtctcccgcaccagcttcacctccgtgtcccggtccgggggtggcggtggtggtggcttcggcagggtcagccttgcgggtgcttgtggagtgggtggctatggcagccggagcctctacaacctggggggctccaagaggatatccatcagcactagtggtggcagcttcaggaaccggtttggtgctggtgctggaggcggctatggctttggaggtggtgccggtagtggatttggtttcggcggtggagctggtggtggctttgggctcggtggcggagctggctttggaggtggcttcggtggccctggctttcctgtctgccctcctggaggtatccaagaggtcactgtcaaccagagtctcctgactcccctcaacctgcaaatcgaccccagcatccagagggtgaggaccgaggagcgcgagcagatcaagaccctcaacaataagtttgcctccttcatcgacaaggtgcggttcctggagcagcagaacaaggttctggacaccaagtggaccctgctgcaggagcagggcaccaagactgtgaggcagaacctggagccgttgttcgagcagtacatcaacaacctcaggaggcagctggacagcatcgtgggggaacggggccgcctggactcagagctgagaaacatgcaggacctggtggaagacttcaagaacaagtatgaggatgaaatcaacaagcgtaccactgctgagaatgagtttgtgatgctgaagaaggatgtagatgctgcctacatgaacaaggtggagctggaggccaaggttgatgcactgatggatgagattaacttcatgaagatgttctttgatgcggagctgtcccagatgcagacgcatgtctctgacacctcagtggtcctctccatggacaacaaccgcaacctggacctggatagcatcatcgctgaggtcaaggcccagtatgaggagattgccaaccgcagccggacagaagccgagtcctggtatcagaccaagtatgaggagctgcagcagacagctggccggcatggcgatgacctccgcaacaccaagcatgagatctctgagatgaaccggatgatccagaggctgagagccgagattgacaatgtcaagaaacagtgcgccaatctgcagaacgccattgcggatgccgagcagcgtggggagctggccctcaaggatgccaggaacaagctggccgagctggaggaggccctgcagaaggccaagcaggacatggcccggctgctgcgtgagtaccaggagctcatgaacaccaagctggccctggacgtggagatcgccacttaccgcaagctgctggagggcgaggaatgcagactcagtggagaaggagttggaccagtcaacatctctgttgtcacaagcagtgtttcctctggatatggcagtggcagtggctatggcggtggcctcggtggaggtcttggcggcggcctcggtggaggtcttgccggaggtagcagtggaagctactactccagcagcagtgggggtgtcggcctaggtggtgggctcagtgtggggggctctggcttcagtgcaagcagtggccgagggctgggggtgggctttggcagtggcgggggtagcagctccagcgtcaaatttgtctccaccacctcctcctcccggaagagcttcaagagctaagaacctgctgcaagtcactgccttccaagtgcagcaacccagcccatggagattgcctcttctaggcagttgctcaagccatgttttatccttttctggagagtagtctagaccaagccaattgcagaaccacattctttggttcccaggagagccccattcccagcccctggtctcccgtgccgcagttctatattctgcttcaaatcagccttcaggtttcccacagcatggcccctgctgacacgagaacccaaagttttcccaaatctaaatcatcaaaacagaatccccaccccaatcccaaattttgttttggttctaactacctccagaatgtgttcaataaaatgcttttataatataatcgacagctctctcgcccagcccagttctggaagggataaaaagggggcatcaccgttcctgggtaacagagccaccttctgcgtcctgctgagctctgttctctccagcacctcccaacccactagtgcctggttctcttgctccaccaggaacaagccaccatgtctcgccagtcaagtgtgtccttccggagcgggggcagtcgtagcttcagcaccgcctctgccatcaccccgtctgtctcccgcaccagcttcacctccgtgtcccggtccgggggtggcggtggtggtggcttcggcagggtcagccttgcgggtgcttgtggagtgggtggctatggcagccggagcctctacaacctggggggctccaagaggatatccatcagcactagtggtggcagcttcaggaaccggtttggtgctggtgctggaggcggctatggctttggaggtggtgccggtagtggatttggtttcggcggtggagctggtggtggctttgggctcggtggcggagctggctttggaggtggcttcggtggccctggctttcctgtctgccctcctggaggtatccaagaggtcactgtcaaccagagtctcctgactcccctcaacctgcaaatcgaccccagcatccagagggtgaggaccgaggagcgcgagcagatcaagaccctcaacaataagtttgcctccttcatcgacaaggtgcggttcctggagcagcagaacaaggttctggacaccaagtggaccctgctgcaggagcagggcaccaagactgtgaggcagaacctggagccgttgttcgagcagtacatcaacaacctcaggaggcagctggacagcatcgtgggggaacggggccgcctggactcagagctgagaaacatgcaggacctggtggaagacttcaagaacaagtatgaggatgaaatcaacaagcgtaccactgctgagaatgagtttgtgatgctgaagaaggatgtagatgctgcctacatgaacaaggtggagctggaggccaaggttgatgcactgatggatgagattaacttcatgaagatgttctttgatgcggagctgtcccagatgcagacgcatgtctctgacacctcagtggtcctctccatggacaacaaccgcaacctggacctggatagcatcatcgctgaggtcaaggcccagtatgaggagattgccaaccgcagccggacagaagccgagtcctggtatcagaccaagtatgaggagctgcagcagacagctggccggcatggcgatgacctccgcaacaccaagcatgagatctctgagatgaaccggatgatccagaggctgagagccgagattgacaatgtcaagaaacagtgcgccaatctgcagaacgccattgcggatgccgagcagcgtggggagctggccctcaaggatgccaggaacaagctggccgagctggaggaggccctgcagaaggccaagcaggacatggcccggctgctgcgtgagtaccaggagctcatgaacaccaagctggccctggacgtggagatcgccacttaccgcaagctgctggagggcgaggaatgcagactcagtggagaaggagttggaccagtcaacatctctgttgtcacaagcagtgtttcctctggatatggcagtggcagtggctatggcggtggcctcggtggaggtcttggcggcggcctcggtggaggtcttgccggaggtagcagtggaagctactactccagcagcagtgggggtgtcggcctaggtggtgggctcagtgtggggggctctggcttcagtgcaagcagtggccgagggctgggggtgggctttggcagtggcgggggtagcagctccagcgtcaaatttgtctccaccacctcctcctcccggaagagcttcaagagctaagaacctgctgcaagtcactgccttccaagtgcagcaacccagcccatggagattgcctcttctaggcagttgctcaagccatgttttatccttttctggagagtagtctagaccaagccaattgcagaaccacattctttggttcccaggagagccccattcccagcccctggtctcccgtgccgcagttctatattctgcttcaaatcagccttcaggtttcccacagcatggcccctgctgacacgagaacccaaagttttcccaaatctaaatcatcaaaacagaatccccaccccaatcccaaattttgttttggttctaactacctccagaatgtgttcaataaaatgcttttataatataatcgacagctctctcgcccagcccagttctggaagggataaaaagggggcatcaccgttcctgggtaacagagccaccttctgcgtcctgctgagctctgttctctccagcacctcccaacccactagtgcctggttctcttgctccaccaggaacaagccaccatgtctcgccagtcaagtgtgtccttccggagcgggggcagtcgtagcttcagcaccgcctctgccatcaccccgtctgtctcccgcaccagcttcacctccgtgtcccggtccgggggtggcggtggtggtggcttcggcagggtcagccttgcgggtgcttgtggagtgggtggctatggcagccggagcctctacaacctggggggctccaagaggatatccatcagcactagtggtggcagcttcaggaaccggtttggtgctggtgctggaggcggctatggctttggaggtggtgccggtagtggatttggtttcggcggtggagctggtggtggctttgggctcggtggcggagctggctttggaggtggcttcggtggccctggctttcctgtctgccctcctggaggtatccaagaggtcactgtcaaccagagtctcctgactcccctcaacctgcaaatcgaccccagcatccagagggtgaggaccgaggagcgcgagcagatcaagaccctcaacaataagtttgcctccttcatcgacaaggtgcggttcctggagcagcagaacaaggttctggacaccaagtggaccctgctgcaggagcagggcaccaagactgtgaggcagaacctggagccgttgttcgagcagtacatcaacaacctcaggaggcagctggacagcatcgtgggggaacggggccgcctggactcagagctgagaaacatgcaggacctggtggaagacttcaagaacaagtatgaggatgaaatcaacaagcgtaccactgctgagaatgagtttgtgatgctgaagaaggatgtagatgctgcctacatgaacaaggtggagctggaggccaaggttgatgcactgatggatgagattaacttcatgaagatgttctttgatgcggagctgtcccagatgcagacgcatgtctctgacacctcagtggtcctctccatggacaacaaccgcaacctggacctggatagcatcatcgctgaggtcaaggcccagtatgaggagattgccaaccgcagccggacagaagccgagtcctggtatcagaccaagtatgaggagctgcagcagacagctggccggcatggcgatgacctccgcaacaccaagcatgagatctctgagatgaaccggatgatccagaggctgagagccgagattgacaatgtcaagaaacagtgcgccaatctgcagaacgccattgcggatgccgagcagcgtggggagctggccctcaaggatgccaggaacaagctggccgagctggaggaggccctgcagaaggccaagcaggacatggcccggctgctgcgtgagtaccaggagctcatgaacaccaagctggccctggacgtggagatcgccacttaccgcaagctgctggagggcgaggaatgcagactcagtggagaaggagttggaccagtcaacatctctgttgtcacaagcagtgtttcctctggatatggcagtggcagtggctatggcggtggcctcggtggaggtcttggcggcggcctcggtggaggtcttgccggaggtagcagtggaagctactactccagcagcagtgggggtgtcggcctaggtggtgggctcagtgtggggggctctggcttcagtgcaagcagtggccgagggctgggggtgggctttggcagtggcgggggtagcagctccagcgtcaaatttgtctccaccacctcctcctcccggaagagcttcaagagctaagaacctgctgcaagtcactgccttccaagtgcagcaacccagcccatggagattgcctcttctaggcagttgctcaagccatgttttatccttttctggagagtagtctagaccaagccaattgcagaaccacattctttggttcccaggagagccccattcccagcccctggtctcccgtgccgcagttctatattctgcttcaaatcagccttcaggtttcccacagcatggcccctgctgacacgagaacccaaagttttcccaaatctaaatcatcaaaacagaatccccaccccaatcccaaattttgttttggttctaactacctccagaatgtgttcaataaaatgcttttataatataatcgacagctctctcgcccagcccagttctggaagggataaaaagggggcatcaccgttcctgggtaacagagccaccttctgcgtcctgctgagctctgttctctccagcacctcccaacccactagtgcctggttctcttgctccaccaggaacaagccaccatgtctcgccagtcaagtgtgtccttccggagcgggggcagtcgtagcttcagcaccgcctctgccatcaccccgtctgtctcccgcaccagcttcacctccgtgtcccggtccgggggtggcggtggtggtggcttcggcagggtcagccttgcgggtgcttgtggagtgggtggctatggcagccggagcctctacaacctggggggctccaagaggatatccatcagcactagtggtggcagcttcaggaaccggtttggtgctggtgctggaggcggctatggctttggaggtggtgccggtagtggatttggtttcggcggtggagctggtggtggctttgggctcggtggcggagctggctttggaggtggcttcggtggccctggctttcctgtctgccctcctggaggtatccaagaggtcactgtcaaccagagtctcctgactcccctcaacctgcaaatcgaccccagcatccagagggtgaggaccgaggagcgcgagcagatcaagaccctcaacaataagtttgcctccttcatcgacaaggtgcggttcctggagcagcagaacaaggttctggacaccaagtggaccctgctgcaggagcagggcaccaagactgtgaggcagaacctggagccgttgttcgagcagtacatcaacaacctcaggaggcagctggacagcatcgtgggggaacggggccgcctggactcagagctgagaaacatgcaggacctggtggaagacttcaagaacaagtatgaggatgaaatcaacaagcgtaccactgctgagaatgagtttgtgatgctgaagaaggatgtagatgctgcctacatgaacaaggtggagctggaggccaaggttgatgcactgatggatgagattaacttcatgaagatgttctttgatgcggagctgtcccagatgcagacgcatgtctctgacacctcagtggtcctctccatggacaacaaccgcaacctggacctggatagcatcatcgctgaggtcaaggcccagtatgaggagattgccaaccgcagccggacagaagccgagtcctggtatcagaccaagtatgaggagctgcagcagacagctggccggcatggcgatgacctccgcaacaccaagcatgagatctctgagatgaaccggatgatccagaggctgagagccgagattgacaatgtcaagaaacagtgcgccaatctgcagaacgccattgcggatgccgagcagcgtggggagctggccctcaaggatgccaggaacaagctggccgagctggaggaggccctgcagaaggccaagcaggacatggcccggctgctgcgtgagtaccaggagctcatgaacaccaagctggccctggacgtggagatcgccacttaccgcaagctgctggagggcgaggaatgcagactcagtggagaaggagttggaccagtcaacatctctgttgtcacaagcagtgtttcctctggatatggcagtggcagtggctatggcggtggcctcggtggaggtcttggcggcggcctcggtggaggtcttgccggaggtagcagtggaagctactactccagcagcagtgggggtgtcggcctaggtggtgggctcagtgtggggggctctggcttcagtgcaagcagtggccgagggctgggggtgggctttggcagtggcgggggtagcagctccagcgtcaaatttgtctccaccacctcctcctcccggaagagcttcaagagctaagaacctgctgcaagtcactgccttccaagtgcagcaacccagcccatggagattgcctcttctaggcagttgctcaagccatgttttatccttttctggagagtagtctagaccaagccaattgcagaaccacattctttggttcccaggagagccccattcccagcccctggtctcccgtgccgcagttctatattctgcttcaaatcagccttcaggtttcccacagcatggcccctgctgacacgagaacccaaagttttcccaaatctaaatcatcaaaacagaatccccaccccaatcccaaattttgttttggttctaactacctccagaatgtgttcaataaaatgcttttataatataatcgacagctctctcgcccagcccagttctggaagggataaaaagggggcatcaccgttcctgggtaacagagccaccttctgcgtcctgctgagctctgttctctccagcacctcccaacccactagtgcctggttctcttgctccaccaggaacaagccaccatgtctcgccagtcaagtgtgtccttccggagcgggggcagtcgtagcttcagcaccgcctctgccatcaccccgtctgtctcccgcaccagcttcacctccgtgtcccggtccgggggtggcggtggtggtggcttcggcagggtcagccttgcgggtgcttgtggagtgggtggctatggcagccggagcctctacaacctggggggctccaagaggatatccatcagcactagtggtggcagcttcaggaaccggtttggtgctggtgctggaggcggctatggctttggaggtggtgccggtagtggatttggtttcggcggtggagctggtggtggctttgggctcggtggcggagctggctttggaggtggcttcggtggccctggctttcctgtctgccctcctggaggtatccaagaggtcactgtcaaccagagtctcctgactcccctcaacctgcaaatcgaccccagcatccagagggtgaggaccgaggagcgcgagcagatcaagaccctcaacaataagtttgcctccttcatcgacaaggtgcggttcctggagcagcagaacaaggttctggacaccaagtggaccctgctgcaggagcagggcaccaagactgtgaggcagaacctggagccgttgttcgagcagtacatcaacaacctcaggaggcagctggacagcatcgtgggggaacggggccgcctggactcagagctgagaaacatgcaggacctggtggaagacttcaagaacaagtatgaggatgaaatcaacaagcgtaccactgctgagaatgagtttgtgatgctgaagaaggatgtagatgctgcctacatgaacaaggtggagctggaggccaaggttgatgcactgatggatgagattaacttcatgaagatgttctttgatgcggagctgtcccagatgcagacgcatgtctctgacacctcagtggtcctctccatggacaacaaccgcaacctggacctggatagcatcatcgctgaggtcaaggcccagtatgaggagattgccaaccgcagccggacagaagccgagtcctggtatcagaccaagtatgaggagctgcagcagacagctggccggcatggcgatgacctccgcaacaccaagcatgagatctctgagatgaaccggatgatccagaggctgagagccgagattgacaatgtcaagaaacagtgcgccaatctgcagaacgccattgcggatgccgagcagcgtggggagctggccctcaaggatgccaggaacaagctggccgagctggaggaggccctgcagaaggccaagcaggacatggcccggctgctgcgtgagtaccaggagctcatgaacaccaagctggccctggacgtggagatcgccacttaccgcaagctgctggagggcgaggaatgcagactcagtggagaaggagttggaccagtcaacatctctgttgtcacaagcagtgtttcctctggatatggcagtggcagtggctatggcggtggcctcggtggaggtcttggcggcggcctcggtggaggtcttgccggaggtagcagtggaagctactactccagcagcagtgggggtgtcggcctaggtggtgggctcagtgtggggggctctggcttcagtgcaagcagtggccgagggctgggggtgggctttggcagtggcgggggtagcagctccagcgtcaaatttgtctccaccacctcctcctcccggaagagcttcaagagctaagaacctgctgcaagtcactgccttccaagtgcagcaacccagcccatggagattgcctcttctaggcagttgctcaagccatgttttatccttttctggagagtagtctagaccaagccaattgcagaaccacattctttggttcccaggagagccccattcccagcccctggtctcccgtgccgcagttctatattctgcttcaaatcagccttcaggtttcccacagcatggcccctgctgacacgagaacccaaagttttcccaaatctaaatcatcaaaacagaatccccaccccaatcccaaattttgttttggttctaactacctccagaatgtgttcaataaaatgcttttataatataatcgacagctctctcgcccagcccagttctggaagggataaaaagggggcatcaccgttcctgggtaacagagccaccttctgcgtcctgctgagctctgttctctccagcacctcccaacccactagtgcctggttctcttgctccaccaggaacaagccaccatgtctcgccagtcaagtgtgtccttccggagcgggggcagtcgtagcttcagcaccgcctctgccatcaccccgtctgtctcccgcaccagcttcacctccgtgtcccggtccgggggtggcggtggtggtggcttcggcagggtcagccttgcgggtgcttgtggagtgggtggctatggcagccggagcctctacaacctggggggctccaagaggatatccatcagcactagtggtggcagcttcaggaaccggtttggtgctggtgctggaggcggctatggctttggaggtggtgccggtagtggatttggtttcggcggtggagctggtggtggctttgggctcggtggcggagctggctttggaggtggcttcggtggccctggctttcctgtctgccctcctggaggtatccaagaggtcactgtcaaccagagtctcctgactcccctcaacctgcaaatcgaccccagcatccagagggtgaggaccgaggagcgcgagcagatcaagaccctcaacaataagtttgcctccttcatcgacaaggtgcggttcctggagcagcagaacaaggttctggacaccaagtggaccctgctgcaggagcagggcaccaagactgtgaggcagaacctggagccgttgttcgagcagtacatcaacaacctcaggaggcagctggacagcatcgtgggggaacggggccgcctggactcagagctgagaaacatgcaggacctggtggaagacttcaagaacaagtatgaggatgaaatcaacaagcgtaccactgctgagaatgagtttgtgatgctgaagaaggatgtagatgctgcctacatgaacaaggtggagctggaggccaaggttgatgcactgatggatgagattaacttcatgaagatgttctttgatgcggagctgtcccagatgcagacgcatgtctctgacacctcagtggtcctctccatggacaacaaccgcaacctggacctggatagcatcatcgctgaggtcaaggcccagtatgaggagattgccaaccgcagccggacagaagccgagtcctggtatcagaccaagtatgaggagctgcagcagacagctggccggcatggcgatgacctccgcaacaccaagcatgagatctctgagatgaaccggatgatccagaggctgagagccgagattgacaatgtcaagaaacagtgcgccaatctgcagaacgccattgcggatgccgagcagcgtggggagctggccctcaaggatgccaggaacaagctggccgagctggaggaggccctgcagaaggccaagcaggacatggcccggctgctgcgtgagtaccaggagctcatgaacaccaagctggccctggacgtggagatcgccacttaccgcaagctgctggagggcgaggaatgcagactcagtggagaaggagttggaccagtcaacatctctgttgtcacaagcagtgtttcctctggatatggcagtggcagtggctatggcggtggcctcggtggaggtcttggcggcggcctcggtggaggtcttgccggaggtagcagtggaagctactactccagcagcagtgggggtgtcggcctaggtggtgggctcagtgtggggggctctggcttcagtgcaagcagtggccgagggctgggggtgggctttggcagtggcgggggtagcagctccagcgtcaaatttgtctccaccacctcctcctcccggaagagcttcaagagctaagaacctgctgcaagtcactgccttccaagtgcagcaacccagcccatggagattgcctcttctaggcagttgctcaagccatgttttatccttttctggagagtagtctagaccaagccaattgcagaaccacattctttggttcccaggagagccccattcccagcccctggtctcccgtgccgcagttctatattctgcttcaaatcagccttcaggtttcccacagcatggcccctgctgacacgagaacccaaagttttcccaaatctaaatcatcaaaacagaatccccaccccaatcccaaattttgttttggttctaactacctccagaatgtgttcaataaaatgcttttataatataatcgacagctctctcgcccagcccagttctggaagggataaaaagggggcatcaccgttcctgggtaacagagccaccttctgcgtcctgctgagctctgttctctccagcacctcccaacccactagtgcctggttctcttgctccaccaggaacaagccaccatgtctcgccagtcaagtgtgtccttccggagcgggggcagtcgtagcttcagcaccgcctctgccatcaccccgtctgtctcccgcaccagcttcacctccgtgtcccggtccgggggtggcggtggtggtggcttcggcagggtcagccttgcgggtgcttgtggagtgggtggctatggcagccggagcctctacaacctggggggctccaagaggatatccatcagcactagtggtggcagcttcaggaaccggtttggtgctggtgctggaggcggctatggctttggaggtggtgccggtagtggatttggtttcggcggtggagctggtggtggctttgggctcggtggcggagctggctttggaggtggcttcggtggccctggctttcctgtctgccctcctggaggtatccaagaggtcactgtcaaccagagtctcctgactcccctcaacctgcaaatcgaccccagcatccagagggtgaggaccgaggagcgcgagcagatcaagaccctcaacaataagtttgcctccttcatcgacaaggtgcggttcctggagcagcagaacaaggttctggacaccaagtggaccctgctgcaggagcagggcaccaagactgtgaggcagaacctggagccgttgttcgagcagtacatcaacaacctcaggaggcagctggacagcatcgtgggggaacggggccgcctggactcagagctgagaaacatgcaggacctggtggaagacttcaagaacaagtatgaggatgaaatcaacaagcgtaccactgctgagaatgagtttgtgatgctgaagaaggatgtagatgctgcctacatgaacaaggtggagctggaggccaaggttgatgcactgatggatgagattaacttcatgaagatgttctttgatgcggagctgtcccagatgcagacgcatgtctctgacacctcagtggtcctctccatggacaacaaccgcaacctggacctggatagcatcatcgctgaggtcaaggcccagtatgaggagattgccaaccgcagccggacagaagccgagtcctggtatcagaccaagtatgaggagctgcagcagacagctggccggcatggcgatgacctccgcaacaccaagcatgagatctctgagatgaaccggatgatccagaggctgagagccgagattgacaatgtcaagaaacagtgcgccaatctgcagaacgccattgcggatgccgagcagcgtggggagctggccctcaaggatgccaggaacaagctggccgagctggaggaggccctgcagaaggccaagcaggacatggcccggctgctgcgtgagtaccaggagctcatgaacaccaagctggccctggacgtggagatcgccacttaccgcaagctgctggagggcgaggaatgcagactcagtggagaaggagttggaccagtcaacatctctgttgtcacaagcagtgtttcctctggatatggcagtggcagtggctatggcggtggcctcggtggaggtcttggcggcggcctcggtggaggtcttgccggaggtagcagtggaagctactactccagcagcagtgggggtgtcggcctaggtggtgggctcagtgtggggggctctggcttcagtgcaagcagtggccgagggctgggggtgggctttggcagtggcgggggtagcagctccagcgtcaaatttgtctccaccacctcctcctcccggaagagcttcaagagctaagaacctgctgcaagtcactgccttccaagtgcagcaacccagcccatggagattgcctcttctaggcagttgctcaagccatgttttatccttttctggagagtagtctagaccaagccaattgcagaaccacattctttggttcccaggagagccccattcccagcccctggtctcccgtgccgcagttctatattctgcttcaaatcagccttcaggtttcccacagcatggcccctgctgacacgagaacccaaagttttcccaaatctaaatcatcaaaacagaatccccaccccaatcccaaattttgttttggttctaactacctccagaatgtgttcaataaaatgcttttataatataatcgacagctctctcgcccagcccagttctggaagggataaaaagggggcatcaccgttcctgggtaacagagccaccttctgcgtcctgctgagctctgttctctccagcacctcccaacccactagtgcctggttctcttgctccaccaggaacaagccaccatgtctcgccagtcaagtgtgtccttccggagcgggggcagtcgtagcttcagcaccgcctctgccatcaccccgtctgtctcccgcaccagcttcacctccgtgtcccggtccgggggtggcggtggtggtggcttcggcagggtcagccttgcgggtgcttgtggagtgggtggctatggcagccggagcctctacaacctggggggctccaagaggatatccatcagcactagtggtggcagcttcaggaaccggtttggtgctggtgctggaggcggctatggctttggaggtggtgccggtagtggatttggtttcggcggtggagctggtggtggctttgggctcggtggcggagctggctttggaggtggcttcggtggccctggctttcctgtctgccctcctggaggtatccaagaggtcactgtcaaccagagtctcctgactcccctcaacctgcaaatcgaccccagcatccagagggtgaggaccgaggagcgcgagcagatcaagaccctcaacaataagtttgcctccttcatcgacaaggtgcggttcctggagcagcagaacaaggttctggacaccaagtggaccctgctgcaggagcagggcaccaagactgtgaggcagaacctggagccgttgttcgagcagtacatcaacaacctcaggaggcagctggacagcatcgtgggggaacggggccgcctggactcagagctgagaaacatgcaggacctggtggaagacttcaagaacaagtatgaggatgaaatcaacaagcgtaccactgctgagaatgagtttgtgatgctgaagaaggatgtagatgctgcctacatgaacaaggtggagctggaggccaaggttgatgcactgatggatgagattaacttcatgaagatgttctttgatgcggagctgtcccagatgcagacgcatgtctctgacacctcagtggtcctctccatggacaacaaccgcaacctggacctggatagcatcatcgctgaggtcaaggcccagtatgag

SEQ ID NO: 629 - DNA, 5269 bp, Homo sapiens
  misc_feature (702)..(702): second gene starts at positio 702
atggcgaggaagttatctgtaatcttgatcctgacctttgccctctctgtcacaaatccccttcatgaactaaaagcagctgctttcccccagaccactgagaaaattagtccgaattgggaatctggcattaatgttgacttggcaatttccacacggcaatatcatctacaacagcttttctaccgctatggagaaaataattctttgtcagttgaagggttcagaaaattacttcaaaatataggcatagataagattaaaagaatccatatacaccatgaccacgaccatcactcagaccacgagcatcactcagaccatgagcgtcactcagaccatgagcatcactcagagcacgagcatcactctgaccatgatcatcactctcaccataatcatgctgcttctggtaaaaataagcgaaaagctctttgcccagaccatgactcagatagttcaggtaaagatcctagaaacagccaggggaaaggagctcaccgaccagaacatgccagtggtagaaggaatgtcaaggacagtgttagtgctagtgaagtgacctcaactgtgtacaacactgtctctgaaggaactcactttctagagacaatagagactccaagacctggaaaactcttccccaaagatgtaagcagctccactccacccagtgtcacatcaaagagccgggtgagccggcgttgcccggggacctgccctcctggacgcggagcctaaacctgagttacaacaaactctctgagattgaccctgctggttttgaggacttgccgaacctacaggaagtgtacctcaataataatgagttgacagcggtaccatccctgggcgctgcttcatcacatgtcgtctctctctttctgcagcacaacaagattcgcagcgtggaggggagccagctgaaggcctacctttccttagaagtgttagatctgagtttgaacaacatcacggaagtgcggaacacctgctttccacacggaccgcctataaaggagctcaacctggcaggcaatcggattggcaccctggagttgggagcatttgatggtctgtcacggtcgctgctaactcttcgcctgagcaaaaacaggatcacccagcttcctgtaagagcattcaagctacccaggctgacacaactggacctcaatcggaacaggattcggctgatagagggcctcaccttccaggggctcaacagcttggaggtgctgaagcttcagcgaaacaacatcagcaaactgacagatggggccttctggggactgtccaagatgcatgtgctgcacctggagtacaacagcctggtagaagtgaacagcggctcgctctacggcctcacggccctgcatcagctccacctcagcaacaattccatcgctcgcattcaccgcaagggctggagcttctgccagaagctgcatgagttggtcctgtccttcaacaacctgacacggctggacgaggagagcctggccgagctgagcagcctgagtgtcctgcgtctcagccacaattccatcagccacattgcggagggtgccttcaagggactcaggagcctgcgagtcttggatctggaccataacgagatttcgggcacaatagaggacacgagcggcgccttctcagggctcgacagcctcagcaagctgactctgtttggaaacaagatcaagtctgtggctaagagagcattctcggggctggaaggcctggagcacctgaaccttggagggaatgcgatcagatctgtccagtttgatgcctttgtgaagatgaagaatcttaaagagctccatatcagcagcgacagcttcctgtgtgactgccagctgaagtggctgcccccgtggctaattggcaggatgctgcaggcctttgtgacagccacctgtgcccacccagaatcactgaagggtcagagcattttctctgtgccaccagagagtttcgtgtgcgatgacttcctgaagccacagatcatcacccagccagaaaccaccatggctatggtgggcaaggacatccggtttacatgctcagcagccagcagcagcagctcccccatgacctttgcctggaagaaagacaatgaagtcctgaccaatgcagacatggagaactttgtccacgtccacgcgcaggacggggaagtgatggagtacaccaccatcctgcacctccgtcaggtcactttcgggcacgagggccgctaccaatgtgtcatcaccaaccactttggctccacctattcacataaggccaggctcaccgtgaatgtgttgccatcattcaccaaaacgccccacgacataaccatccggaccaccaccatggcccgcctcgaatgtgctgccacaggtcacccaaaccctcagattgcctggcagaaggatggaggcacggatttccccgctgcccgtgagcgacgcatgcatgtcatgccggatgacgacgtgtttttcatcactgatgtgaaaatagatgacgcaggggtttacagctgtactgctcagaactcagccggttctatttcagctaatgccaccctgactgtcctagagaccccatccttggtggtccccttggaagaccgtgtggtatctgtgggagaaacagtggccctccaatgcaaagccacggggaaccctccgccccgcatcacctggttcaagggggaccgcccgctgagcctcactgagcggcaccacttgacccctgacaaccagctcctggtggttcagaacgtggtggcagaggatgcgggccgatatacctgtgagatgtccaacaccctgggcacggagcgagctcacagccagctgagcgtcctgcccgcagcaggctgcaggaaggatgggaccacggtaggcatcttcaccattgctgtcgtgagcagcatcgtcctgacgtcactggtctgggtgtgcatcatctaccagaccaggaagaagagtgaagagtacagtgtcaccaacacagatgaaaccgtcgtgccaccagatgttccaagctacctctcttctcaggggaccctttctgaccgacaagaaaccgtggtcaggaccgagggtggccctcaggccaatgggcacattgagagcaatggtgtgtgtccaagagatgcaagccactttccagagcccgacactcacagcgttgcctgcaggcagccaaagctctgtgctgggtctgcgtatcacaaagagccgtggaaagcgatggagaaagctgaagggacacctgggccacataagatggaacacggtggccgggtcgtatgcagtgactgcaacaccgaagtggactgttactccaggggacaagccttccacccccagcctgtgtccagagacagcgcacagccaagtgcgccaaatggcccggagccgggtgggagtgaccaagagcattctccacatcaccagtgcagcaggactgccgctgggtcctgccccgagtgccaagggtcgctctaccccagtaaccacgatagaatgctgacggctgtgaagaaaaagccaatggcatctctagatgggaaaggggattcttcctggactttagcaaggttgtatcacccggactccacagagctacagcctgcatcttcattaacttcaggcagtccagagcgcgcggaagcccagtacttgcttgtttccaatggccacctccccaaagcatgtgacgccagtcccgagtccacgccactgacaggacagctccccgggaaacagagggtgccactgctgttggcaccaaaaagctaggttttgtctacctcagttcttgtcataccaatctctacgggaaagagaggtaggagaggctgcgaggaagcttgggttcaagcgtcactcatctgtacatagttgtaactcccatgtggagtatcagtcgctcacaggacttggatctgaagcacagtaaacgcaagaggggatttgtgtacaaaaggcaaaaaaagtatttgatatcattgtacataagagttttcagagatttcatatatatcttttacagaggctattttaatctttagtgcatggttaacagaaaaaaattatacaattttgacaatattatttttcgtatcaggttgctgtttaattttggagggggtggggaaatagttctggtgccttaacgcatggctggaatttatagaggctacaaccacatttgttcacaggagtttttggtgcggggtgggaaggatggaaggccttggatttatattgcacttcatagacccctaggctgctgtgcggtgggactccacatgcgccggaaggagcttcaggtgagcactgctcatgtgtggatgcccctgcaacaggcttccctgtctgtagagccaggggtgcaagtgccatccacacttgcagtgaatggcttttccttttaggtttaagtcctgtctgtctgtaaggcgtagaatctgtccgtctgtaaggcgtagaatgagggttgttaatccatcacaagcaaaaggtcagaacagttaaacactgcctttcctcctcctcttattttatgataaaagcaaatgtggccttctcagtatcattcgattgctatttgagacttttaaattaaggtaaaggctgctggtgttggtacctgtggatttttctatactgatgttttcgttttgccaatataatgagtattacattggccttgggggacagaaaggaggaagttctgacttttcagggctaccttatttctactaaggacccagagcaggcctgtccatgccattccttcgcacagatgaaactgagctgggactggaaaggacagcccttgacctgggttctgggtataatttgcacttttgagactggtagctaaccatcttatgagtgccaatgtgtcatttagtaaaacttaaatagaaacaaggtccttcaaatgttcctttggccaaaagctgaagggagttactgagaaaatagttaacaattactgtcaggtgtcatcactgttcaaaaggtaagcacatttagaattttgttcttgacagttaactgactaatcttacttccacaaaatatgtgaatttgctgcttctgagaggcaatgtgaaagagggagtattacttttatgtacaaagttatttatttatagaaattttggtacagtgtacattgaaaaccatgtaaaatattgaagtgtctaacaaatggcattgaagtgtctttaataaaggttcatttataaatgtca

SEQ ID NO: 630 - DNA, 5609 bp, Homo sapiens
  misc_feature (268)..(268): second gene starts at position 268
atgctcagctttgtggatacgcggactttgttgctgcttgcagtaaccttatgcctagcaacatgccaatctttacaagaggaaactgtaagaaagggcccagccggagatagaggaccacgtggagaaaggggtccaccaggccccccaggcagagatggtgaagatggtcccacaggccctcctggtccacctggtcctcctggcccccctggtctcggtgggaactttgctgctcagtatgatggaaaaggagttggacttggccctggaccaatgggcttaatgggacctagaggcccacctggtgcagctggagccccaggccctcaaggtttccaaggacctgctggtgagcctggtgaacctggtcaaactggtcctgcaggtgctcgtggtccagctggccctcctggcaaggctggtgaagatggtcaccctggaaaacccggacgacctggtgagagaggagttgttggaccacagggtgctcgtggtttccctggaactcctggacttcctggcttcaaaggcattaggggacacaatggtctggatggattgaagggacagcccggtgctcctggtgtgaagggtgaacctggtgcccctggtgaaaatggaactccaggtcaaacaggagcccgtgggcttcctggtgagagaggacgtgttggtgcccctggcccagctggtgcccgtggcagtgatggaagtgtgggtcccgtgggtcctgctggtcccattgggtctgctggccctccaggcttcccaggtgcccctggccccaagggtgaaattggagctgttggtaacgctggtcctgctggtcccgccggtccccgtggtgaagtgggtcttccaggcctctccggccccgttggacctcctggtaatcctggagcaaacggccttactggtgccaagggtgctgctggccttcccggcgttgctggggctcccggcctccctggaccccgcggtattcctggccctgttggtgctgccggtgctactggtgccagaggacttgttggtgagcctggtccagctggctccaaaggagagagcggtaacaagggtgagcccggctctgctgggccccaaggtcctcctggtcccagtggtgaagaaggaaagagaggccctaatggggaagctggatctgccggccctccaggacctcctgggctgagaggtagtcctggttctcgtggtcttcctggagctgatggcagagctggcgtcatgggccctcctggtagtcgtggtgcaagtggccctgctggagtccgaggacctaatggagatgctggtcgccctggggagcctggtctcatgggacccagaggtcttcctggttcccctggaaatatcggccccgctggaaaagaaggtcctgtcggcctccctggcatcgacggcaggcctggcccaattggcccagctggagcaagaggagagcctggcaacattggattccctggacccaaaggccccactggtgatcctggcaaaaacggtgataaaggtcatgctggtcttgctggtgctcggggtgctccaggtcctgatggaaacaatggtgctcagggacctcctggaccacagggtgttcaaggtggaaaaggtgaacagggtccccctggtcctccaggcttccagggtctgcctggcccctcaggtcccgctggtgaagttggcaaaccaggagaaaggggtctccatggtgagtttggtctccctggtcctgctggtccaagaggggaacgcggtcccccaggtgagagtggtgctgccggtcctactggtcctattggaagccgaggtccttctggacccccagggcctgatggaaacaagggtgaacctggtgtggttggtgctgtgggcactgctggtccatctggtcctagtggactcccaggagagaggggtgctgctggcatacctggaggcaagggagaaaagggtgaacctggtctcagaggtgaaattggtaaccctggcagagatggtgctcgtggtgctcctggtgctgtaggtgcccctggtcctgctggagccacaggtgaccggggcgaagctggggctgctggtcctgctggtcctgctggtcctcggggaagccctggtgaacgtggtgaggtcggtcctgctggccccaatggatttgctggtcctgctggtgctgctggtcaacctggtgctaaaggagaaagaggagccaaagggcctaagggtgaaaacggtgttgttggtcccacaggccccgttggagctgctggcccagctggtccaaatggtccccccggtcctgctggaagtcgtggtgatggaggcccccctggtatgactggtttccctggtgctgctggacggactggtcccccaggaccctctggtatttctggccctcctggtccccctggtcctgctgggaaagaagggcttcgtggtcctcgtggtgaccaaggtccagttggccgaactggagaagtaggtgcagttggtccccctggcttcgctggtgagaagggtccctctggagaggctggtactgctggacctcctggcactccaggtcctcagggtcttcttggtgctcctggtattctgggtctccctggctcgagaggtgaacgtggtctaccaggtgttgctggtgctgtgggtgaacctggtcctcttggcattgccggccctcctggggcccgtggtcctcctggtgctgtgggtagtcctggagtcaacggtgctcctggtgaagctggtcgtgatggcaaccctgggaacgatggtcccccaggtcgcgatggtcaacccggacacaagggagagcgcggttaccctggcaatattggtcccgttggtgctgcaggtgcacctggtcctcatggccccgtgggtcctgctggcaaacatggaaaccgtggtgaaactggtccttctggtcctgttggtcctgctggtgctgttggcccaagaggtcctagtggcccacaaggcattcgtggcgataagggagagcccggtgaaaaggggcccagaggtcttcctggcttaaagggacacaatggattgcaaggtctgcctggtatcgctggtcaccatggtgatcaaggtgctcctggctccgtgggtcctgctggtcctaggggccctgctggtccttctggccctgctggaaaagatggtcgcactggacatcctggtacagttggacctgctggcattcgaggccctcagggtcaccaaggccctgctcgtgctgggcctggactcccggggggtgggcggcctcatgaactccttcccgccacctcagggtcacgcccagaaccccctgcaggtcggggctgagctccagtcccgcttctttgcctcccagggctgcgcccagagtccattccaggccgcgccggcgcccccgcccacgccccaggccccggcggccgagcccctccaggtggacttgctcccggtgctcgccgccgcccaggagtccgccgcggctgctgcggccgctgccgccgctgctgccgccgtcgctgccgcgcccccggcccctgccgccgcctctacggtggacacagcggccctgaagcagcctccggcgccccctccgccacccccgccagtgtcggcgcccgcggccgaggccgcgccccccgcctccgccgccactatcgccgcggcggcggccaccgccgtcgtagccccaacctcgacggtcgccgtggccccggtcgcgtctgccttggagaagaagacaaagagcaaggggccctacatctgcgctctgtgcgccaaggagttcaagaacggctacaatctccggaggcacgaagccatccacacgggagccaaggccggccgggtcccctcgggtgctatgaagatgccgaccatggtgcccctgagcctcctgagcgtgccccagctgagcggagccggcgggggagggggagaggcgggtgccggcggcggcgctgccgcagtggccgccggtggcgtggtgaccacgaccgcctcggggaagcgcatccggaagaaccatgcctgcgagatgtgtggcaaggccttccgcgacgtctaccacctgaaccgacacaagctgtcgcactcggacgagaagccctaccagtgcccggtgtgccagcagcgcttcaagcgcaaggaccgcatgagctaccacgtgcgctcacatgacggcgctgtgcacaagccctacaactgctcccactgtggcaagagcttctcccggccggatcacctcaacagtcacgtcagacaagtgcactcaacagaacggcccttcaaatgtgagaaatgtgaggcagctttcgccacgaaggatcggctgcgggcgcacacagtacgacacgaggagaaagtgccatgtcacgtgtgtggcaagatgctgagctcggcttatatttcggaccacatgaaggtgcacagccagggtcctcaccatgtctgtgagctctgcaacaaaggtactggtgaggtttgtccaatggcggcggcagcggcagcggcggcagcggcagcagcggcagcagtagcagcccctcccacagctgtgggctccctctcgggggcggagggggtgcctgtgagctctcagccacttccctcccaaccctggtgagctccaagttggttgcgggggagaggggagaatggagtagagtcccttggtacaagctcctctcccccctcttttcccaccaactcctatttccctaccaaccaaggagcctccagaaggaaaggaggaagaaatgttttcttaggggaattcgctaggttttaacgatttgtttctcctgctcctcttctgtcagacctgaccccacacaaacctgtcccctcggttgtgttgaagtcccctggacagtgggcaggggtggcagaggacacgagcagccactgcccgtaccccctctcctctctgtaagcccatgccctgtcttcccagggacttgtgagcctcttccctcgacggtcctcttctctccttccagtcctctccccctgctgtctgcagcccctccccggggagttggtgctttcttttccttttttttttttttccagggggagggaggagaggaaggagggggatcagagctgtcccaaagagggaaagcggtgaggtttgaggaggggcagaagcagggccggcaaaggttgtaccttcataaggtggtatggggggttggggtcaggccctgaacatcgtcctacttgagaatctgtcaggggaaaaagtcaaggggagcaggaggaagagccaggagggccagaggcagagaagagatggagtcttaggggccagggtgagcgaggggtccagggcctagaggtgcttcctgggggcgggggaatgcagccagtgtccccctcccctcttccaccccagctccagccctggtcttgtcttttcatccctcttccccacgacagaagaagttgtggccctggccatgtcatcgtgttcctgtgtcccctgcatgtaccccaccctccaccccttccttttgcgcggaccccattacaataaattttaaataaaatcctgtttctggctctggattgaa

SEQ ID NO: 631 - DNA, 5834 bp, Homo sapiens
  misc_feature (268)..(268): second gene starts at position 268
atgctcagctttgtggatacgcggactttgttgctgcttgcagtaaccttatgcctagcaacatgccaatctttacaagaggaaactgtaagaaagggcccagccggagatagaggaccacgtggagaaaggggtccaccaggccccccaggcagagatggtgaagatggtcccacaggccctcctggtccacctggtcctcctggcccccctggtctcggtgggaactttgctgctcagtatgatggaaaaggagttggacttggccctggaccaatgggcttaatgggacctagaggcccacctggtgcagctggagccccaggccctcaaggtttccaaggacctgctggtgagcctggtgaacctggtcaaactggtcctgcaggtgctcgtggtccagctggccctcctggcaaggctggtgaagatggtcaccctggaaaacccggacgacctggtgagagaggagttgttggaccacagggtgctcgtggtttccctggaactcctggacttcctggcttcaaaggcattaggggacacaatggtctggatggattgaagggacagcccggtgctcctggtgtgaagggtgaacctggtgcccctggtgaaaatggaactccaggtcaaacaggagcccgtgggcttcctggtgagagaggacgtgttggtgcccctggcccagctggtgcccgtggcagtgatggaagtgtgggtcccgtgggtcctgctggtcccattgggtctgctggccctccaggcttcccaggtgcccctggccccaagggtgaaattggagctgttggtaacgctggtcctgctggtcccgccggtccccgtggtgaagtgggtcttccaggcctctccggccccgttggacctcctggtaatcctggagcaaacggccttactggtgccaagggtgctgctggccttcccggcgttgctggggctcccggcctccctggaccccgcggtattcctggccctgttggtgctgccggtgctactggtgccagaggacttgttggtgagcctggtccagctggctccaaaggagagagcggtaacaagggtgagcccggctctgctgggccccaaggtcctcctggtcccagtggtgaagaaggaaagagaggccctaatggggaagctggatctgccggccctccaggacctcctgggctgagaggtagtcctggttctcgtggtcttcctggagctgatggcagagctggcgtcatgggccctcctggtagtcgtggtgcaagtggccctgctggagtccgaggacctaatggagatgctggtcgccctggggagcctggtctcatgggacccagaggtcttcctggttcccctggaaatatcggccccgctggaaaagaaggtcctgtcggcctccctggcatcgacggcaggcctggcccaattggcccagctggagcaagaggagagcctggcaacattggattccctggacccaaaggccccactggtgatcctggcaaaaacggtgataaaggtcatgctggtcttgctggtgctcggggtgctccaggtcctgatggaaacaatggtgctcagggacctcctggaccacagggtgttcaaggtggaaaaggtgaacagggtccccctggtcctccaggcttccagggtctgcctggcccctcaggtcccgctggtgaagttggcaaaccaggagaaaggggtctccatggtgagtttggtctccctggtcctgctggtccaagaggggaacgcggtcccccaggtgagagtggtgctgccggtcctactggtcctattggaagccgaggtccttctggacccccagggcctgatggaaacaagggtgaacctggtgtggttggtgctgtgggcactgctggtccatctggtcctagtggactcccaggagagaggggtgctgctggcatacctggaggcaagggagaaaagggtgaacctggtctcagaggtgaaattggtaaccctggcagagatggtgctcgtggtgctcctggtgctgtaggtgcccctggtcctgctggagccacaggtgaccggggcgaagctggggctgctggtcctgctggtcctgctggtcctcggggaagccctggtgaacgtggtgaggtcggtcctgctggccccaatggatttgctggtcctgctggtgctgctggtcaacctggtgctaaaggagaaagaggagccaaagggcctaagggtgaaaacggtgttgttggtcccacaggccccgttggagctgctggcccagctggtccaaatggtccccccggtcctgctggaagtcgtggtgatggaggcccccctggtatgactggtttccctggtgctgctggacggactggtcccccaggaccctctggtatttctggccctcctggtccccctggtcctgctgggaaagaagggcttcgtggtcctcgtggtgaccaaggtccagttggccgaactggagaagtaggtgcagttggtccccctggcttcgctggtgagaagggtccctctggagaggctggtactgctggacctcctggcactccaggtcctcagggtcttcttggtgctcctggtattctgggtctccctggctcgagaggtgaacgtggtctaccaggtgttgctggtgctgtgggtgaacctggtcctcttggcattgccggccctcctggggcccgtggtcctcctggtgctgtgggtagtcctggagtcaacggtgctcctggtgaagctggtcgtgatggcaaccctgggaacgatggtcccccaggtcgcgatggtcaacccggacacaagggagagcgcggttaccctggcaatattggtcccgttggtgctgcaggtgcacctggtcctcatggccccgtgggtcctgctggcaaacatggaaaccgtggtgaaactggtccttctggtcctgttggtcctgctggtgctgttggcccaagaggtcctagtggcccacaaggcattcgtggcgataagggagagcccggtgaaaaggggcccagaggtcttcctggcttaaagggacacaatggattgcaaggtctgcctggtatcgctggtcaccatggtgatcaaggtgctcctggctccgtgggtcctgctggtcctaggggccctgctggtccttctggccctgctggaaaagatggtcgcactggacatcctggtacagttggacctgctggcattcgaggccctcagggtcaccaaggccctgctcgtgctgggcctggactcccggggggtgggcggcctcatgaactccttcccgccacctcagggtcacgcccagaaccccctgcaggtcggggctgagctccagtcccgcttctttgcctcccagggctgcgcccagagtccattccaggccgcgccggcgcccccgcccacgccccaggccccggcggccgagcccctccaggtggacttgctcccggtgctcgccgccgcccaggagtccgccgcggctgctgcggccgctgccgccgctgctgccgccgtcgctgccgcgcccccggcccctgccgccgcctctacggtggacacagcggccctgaagcagcctccggcgccccctccgccacccccgccagtgtcggcgcccgcggccgaggccgcgccccccgcctccgccgccactatcgccgcggcggcggccaccgccgtcgtagccccaacctcgacggtcgccgtggccccggtcgcgtctgccttggagaagaagacaaagagcaaggggccctacatctgcgctctgtgcgccaaggagttcaagaacggctacaatctccggaggcacgaagccatccacacgggagccaaggccggccgggtcccctcgggtgctatgaagatgccgaccatggtgcccctgagcctcctgagcgtgccccagctgagcggagccggcgggggagggggagaggcgggtgccggcggcggcgctgccgcagtggccgccggtggcgtggtgaccacgaccgcctcggggaagcgcatccggaagaaccatgcctgcgagatgtgtggcaaggccttccgcgacgtctaccacctgaaccgacacaagctgtcgcactcggacgagaagccctaccagtgcccggtgtgccagcagcgcttcaagcgcaaggaccgcatgagctaccacgtgcgctcacatgacggcgctgtgcacaagccctacaactgctcccactgtggcaagagcttctcccggccggatcacctcaacagtcacgtcagacaagtgcactcaacagaacggcccttcaaatgtgagaaatgtgaggcagctttcgccacgaaggatcggctgcgggcgcacacagtacgacacgaggagaaagtgccatgtcacgtgtgtggcaagatgctgagctcggcttatatttcggaccacatgaaggtgcacagccagggtcctcaccatgtctgtgagctctgcaacaaaggcttcaccacggcagcatacctgcgcatccacgcggtgaaggaccacgggctccaggccccgcgggctgaccgcatcctgtgcaagctgtgcagcgtgcactgcaagacccctgcccagctggccggccacatgcagacccatctggggggggccgccccccctgtcccgggagacgccccccagccacagcccacctgctgagggggacccccgcacccaccaggtactggtgaggtttgtccaatggcggcggcagcggcagcggcggcagcggcagcagcggcagcagtagcagcccctcccacagctgtgggctccctctcgggggcggagggggtgcctgtgagctctcagccacttccctcccaaccctggtgagctccaagttggttgcgggggagaggggagaatggagtagagtcccttggtacaagctcctctcccccctcttttcccaccaactcctatttccctaccaaccaaggagcctccagaaggaaaggaggaagaaatgttttcttaggggaattcgctaggttttaacgatttgtttctcctgctcctcttctgtcagacctgaccccacacaaacctgtcccctcggttgtgttgaagtcccctggacagtgggcaggggtggcagaggacacgagcagccactgcccgtaccccctctcctctctgtaagcccatgccctgtcttcccagggacttgtgagcctcttccctcgacggtcctcttctctccttccagtcctctccccctgctgtctgcagcccctccccggggagttggtgctttcttttccttttttttttttttccagggggagggaggagaggaaggagggggatcagagctgtcccaaagagggaaagcggtgaggtttgaggaggggcagaagcagggccggcaaaggttgtaccttcataaggtggtatggggggttggggtcaggccctgaacatcgtcctacttgagaatctgtcaggggaaaaagtcaaggggagcaggaggaagagccaggagggccagaggcagagaagagatggagtcttaggggccagggtgagcgaggggtccagggcctagaggtgcttcctgggggcgggggaatgcagccagtgtccccctcccctcttccaccccagctccagccctggtcttgtcttttcatccctcttccccacgacagaagaagttgtggccctggccatgtcatcgtgttcctgtgtcccctgcatgtaccccaccctccaccccttccttttgcgcggaccccattacaataaattttaaataaaatcctgtttctggctctggattgaa

SEQ ID NO: 632 - DNA, 2505 bp, Homo sapiens
  misc_feature (2011)..(2011): second gene starts at position 2011
gcacagcggcggcgcaggcgcggagaggggcacagcggcggcgcaggcgcggagaggcgcacagcgcggcacagcgaggcgccggcccagactccactccccagctgtgaaaggaggagctctacggtgactttgaagacttggaaacaggggacgtgcacaagggaaaatcgggccccgatactcagaatgaagatgtagagaaacaaggaagaaattgaccctgacgaagaagaaagtgccaagaaaaagcatttggataagaagagaaaattgaaggagatgtttgatgtggaatatgatgaaggagaaagcacatattttgatgatcttaaaggagaaatgcagaaacaagcacagataacagcatacaggttttccccccccaccccgtcatgtacagctgaatcatgcagaatttgaagatcaagatgatgaagccagagttcagtatgagggttttcgacctgggatatgcgtctgaagaaacatcgctggtataagaaaatcctcaagtcccgagatccaatcatattttctgtagggtggaggaggtttcagaccatcccgctctgttatatcgaagaccacaatggaagacaaaggcttctaaacctgattttcggatagctgccacataagttgtccttgatctggataaatccataaaaattgtgaagaaattaaagctaactggttttccatataaaatttttaagaacacttcatttattaagggaatgtttaattcagccttggaagtggccaaatttgaaggtgctgtgattcgaactgtcagtgggataagggggcagatcaagaaagcactctgagctccagaaggagctttccgggccagctttgaggataagctgctgatgagcgatattgtcttcatgcaaacttggtatcctgtttccatcccagccttctgtaacccagtaacatctttgttgaaaccagtgggtgagaaagacacctggtcaggaacgcggaccacgggccaactcaggcttgcccatggtgtcagactaaaggcaaacaaggactctctgtataaggttccctctcccagcctgtgctgactcagccatcttcccattctgcatcttctggagcatcagtcagactcacctgcatgctgagcagtggcttcagtgttggggacttctggataaggtggtaccaacaaaagccagggaaccctccccggtatctcctgtactaccactcagactccaataagggccaaggctctggagttcccagccgcttctctggatccaacgatgcatcagccaatgcagggattctgcgtatctctgggctccagcctgaggatgaggctgactattactgtggtacatggcacagcaactctaagactcacacagtgctccagacccatgaggaacaaaacactgcaaagtcattcgccaggatctcctgcagactggcattcagtgatggagaacagactcctaggtgagatccctggtcacaggatccagatgactatgactgcaagtctggaaaagaagagacagaacaaagatttaccagcataaccctctgagaatgtgccccagccatcctggagggaagagctccctattgacccagcactgcagaatccacagaggaaggacagctctggccaccagggagcagccacacgacaagagaggacccggtgtccccacagggtcctgggcccagtctgtgttgacgcagccgccctcagtgtctgcggccccaggacagaaggtcaccatctcctgctctggaagcagctccaacattgggaataattatgtatcctggtaccagcagctcccaggaacagcccccaaactcctcatttatgacaataataagcgaccctcagggattcctgaccgattctctggctccaagtctggcacgtcagccaccctgggcatcaccggactccagactggggacgaggccgattattactgcggaacatgggatagcagcctgagtgctttatgtcttcggaactgggaccaaggtcaccgtcctaggtcagcccaaggccaaccccactgtcactctgttcccgccctcctctgaggagctccaagccaacaaggccacactagtgtgtctgatcagtgacttctacccgggagctgtgacagtggcctggaaggcagatggcagccccgtcaaggcgggagtggagaccaccaaaccctccaaacagagcaacaacaagtacgcggccagcagctacctgagcctgacgcccgagcagtggaagtcccacagaagctacagctgccaggtcacgcatgaagggagcaccgtggagaagacagtggcccctacagaatgttcataggttcccaactctaaccccacccacgggagcctggagctgcaggatcccaggggaggggtctctctccccatcccaagtcatccagcccttctccctgcactcatgaaaccccaataaatatcctcattgacaaccag

SEQ ID NO: 633 - DNA, 2505 bp, Homo sapiens; identical to SEQ ID NO: 632
  misc_feature (2011)..(2011): second gene starts at position 2011

SEQ ID NO: 634 - DNA, 4691 bp, Homo sapiens
  misc_feature (740)..(740): second gene starts at position 740
atggagatgaagaagaagattaacctggagttaaggaacagatccccggaggaggtgacagagttagtccttgataattgcctgtgtgtcaatggggaaattgaaggcctgaatgatactttcaaagaactagaatttctgagtatggctaatgtggaactaagttcgctggcccggcttcccagcttaaataaacttcgaaaattggagcttagtgataatataatttctggaggcttggaagtcctggcagagaaatgtccaaatcttacctacctcaatctgagtggaaacaaaataaaagatctcagtacagtagaagctctgcaaaatcttaaaaatttgaaaagtcttgacctgtttaactgtgagatcacaaacctggaagattatagagaaagtatttttgaactactgcagcaaatcacatacttagatggatttgatcaggaggataatgaagcgccggactctgaagaggaggatgatgaggatggcgatgaagatgatgaagaggaagaggaaaatgaagctggtccaccggaaggatatgaggaagaggaggaggaagaggaagaggaggatgaggatgaggatgaagatgaagatgaagcaggttcagagttgggagagggagaagaggaagtgggcctctcatacttaatgaaagaagaaattcaggatgaagaagatgatgatgactatgttgaagaaggggaagaagaggaagaagaggaaggggaagaagaagaaggaggaggaaatgtagaaaaagatccagatggtgctaaaagccaagaaaaagaggaaccagaaatctccacggaaaaagaagactctgcacgtttggatgatcacgaagaggaggaggaagaggatgaagagccatcccacaacgaggaccatgatgccgatgacgaggatgacagccacatggagtctgccgaagtggagaaggaagagctgcccagagaaagcttcaaagaagtactggaaaaccaggagacttttttagaccttaatgtgcagcctggtcactcgaacccagaggtcttaatggactgtggcgtcgacctgacagcttcttgtaacagtgagcccaaggagcttgctggggaccctgaagctgtacccgaatctgacgaggagccacccccaggagaacaggcacagaagcaggaccaaaagaacagcaaggaagtcgatacagagttcaaagagggaaacccagcaaccatggaaatcgactctgagactgtccaggccgttcagtctttgacccaggagagcagcgaacaggacgacacctttcaggattgtgccgagactcaagaggcctgtagaagcctacagaactacacccgtgcagaccaaagtccacagattgccaccacgctcgacgattgccaacagtcggaccacagtagcccagtttcatccgtccactcccatcctggccagtccgtacgttctgtcaacagcccaagtgtccctgctctggaaaacagctacgcccaaatcagcccagatcaaagtgccatctcagtgccatctctgcagaacatggaaaccagtcccatgatggatgtcccatcagtttcagatcattcacagcaagtcgtagacagtggatttagtgacctgggcagtatcgagagcacaactgagaactacgaaaacccaagcagctacgattctactatgggaggcagcatctgtggaaacggctcttcacagaacagctgctcctatagcaacctcacctccagcagtctgacacagagcagctgtgctgtcacccagcagatgtccaacatcagcgggagctgcagcatgctgcagcaaaccagcatcagctcccctccgacctgcagcgtcaagtctcctcaaggctgtgtggtggagaggcctccgagcagcagccagcagctggctcagtgcagcatggctgctaacttcaccccacccatgcagctggctgaaatccccgagacgagcaacgccaacattggcttatacgagcgaatgggtcagagtgattttggggctgggcattacccgcagccgtcagccaccttcagccttgccaaactgcagcagttaactaatacacttattgatcattcattgccttacagccattccgctgctgtgacttcctatgcaaacagtgcctctttgtccacaccattaagtaacacagggcttgttcaactttctcagtctccacactccgtccctgggggaccccaagcacaagctaccatgaccccaccccccaacctgactcctcctccaatgaatctgccgccgcctcttttgcaacggaacatggctgcatcaaatattggcatctctcacagccaaagactgcaaacccagattgccagcaagggccacatctccatgagaaccaagtcagcgtctctgtcaccagccgctgccacccatcagtcacaaatctatgggcgctcccagactgtagccatgcagggtcctgcacggactttaacgatgcaaagaggcatgaacatgagtgtgaacctgatgccagcgccagcctacaatgtcaactctgtgaacatgaacatgaacactctcaacgccatgaatgggtacagcatgtcccagccaatgatgaacagtggctaccacagcaatcatggctatatgaatcaaacgccccaataccctatgcagatgcagatgggcatgatgggcacccagccatatgcccagcagccaatgcagaccccaccccacggtaacatgatgtacacggcccccggacatcacggctacatgaacacaggcatgtccaaacagtctctcaatggctcctacatgagaaggtagacaacgtgggcagtccacaaaacctacggggcatcactattggattgatctgcacaaatacctttgaagagtacgatttcaaaaccagcaattggtgtgaatgcaaaaacatttgttggcaccatttatttaaaaaaaaaaaaagctgtatgcagcagaaagccttatacaagttgtttttctttttttcctttttcttttttttggtaccttcatttctgttacttttatataaaattctctgcaaaggaaggcctctctttggactacaatttggaggcagccacttgttgtgcctgcttctgttaaacaatgtggatatcaagcccccccaaattatctgttttaatattgaacctagagctttttttttcccttccctgtccactccatgtaaatgcctttagcatttcagttattgtatattttgtttaaggtgacacttcagcatgccgctaatgtctttgttagtgacagtgcattttgtagtactgtacaagtgttgtgctaacagtaagccatttcttaagttttttgccttgattagggtgccctaatttgagggttttaaaaaaaactatatttttgttaattataaaactgtaaagagctataaaagctattcccatttggttagtcaaaagggttttattgctaaatgtttggtgtaaagttgagacccttttccattttggtgacagatttctttggggaaaaaaggcagctttctgttttataaatgcagacttctgtttattgaatgaagcatatctcagtgtttatctgtcaggttttgaaacatttcatatatgtccaaatacttggcaggatttaaaaaaaaatagtgaatttggtgtaaagttgctattttatggaaatgcctctaactttacattttcattccatctgtagatttttctatctttataaaatattggagttattttttaaggaaaaatagaaaagtagcttgtgaatagctcaaactaagcttacaaatcgcatgtaaaaaagcaaaaaagttatttgtgtctgtttatattgcttccttttttgtagcctttgtacctgtacagggtgacagtaagggccaagcaggagaggcgtaatccttgtataaaataggatccagcgacactcttgtatttatctgttctctttttagtcagtcacttcaaaaaaacaaaaaacaaacaaaaaaaagctgtacattttaacataaaataaattatgatgagccatttttagcctcttgtgtcctgtcatattatgattgatagagaatgaccaatggaactgtatcatgtgtcacgcctcagaacacatacacattttgggaaaataaattatttagtgtaaattggagttatgggattttctgatttgttttgactttgggggaggggttggcaataaataagagtaatatctaataaaaccatcacatataccaaatacctatttaataaattaatttataatggattttaatgcttttcatgaaagtttattttatgcgagtgcataccttctgtatgccaatcattgtctttaaaataaagtgaaattgtttttttcttttggactttgatcttcatttgcaaagagatcccgcacaaatatccagctgcctcactcgcacagtctgtagaaacatccctccaagcctcgcaccagggtagcaaacttcctttttataaagattcataccaaaaaaagcacccaatttgggattgtatgtttgaaaaatcattttctttttaaaaagtgtgaacgttttgctctgttgtgaatgattaattgtatgttttctttagagtctaaagtttagaccc

SEQ ID NO: 635 - DNA, 4568 bp, Homo sapiens
  misc_feature (617)..(617): second gene starts at position 617
atggagatgaagaagaagattaacctggagttaaggaacagatccccggaggaggtgacagagttagtccttgataattgcctgtgtgtcaatggggaaattgaaggcctgaatgatactttcaaagaactagaatttctgagtatggctaatgtggaactaagttcgctggcccggcttcccagcttaaataaacttcgaaaacaaaatcttaaaaatttgaaaagtcttgacctgtttaactgtgagatcacaaacctggaagattatagagaaagtatttttgaactactgcagcaaatcacatacttagatggatttgatcaggaggataatgaagcgccggactctgaagaggaggatgatgaggatggcgatgaagatgatgaagaggaagaggaaaatgaagctggtccaccggaaggatatgaggaagaggaggaggaagaggaagaggaggatgaggatgaggatgaagatgaagatgaagcaggttcagagttgggagagggagaagaggaagtgggcctctcatacttaatgaaagaagaaattcaggatgaagaagatgatgatgactatgttgaagaaggggaagaagaggaagaagaggaaggggaagaagaagaaggaggaggaaatgtagaaaaagatccagatggtgctaaaagccaagaaaaagaggaaccagaaatctccacggaaaaagaagactctgcacgtttggatgatcacgaagaggaggaggaagaggatgaagagccatcccacaacgaggaccatgatgccgatgacgaggatgacagccacatggagtctgccgaagtggagaaggaagagctgcccagagaaagcttcaaagaagtactggaaaaccaggagacttttttagaccttaatgtgcagcctggtcactcgaacccagaggtcttaatggactgtggcgtcgacctgacagcttcttgtaacagtgagcccaaggagcttgctggggaccctgaagctgtacccgaatctgacgaggagccacccccaggagaacaggcacagaagcaggaccaaaagaacagcaaggaagtcgatacagagttcaaagagggaaacccagcaaccatggaaatcgactctgagactgtccaggccgttcagtctttgacccaggagagcagcgaacaggacgacacctttcaggattgtgccgagactcaagaggcctgtagaagcctacagaactacacccgtgcagaccaaagtccacagattgccaccacgctcgacgattgccaacagtcggaccacagtagcccagtttcatccgtccactcccatcctggccagtccgtacgttctgtcaacagcccaagtgtccctgctctggaaaacagctacgcccaaatcagcccagatcaaagtgccatctcagtgccatctctgcagaacatggaaaccagtcccatgatggatgtcccatcagtttcagatcattcacagcaagtcgtagacagtggatttagtgacctgggcagtatcgagagcacaactgagaactacgaaaacccaagcagctacgattctactatgggaggcagcatctgtggaaacggctcttcacagaacagctgctcctatagcaacctcacctccagcagtctgacacagagcagctgtgctgtcacccagcagatgtccaacatcagcgggagctgcagcatgctgcagcaaaccagcatcagctcccctccgacctgcagcgtcaagtctcctcaaggctgtgtggtggagaggcctccgagcagcagccagcagctggctcagtgcagcatggctgctaacttcaccccacccatgcagctggctgaaatccccgagacgagcaacgccaacattggcttatacgagcgaatgggtcagagtgattttggggctgggcattacccgcagccgtcagccaccttcagccttgccaaactgcagcagttaactaatacacttattgatcattcattgccttacagccattccgctgctgtgacttcctatgcaaacagtgcctctttgtccacaccattaagtaacacagggcttgttcaactttctcagtctccacactccgtccctgggggaccccaagcacaagctaccatgaccccaccccccaacctgactcctcctccaatgaatctgccgccgcctcttttgcaacggaacatggctgcatcaaatattggcatctctcacagccaaagactgcaaacccagattgccagcaagggccacatctccatgagaaccaagtcagcgtctctgtcaccagccgctgccacccatcagtcacaaatctatgggcgctcccagactgtagccatgcagggtcctgcacggactttaacgatgcaaagaggcatgaacatgagtgtgaacctgatgccagcgccagcctacaatgtcaactctgtgaacatgaacatgaacactctcaacgccatgaatgggtacagcatgtcccagccaatgatgaacagtggctaccacagcaatcatggctatatgaatcaaacgccccaataccctatgcagatgcagatgggcatgatgggcacccagccatatgcccagcagccaatgcagaccccaccccacggtaacatgatgtacacggcccccggacatcacggctacatgaacacaggcatgtccaaacagtctctcaatggctcctacatgagaaggtagacaacgtgggcagtccacaaaacctacggggcatcactattggattgatctgcacaaatacctttgaagagtacgatttcaaaaccagcaattggtgtgaatgcaaaaacatttgttggcaccatttatttaaaaaaaaaaaaagctgtatgcagcagaaagccttatacaagttgtttttctttttttcctttttcttttttttggtaccttcatttctgttacttttatataaaattctctgcaaaggaaggcctctctttggactacaatttggaggcagccacttgttgtgcctgcttctgttaaacaatgtggatatcaagcccccccaaattatctgttttaatattgaacctagagctttttttttcccttccctgtccactccatgtaaatgcctttagcatttcagttattgtatattttgtttaaggtgacacttcagcatgccgctaatgtctttgttagtgacagtgcattttgtagtactgtacaagtgttgtgctaacagtaagccatttcttaagttttttgccttgattagggtgccctaatttgagggttttaaaaaaaactatatttttgttaattataaaactgtaaagagctataaaagctattcccatttggttagtcaaaagggttttattgctaaatgtttggtgtaaagttgagacccttttccattttggtgacagatttctttggggaaaaaaggcagctttctgttttataaatgcagacttctgtttattgaatgaagcatatctcagtgtttatctgtcaggttttgaaacatttcatatatgtccaaatacttggcaggatttaaaaaaaaatagtgaatttggtgtaaagttgctattttatggaaatgcctctaactttacattttcattccatctgtagatttttctatctttataaaatattggagttattttttaaggaaaaatagaaaagtagcttgtgaatagctcaaactaagcttacaaatcgcatgtaaaaaagcaaaaaagttatttgtgtctgtttatattgcttccttttttgtagcctttgtacctgtacagggtgacagtaagggccaagcaggagaggcgtaatccttgtataaaataggatccagcgacactcttgtatttatctgttctctttttagtcagtcacttcaaaaaaacaaaaaacaaacaaaaaaaagctgtacattttaacataaaataaattatgatgagccatttttagcctcttgtgtcctgtcatattatgattgatagagaatgaccaatggaactgtatcatgtgtcacgcctcagaacacatacacattttgggaaaataaattatttagtgtaaattggagttatgggattttctgatttgttttgactttgggggaggggttggcaataaataagagtaatatctaataaaaccatcacatataccaaatacctatttaataaattaatttataatggattttaatgcttttcatgaaagtttattttatgcgagtgcataccttctgtatgccaatcattgtctttaaaataaagtgaaattgtttttttcttttggactttgatcttcatttgcaaagagatcccgcacaaatatccagctgcctcactcgcacagtctgtagaaacatccctccaagcctcgcaccagggtagcaaacttcctttttataaagattcataccaaaaaaagcacccaatttgggattgtatgtttgaaaaatcattttctttttaaaaagtgtgaacgttttgctctgttgtgaatgattaattgtatgttttctttagagtctaaagtttagaccc

SEQ ID NO: 636 - DNA, 4547 bp, Homo sapiens
  misc_feature (596)..(596): second gene starts at position 596
atggctaatgtggaactaagttcgctggcccggcttcccagcttaaataaacttcgaaaattggagcttagtgataatataatttctggaggcttggaagtcctggcagagaaatgtccaaatcttacctacctcaatctgagtggaaacaaaataaaagatctcagtacagtagaagctctgcaaaatcttaaaaatttgaaaagtcttgacctgtttaactgtgagatcacaaacctggaagattatagagaaagtatttttgaactactgcagcaaatcacatacttagatggatttgatcaggaggataatgaagcgccggactctgaagaggaggatgatgaggatggcgatgaagatgatgaagaggaagaggaaaatgaagctggtccaccggaaggatatgaggaagaggaggaggaagaggaagaggaggatgaggatgaggatgaagatgaagatgaagcaggttcagagttgggagagggagaagaggaagtgggcctctcatacttaatgaaagaagaaattcaggatgaagaagatgatgatgactatgttgaagaaggggaagaagaggaagaagaggaaggggaagaagaagaaggaggaggaaatgtagaaaaagatccagatggtgctaaaagccaagaaaaagaggaaccagaaatctccacggaaaaagaagactctgcacgtttggatgatcacgaagaggaggaggaagaggatgaagagccatcccacaacgaggaccatgatgccgatgacgaggatgacagccacatggagtctgccgaagtggagaaggaagagctgcccagagaaagcttcaaagaagtactggaaaaccaggagacttttttagaccttaatgtgcagcctggtcactcgaacccagaggtcttaatggactgtggcgtcgacctgacagcttcttgtaacagtgagcccaaggagcttgctggggaccctgaagctgtacccgaatctgacgaggagccacccccaggagaacaggcacagaagcaggaccaaaagaacagcaaggaagtcgatacagagttcaaagagggaaacccagcaaccatggaaatcgactctgagactgtccaggccgttcagtctttgacccaggagagcagcgaacaggacgacacctttcaggattgtgccgagactcaagaggcctgtagaagcctacagaactacacccgtgcagaccaaagtccacagattgccaccacgctcgacgattgccaacagtcggaccacagtagcccagtttcatccgtccactcccatcctggccagtccgtacgttctgtcaacagcccaagtgtccctgctctggaaaacagctacgcccaaatcagcccagatcaaagtgccatctcagtgccatctctgcagaacatggaaaccagtcccatgatggatgtcccatcagtttcagatcattcacagcaagtcgtagacagtggatttagtgacctgggcagtatcgagagcacaactgagaactacgaaaacccaagcagctacgattctactatgggaggcagcatctgtggaaacggctcttcacagaacagctgctcctatagcaacctcacctccagcagtctgacacagagcagctgtgctgtcacccagcagatgtccaacatcagcgggagctgcagcatgctgcagcaaaccagcatcagctcccctccgacctgcagcgtcaagtctcctcaaggctgtgtggtggagaggcctccgagcagcagccagcagctggctcagtgcagcatggctgctaacttcaccccacccatgcagctggctgaaatccccgagacgagcaacgccaacattggcttatacgagcgaatgggtcagagtgattttggggctgggcattacccgcagccgtcagccaccttcagccttgccaaactgcagcagttaactaatacacttattgatcattcattgccttacagccattccgctgctgtgacttcctatgcaaacagtgcctctttgtccacaccattaagtaacacagggcttgttcaactttctcagtctccacactccgtccctgggggaccccaagcacaagctaccatgaccccaccccccaacctgactcctcctccaatgaatctgccgccgcctcttttgcaacggaacatggctgcatcaaatattggcatctctcacagccaaagactgcaaacccagattgccagcaagggccacatctccatgagaaccaagtcagcgtctctgtcaccagccgctgccacccatcagtcacaaatctatgggcgctcccagactgtagccatgcagggtcctgcacggactttaacgatgcaaagaggcatgaacatgagtgtgaacctgatgccagcgccagcctacaatgtcaactctgtgaacatgaacatgaacactctcaacgccatgaatgggtacagcatgtcccagccaatgatgaacagtggctaccacagcaatcatggctatatgaatcaaacgccccaataccctatgcagatgcagatgggcatgatgggcacccagccatatgcccagcagccaatgcagaccccaccccacggtaacatgatgtacacggcccccggacatcacggctacatgaacacaggcatgtccaaacagtctctcaatggctcctacatgagaaggtagacaacgtgggcagtccacaaaacctacggggcatcactattggattgatctgcacaaatacctttgaagagtacgatttcaaaaccagcaattggtgtgaatgcaaaaacatttgttggcaccatttatttaaaaaaaaaaaaagctgtatgcagcagaaagccttatacaagttgtttttctttttttcctttttcttttttttggtaccttcatttctgttacttttatataaaattctctgcaaaggaaggcctctctttggactacaatttggaggcagccacttgttgtgcctgcttctgttaaacaatgtggatatcaagcccccccaaattatctgttttaatattgaacctagagctttttttttcccttccctgtccactccatgtaaatgcctttagcatttcagttattgtatattttgtttaaggtgacacttcagcatgccgctaatgtctttgttagtgacagtgcattttgtagtactgtacaagtgttgtgctaacagtaagccatttcttaagttttttgccttgattagggtgccctaatttgagggttttaaaaaaaactatatttttgttaattataaaactgtaaagagctataaaagctattcccatttggttagtcaaaagggttttattgctaaatgtttggtgtaaagttgagacccttttccattttggtgacagatttctttggggaaaaaaggcagctttctgttttataaatgcagacttctgtttattgaatgaagcatatctcagtgtttatctgtcaggttttgaaacatttcatatatgtccaaatacttggcaggatttaaaaaaaaatagtgaatttggtgtaaagttgctattttatggaaatgcctctaactttacattttcattccatctgtagatttttctatctttataaaatattggagttattttttaaggaaaaatagaaaagtagcttgtgaatagctcaaactaagcttacaaatcgcatgtaaaaaagcaaaaaagttatttgtgtctgtttatattgcttccttttttgtagcctttgtacctgtacagggtgacagtaagggccaagcaggagaggcgtaatccttgtataaaataggatccagcgacactcttgtatttatctgttctctttttagtcagtcacttcaaaaaaacaaaaaacaaacaaaaaaaagctgtacattttaacataaaataaattatgatgagccatttttagcctcttgtgtcctgtcatattatgattgatagagaatgaccaatggaactgtatcatgtgtcacgcctcagaacacatacacattttgggaaaataaattatttagtgtaaattggagttatgggattttctgatttgttttgactttgggggaggggttggcaataaataagagtaatatctaataaaaccatcacatataccaaatacctatttaataaattaatttataatggattttaatgcttttcatgaaagtttattttatgcgagtgcataccttctgtatgccaatcattgtctttaaaataaagtgaaattgtttttttcttttggactttgatcttcatttgcaaagagatcccgcacaaatatccagctgcctcactcgcacagtctgtagaaacatccctccaagcctcgcaccagggtagcaaacttcctttttataaagattcataccaaaaaaagcacccaatttgggattgtatgtttgaaaaatcattttctttttaaaaagtgtgaacgttttgctctgttgtgaatgattaattgtatgttttctttagagtctaaagtttagaccc

SEQ ID NO: 637 - DNA, 3354 bp, Homo sapiens
  misc_feature (3251)..(3251): second gene starts at position 3251
atgttcagctttgtggacctccggctcctgctcctcttagcggccaccgccctcctgacgcacggccaagaggaaggccaagtcgagggccaagacgaagacatcccaccaatcacctgcgtacagaacggcctcaggtaccatgaccgagacgtgtggaaacccgagccctgccggatctgcgtctgcgacaacggcaaggtgttgtgcgatgacgtgatctgtgacgagaccaagaactgccccggcgccgaagtccccgagggcgagtgctgtcccgtctgccccgacggctcagagtcacccaccgaccaagaaaccaccggcgtcgagggacccaagggagacactggcccccgaggcccaaggggacccgcaggcccccctggccgagatggcatccctggacagcctggacttcccggaccccccggaccccccggacctcccggaccccctggcctcggaggaaactttgctccccagctgtcttatggctatgatgagaaatcaaccggaggaatttccgtgcctggccccatgggtccctctggtcctcgtggtctccctggcccccctggtgcacctggtccccaaggcttccaaggtccccctggtgagcctggcgagcctggagcttcaggtcccatgggtccccgaggtcccccaggtccccctggaaagaatggagatgatggggaagctggaaaacctggtcgtcctggtgagcgtgggcctcctgggcctcagggtgctcgaggattgcccggaacagctggcctccctggaatgaagggacacagaggtttcagtggtttggatggtgccaagggagatgctggtcctgctggtcctaagggtgagcctggcagccctggtgaaaatggagctcctggtcagatgggcccccgtggcctgcctggtgagagaggtcgccctggagcccctggccctgctggtgctcgtggaaatgatggtgctactggtgctgccgggccccctggtcccaccggccccgctggtcctcctggcttccctggtgctgttggtgctaagggtgaagctggtccccaagggccccgaggctctgaaggtccccagggtgtgcgtggtgagcctggcccccctggccctgctggtgctgctggccctgctggaaaccctggtgctgatggacagcctggtgctaaaggtgccaatggtgctcctggtattgctggtgctcctggcttccctggtgcccgaggcccctctggaccccagggccccggcggccctcctggtcccaagggtaacagcggtgaacctggtgctcctggcagcaaaggagacactggtgctaagggagagcctggccctgttggtgttcaaggaccccctggccctgctggagaggaaggaaagcgaggagctcgaggtgaacccggacccactggcctgcccggaccccctggcgagcgtggtggacctggtagccgtggtttccctggcgcagatggtgttgctggtcccaagggtcccgctggtgaacgtggttctcctggccctgctggccccaaaggatctcctggtgaagctggtcgtcccggtgaagctggtctgcctggtgccaagggtctgactggaagccctggcagccctggtcctgatggcaaaactggcccccctggtcccgccggtcaagatggtcgccccggacccccaggcccacctggtgcccgtggtcaggctggtgtgatgggattccctggacctaaaggtgctgctggagagcccggcaaggctggagagcgaggtgttcccggaccccctggcgctgtcggtcctgctggcaaagatggagaggctggagctcagggaccccctggccctgctggtcccgctggcgagagaggtgaacaaggccctgctggctcccccggattccagggtctccctggtcctgctggtcctccaggtgaagcaggcaaacctggtgaacagggtgttcctggagaccttggcgcccctggcccctctggagcaagaggcgagagaggtttccctggcgagcgtggtgtgcaaggtccccctggtcctgctggtccccgaggggccaacggtgctcccggcaacgatggtgctaagggtgatgctggtgcccctggagctcccggtagccagggcgcccctggccttcagggaatgcctggtgaacgtggtgcagctggtcttccagggcctaagggtgacagaggtgatgctggtcccaaaggtgctgatggctctcctggcaaagatggcgtccgtggtctgactggccccattggtcctcctggccctgctggtgcccctggtgacaagggtgaaagtggtcccagcggccctgctggtcccactggagctcgtggtgcccccggagaccgtggtgagcctggtccccccggccctgctggctttgctggcccccctggtgctgacggccaacctggtgctaaaggcgaacctggtgatgctggtgctaaaggcgatgctggtccccctggccctgccggacccgctggaccccctggccccattggtaatgttggtgctcctggagccaaaggtgctcgcggcagcgctggtccccctggtgctactggtttccctggtgctgctggccgagtcggtcctcctggcccctctggaaatgctggaccccctggccctcctggtcctgctggcaaagaaggcggcaaaggtccccgtggtgagactggccctgctggacgtcctggtgaagttggtccccctggtccccctggccctgctggcgagaaaggatcccctggtgctgatggtcctgctggtgctcctggtactcccgggcctcaaggtattgctggacagcgtggtgtggtcggcctgcctggtcagagaggagagagaggcttccctggtcttcctggcccctctggtgaacctggcaaacaaggtccctctggagcaagtggtgaacgtggtccccctggtcccatgggcccccctggattggctggaccccctggtgaatctggacgtgagggggctcctggtgccgaaggttcccctggacgagacggttctcctggcgccaagggtgaccgtggtgagaccggccccgctggaccccctggtgctcctggtgctcctggtgcccctggccccgttggccctgctggcaagagtggtgatcgtggtgagactggtcctgctggtcccaccggtcctgtcggccctgttggcgcccaaggttggaattgcttttattgggggcggataccgcaaggccccgcccacggtcaggttagtgttctgcccttgcagaggcgccagcagcctgacacctccacc

SEQ ID NO: 638 - DNA, 3354 bp, Homo sapiens; identical to SEQ ID NO: 637
  misc_feature (3251)..(3251): second gene starts at position 3251

SEQ ID NO: 639 - DNA, 3354 bp, Homo sapiens; identical to SEQ ID NO: 637
  misc_feature (3251)..(3251): second gene starts at position 3251

SEQ ID NO: 640 - DNA, 32765 bp, Homo sapiens
  misc_feature (212)..(212): second gene starts at position 212
atgttcagctttgtggacctccggctcctgctcctcttagcggccaccgccctcctgacgcacggccaagaggaaggccaagtcgagggccaagacgaagacatcccaccaatcacctgcgtacagaacggcctcaggtaccatgaccgagacgtgtggaaacccgagccctgccggatctgcgtctgcgacaacggcaaggtgttgtgcgatgacgtgatctgtgacgagaccaagaactgccccggcgccgaagtccccgagggcgagtgctgtcccgtctgccccgacggctcagagtcacccaccgaccaagaaaccaccggcgtcgagggacccaagggagacactggcccccgaggcccaaggggacccgcaggcccccctggccgagatggcatccctggacagcctggacttcccggaccccccggaccccccggacctcccggaccccctggcctcggaggaaactttgctccccagctgtcttatggctatgatgagaaatcaaccggaggaatttccgtgcctggccccatgggtccctctggtcctcgtggtctccctggcccccctggtgcacctggtccccaaggcttccaaggtccccctggtgagcctggcgagcctggagcttcaggtcccatgggtccccgaggtcccccaggtccccctggaaagaatggagatgatggggaagctggaaaacctggtcgtcctggtgagcgtgggcctcctgggcctcagggtgctcgaggattgcccggaacagctggcctccctggaatgaagggacacagaggtttcagtggtttggatggtgccaagggagatgctggtcctgctggtcctaagggtgagcctggcagccctggtgaaaatggagctcctggtcagatgggcccccgtggcctgcctggtgagagaggtcgccctggagcccctggccctgctggtgctcgtggaaatgatggtgctactggtgctgccgggccccctggtcccaccggccccgctggtcctcctggcttccctggtgctgttggtgctaagggtgaagctggtccccaagggccccgaggctctgaaggtccccagggtgtgcgtggtgagcctggcccccctggccctgctggtgctgctggccctgctggaaaccctggtgctgatggacagcctggtgctaaaggtgccaatggtgctcctggtattgctggtgctcctggcttccctggtgcccgaggcccctctggaccccagggccccggcggccctcctggtcccaagggtaacagcggtgaacctggtgctcctggcagcaaaggagacactggtgctaagggagagcctggccctgttggtgttcaaggaccccctggccctgctggagaggaaggaaagcgaggagctcgaggtgaacccggacccactggcctgcccggaccccctggcgagcgtggtggacctggtagccgtggtttccctggcgcagatggtgttgctggtcccaagggtcccgctggtgaacgtggttctcctggccctgctggccccaaaggatctcctggtgaagctggtcgtcccggtgaagctggtctgcctggtgccaagggtctgactggaagccctggcagccctggtcctgatggcaaaactggcccccctggtcccgccggtcaagatggtcgccccggacccccaggcccacctggtgcccgtggtcaggctggtgtgatgggattccctggacctaaaggtgctgctggagagcccggcaaggctggagagcgaggtgttcccggaccccctggcgctgtcggtcctgctggcaaagatggagaggctggagctcagggaccccctggccctgctggtcccgctggcgagagaggtgaacaaggccctgctggctcccccggattccagggtctccctggtcctgctggtcctccaggtgaagcaggcaaacctggtgaacagggtgttcctggagaccttggcgcccctggcccctctggagcaagaggcgagagaggtttccctggcgagcgtggtgtgcaaggtccccctggtcctgctggtccccgaggggccaacggtgctcccggcaacgatggtgctaagggtgatgctggtgcccctggagctcccggtagccagggcgcccctggccttcagggaatgcctggtgaacgtggtgcagctggtcttccagggcctaagggtgacagaggtgatgctggtcccaaaggtgctgatggctctcctggcaaagatggcgtccgtggtctgactggccccattggtcctcctggccctgctggtgcccctggtgacaagggtgaaagtggtcccagcggccctgctggtcccactggagctcgtggtgcccccggagaccgtggtgagcctggtccccccggccctgctggctttgctggcccccctggtgctgacggccaacctggtgctaaaggcgaacctggtgatgctggtgctaaaggcgatgctggtccccctggccctgccggacccgctggaccccctggccccattggtaatgttggtgctcctggagccaaaggtgctcgcggcagcgctggtccccctggtgctactggtttccctggtgctgctggccgagtcggtcctcctggcccctctggaaatgctggaccccctggccctcctggtcctgctggcaaagaaggcggcaaaggtccccgtggtgagactggccctgctggacgtcctggtgaagttggtccccctggtccccctggccctgctggcgagaaaggatcccctggtgctgatggtcctgctggtgctcctggtactcccgggcctcaaggtattgctggacagcgtggtgtggtcggcctgcctggtcagagaggagagagaggcttccctggtcttcctggcccctctggtgaacctggcaaacaaggtccctctggagcaagtggtgaacgtggtccccctggtcccatgggcccccctggattggctggaccccctggtgaatctggacgtgagggggctcctggtgccgaaggttcccctggacgagacggttctcctggcgccaagggtgaccgtggtgagaccggccccgctggaccccctggtgctcctggtgctcctggtgcccctggccccgttggccctgctggcaagagtggtgatcgtggtgagactggtccgtgtgcgactataagcaggtggaggtgactgtgcacaagggtgacgagtgccagctggtgggccctgcacagccgtcccactggaaggtgctcagcagctccggcagcgaggccgccgtgccctccgtgtgcttcctggtgcccccgcccaaccaggaggcccaggaggccgtcaccaggctggaggcccagcaccaggccctggtcacgctgtggcaccagttgcacgtggacatgaagagccttctggcctggcagagccttcgccgcgacgtgcagctcatccgctcctggtccctggccacgttccgcaccctgaagccagaggagcagcgccaagccctgcacagcctggagctgcactaccaggccttcctgcgggacagccaggacgcgggcggcttcggacccgaggaccggctgatggctgagcgcgagtacggctcctgcagccaccactaccagcagctgctgcagagcctggaacagggtgcacaggaagagtctcgctgccagcgctgcatctccgagctcaaagacatccggctgcagctggaggcctgtgagacgcgcaccgtgcaccgcctgcggctgccgctggacaaagagccggcacgggagtgtgcccagcgcatcgccgagcagcagaaggcacaggcagaggtggaggggctgggcaagggggtcgcccggctctctgccgaggccgagaaggtcttggccctaccagagccatcgcctgcggcccccacgctgcgctcggagctggagctgacgctgggcaagctggagcaggtccgcagcctgtctgccatctacctggagaagctcaagaccatcagcctggtgatccgcggcacgcagggggccgaggaggtgctcagggcccacgaggagcagctcaaggaggcccaggccgtgccggccaccctcccggagctcgaggccaccaaggcctctctgaagaagctgcgggcccaggccgaggcacagcagcccacgttcgacgccctgcgggatgagctgcggggggcacaggaggtgggggagcgactgcagcagcggcacggggagcgggacgtggaggtggagcgctggcgggagcgggtcgcccagttgcttgagcgctggcaggctgtgctggcccagaccgacgtgcggcagcgcgagctcgagcaactgggccgccagctgcgttactaccgcgagagtgcagaccccttgggcgcctggctgcaggacgccaggcggcggcaggagcagatccaggccatgccgctggccgacagccaggctgtgcgggagcagctgcggcaggagcaggccctgctggaggagatcgagcgccacggcgagaaggtcgaggagtgccagaggtttgcgaaacagtacatcaacgccatcaaggactatgaactccagctggtgacgtacaaggcgcagcttgagccggtggcctccccggccaagaagcccaaggtccagtcgggatcagagagtgtcatccaggagtacgtggacctgcgtacgcactacagcgagctgaccacactgacgagccagtacatcaagttcatcagcgagactctgcggcgcatggaggaggaggagaggctggctgagcagcagcgggcagaggagcgcgagcggctggccgaggtggaggccgcgctggagaagcagcggcagctggccgaggcgcacgcccaggcaaaggcacaggcggagcgggaggcgaaggagctgcagcagcgcatgcaggaggaggtggtgcggcgggaggaggcggcggtggacgcgcagcagcagaagcgcagcattcaggaggagctgcagcagctgcggcagagctcggaggcggagatccaggccaaggcccggcaggcagaggcggctgagcgcagccggctgcgcatcgaggaggagatccgcgtggtgcgcctgcagttggaggccaccgagcgccagcgtggcggggctgagggggagctgcaggcactgcgtgcacgggcggaggaggctgaggcacaaaagcgacaggcgcaggaggaggccgagcgcttgcggaggcaggtgcaggacgagagccagcgtaagcggcaggcggaggtggagctggcctcgcgcgtgaaggccgaggccgaggcggcgcgcgagaagcagcgggccctgcaggccctggaggagctgcggctgcaggcggaggaggcggagcggcgcctgcggcaggccgaggtggagcgagcgcggcaggtacaggtggccctggagacggcgcagcgcagtgcagaggcggagctgcagagcaaacgcgcctccttcgccgagaagacggcacagctggagcgctccctgcaggaggaacacgtggctgtggcacagctgcgggaggaggctgagcggcgggcacagcagcaggccgaggccgagcgggcgcgcgaggaggcagagcgggagctggagcgctggcagctcaaggccaacgaggcgctacggctgcggctgcaggcggaggaggtggcgcagcagaagagcctggcgcaggccgaggctgagaagcagaaggaggaggcggagcgcgaggcgcggcggcgcggcaaggcggaggagcaggccgtccggcagcgggagctggctgaacaagagctggagaagcagcggcagctggcggaaggcaccgcgcagcagcgcctggccgcggagcaggagttgatccggctgcgggccgagacggagcagggggagcagcagcggcagctgctggaggaggagctggcccggctgcagcgtgaggcggctgcagccacgcagaaacggcaggagctggaagccgagctggccaaggtgcgggccgagatggaggtgctgctggccagcaaggcgagggctgaggaggagtcgcgctccaccagcgagaagtccaagcagaggctggaggccgaggccggccggttccgcgagctggccgaggaggccgcccgcctgcgtgccctggcggaagaggccaagcggcagcggcagctggccgaggaagacgcggcgcggcagcgggccgaggcggagcgggtgcttgcggagaagctggccgccatcggcgaggccacgcggctcaagacggaggcggagatcgcgctcaaggagaaggaggcggagaacgagcgcctgcggcggctggcggaggacgaggccttccagcggcggcggctggaggagcaggccgcgcaacacaaggctgacatcgaggagcgcctggcccagctgcgcaaggcatcggacagcgagctggagcggcagaaggggctggtggaggacacgctgaggcagcggcggcaggtggaggaggagatcctggcgctgaaggcgagcttcgagaaggcggccgctggcaaggcggagctggagctggagctgggacgcatccgcagcaacgcggaggacacgctgcgcagcaaggagcaggccgagctggaggctgcgaggcagcggcagctggcggcggaggaggagcggcggcgccgtgaggctgaggagcgcgtgcagaagagcctggcggccgaggaggaggccgcacggcagcggaaggcggcgctggaggaagtcgagcggctgaaagccaaggtggaggaggcgcggcgcctgcgggagcgagcggagcaggagtcggcgcggcagctgcagctggcccaggaggccgcccagaagcggctgcaggcggaagagaaggcacacgccttcgcggtgcagcagaaggagcaggagctacagcagacgctgcagcaggagcagagcgtgctggaccagctgcgcggcgaggcggaggcggcccggcgggcggctgaggaggcggaggaggcccgggtgcaggcggagcgtgaggcggcgcagtcccggcggcaggtggaagaggccgagcggctgaagcagtcggcagaggagcaggcacaggcccgggctcaggcacaggcggctgcagagaagctgcgcaaggaggccgagcaagaggcggcgcggcgggcacaggcggagcaggcggccctgcggcagaagcaggcagctgacgcggagatggagaagcataagaaattcgccgagcagacgctgcggcagaaggcgcaggtggagcaggagctgacaacactgcggctgcagctggaggagaccgaccaccagaagaacctgctggacgaggagctgcagcggctgaaggcggaggccacggaggccgcacgccagcgcagccaggtggaggaggagctcttctcggtgcgcgtgcagatggaggagctgagcaagctcaaggcacgcatcgaggctgagaaccgcgcactcatcttgcgtgacaaggacaatacgcagcgcttcctgcaggaggaggctgagaagatgaagcaggtggcggaggaggccgcgcggctgagtgtggcggcccaagaggctgcgcgactgcggcagctggcagaggaggacctggcacagcagcgggccttggcagagaagatgctcaaggagaagatgcaggcggtgcaggaggccacgcgactcaaggctgaggcggaactgctgcagcagcagaaggagcttgcgcaggagcaggcgcggcggctgcaggaggacaaggagcagatggcgcagcagctggcggaggagacgcagggcttccagcggacgctggaggccgagcggcagcggcagctggagatgagcgctgaggctgagcgcctcaagctgcgtgtggccgagatgagccgagcccaggcccgcgctgaggaggacgcccagcgcttccggaagcaggcggaggagatcggtgagaagctgcaccgcacggagctcgccacccaggagaaggtgaccctggtgcagacactggagatccagcgacagcagagtgaccatgatgccgagcgcctgcgggaggccatcgctgagctggagcgtgagaaggagaagctccaacaggaggccaaactgctgcagctcaagtctgaggagatgcagacggtgcagcaggagcagctgctgcaggagacgcaggccctgcagcaaagcttcctctctgaaaaggacagcctgctacagcgggagcgcttcatcgagcaggagaaggccaagctggagcagctcttccaggacgaggtggccaaggcacagcagctgcgtgaggagcagcagcggcagcagcagcagatggagcaggaacggcagcggctggtggccagcatggaggaggcgcggcggcggcagcatgaggccgaggagggcgtgcggcgcaagcaggaggagctgcagcagctggagcagcagcggcggcagcaggaggagctgctggctgaggagaaccagaggctgcgtgagcagctgcagctcctggaggagcagcaccgggccgcgctggcgcactcagaggaggtcactgcctcgcaggtggctgccacaaagaccctgcccaatggccgggatgcacttgatggccccgcggcagaggcagagccggagcacagcttcgatggcctgcggcggaaggtgtcagctcagaggctgcaggaggccggcatcctgagtgcggaggagctgcagcggttggcgcagggccacaccacggtggacgagctcgcacggcgggaagacgtgcgccactacctgcagggccgcagcagtatcgcagggctgttgctgaaggccaccaatgagaagctgagtgtttacgccgccctgcagaggcagctgctgagtcccggcacggccctcatcctgctggaggcgcaggcggcctcaggcttcctgctggaccctgtgcggaaccggcggctgaccgtcaacgaggctgtgaaggagggtgtggtgggccccgagctgcaccacaagctgctgtcggccgagcgcgccgtcactggctacaaggacccctacactggccagcagatctctctcttccaagccatgcagaagggcctcatcgtccgggagcacggcatccgcctgctggaggcccagatcgccacgggcggcgttatcgaccccgtgcacagccaccgcgtgcccgtggacgtggcctaccggcgcggctacttcgacgaggagatgaaccgcgtcctggcggaccccagcgacgacaccaagggcttctttgaccccaacacgcacgagaacctcacgtacctgcagctactggagcgctgcgtggaggaccccgagacgggcctgtgccttctgccactcacggataaggctgccaagggcggggagctggtctacactgactccgaggcccgggacgtctttgagaaggccaccgtgtctgcgccgttcggcaagttccagggcaagacggtgaccatttgggagatcatcaactcggaatacttcacggcagagcagcggcgggacctgctgcggcagttccgcacgggccggatcacagtggagaagatcatcaagatcatcatcacggtggtggaggagcaggagcagaagggccggctttgctttgagggcctgcgcagcctggtgccagccgccgagctgctggagagcagggtcatcgaccgcgagctctaccagcagctgcagcgaggtgagcgctctgtgcgagacgtagccgaggtggacactgtgcggcgggctctccggggtgccaacgtcatcgcgggtgtatggctggaggaggcggggcagaagctgagtatctacaatgccctgaagaaagacctgctgccatccgacatggccgtggccctgttggaagcccaggccggcaccgggcacatcatcgaccccgccaccagcgcccggctgaccgtggacgaggcagtgcgtgctggcctggtgggccccgagtttcatgagaagctgctatcagccgagaaggctgtgacagggtacagggacccctacacagggcagagcgtctccctgttccaggccctgaagaagggcctcattccccgggagcagggcctgcgcctgttggacgcccagctgtccacgggcggcatcgtggaccccagcaagagccaccgcgtgcccctggatgtcgcctgcgcccgaggctgcctggatgaggagaccagcagggccctgtcggcaccaagggccgacgccaaggcctacagtgaccccagcacaggggagccggccacctacggcgagctccagcagcggtgccggcccgaccagctgaccgggctgagcctgctgccgctctcagaaaaggctgctcgggcccggcaggaggagctctactcagagctgcaggcccgtgagacctttgaaaagaccccggttgaggtccccgtgggtggcttcaagggcaggacggtgacggtgtgggagctcatcagctctgagtacttcactgcggagcagcggcaggagctgttgcgtcagttccgcacgggcaaggtcaccgtggagaaggtcatcaagattctcattaccatcgtggaggaggtggagaccctgcggcaggagaggctgtccttcagcggcctccgtgcccctgtgccagccagcgagctcctggcttccggggtcctcagcagagcccagtttgagcagctcaaggacggcaagacgacggtcaaggacctttcggagctgggctccgtgcggacgctgctgcagggcagtggctgcctcgccggcatctacctggaggacaccaaggagaaggtgtccatctacgaggccatgcgccggggcctgctgagagccacaacggctgcgctcctgctggaggcgcaggcggccactggcttcctggtggaccccgtgcggaaccagcgcctgtatgtccacgaggccgtgaaggcgggcgtggtgggccccgagcttcacgagcagctgctgtctgccgagaaggccgtcaccggctacagagacccctactcgggcagcaccatctccctcttccaggccatgcagaagggcctggttctccggcagcacggcatccgcctgctggaggcccagatcgccacgggcggcatcatcgaccccgtgcacagccaccgcgtgcctgtggacgtggcctaccagcgcggctacttcagtgaggagatgaaccgcgtcctggcggaccccagcgacgacaccaagggcttctttgaccccaacacgcatgagaacctcacgtacaggcagctgctggagcggtgcgtggaggaccccgagacgggcttgcgccttctgccactgaaaggggcggagaaggctgaggtggtggagaccacgcaggtgtacactgaggaggagacaagaagggcatttgaagagacacagatcgacattcccggcggcggcagccacggcggctccaccatgtccctgtgggaggtgatgcagtcggacctgatccccgaggagcagcgggcccagctgatggctgacttccaggccggccgggtgaccaaggaacgcatgatcatcatcatcatcgagatcattgagaagacagagatcatccgccagcagggtctggcctcctacgactacgtgcgccgccgcctcacggctgaggacctgttcgaggctcggatcatctctctcgagacctacaacctgctccgggagggcaccaggagcctccgtgaggctctcgaggcggagtccgcctggtgctacctctatggcacgggctccgtggctggtgtctacctgcccggttccaggcagacactgagcatctaccaggctctcaagaaagggctgctgagtgccgaggtggcccgcctgctgctggaggcacaggcagccacaggcttcctgctggacccggtgaagggggagcggctgactgtggatgaggctgtgcggaagggcctcgtggggcccgagctgcacgaccgcctgctctcggctgagcgggcggtcaccggctaccgtgacccctacaccgagcagaccatctcgctcttccaggccatgaagaaggagctgatccctactgaggaggccctgcggctgctggatgcccagctggccaccggcggcatcgtggacccccgcctgggcttccaccttcccctggaggtggcttaccagcgtggctacctcaacaaggacacgcacgaccagctgtcagagcccagcgaggtgcgcagctacgtggacccgtccaccgacgagcgcctcagctacacgcagctgctcaggcggtgccgtcgtgacgacggcaccggccagctgctcctgccactgtcggacgcccgcaagctgaccttccgtggcctgcggaagcagatcaccatggaggagctggtgcgctcgcaggtcatggacgaggccacggcgctgcagctgcgggagggcctgacctccatcgaggaggtcaccaagaacttgcagaagttcctggaaggcaccagctgcatcgctggtgtcttcgtggacgccaccaaggaacggctctcggtgtaccaggccatgaagaagggcatcatccgccccggcacagcctttgagctcctggaggcgcaggcggccaccggttacgtcatcgaccccatcaagggactgaagctgacggtggaggaggctgtgcgtatgggcattgtgggccccgagttcaaggacaagctgctgtcggccgagcgcgccgtcactgggtacaaggacccctactctgggaagctcatctccctcttccaggccatgaagaagggcctgatcctgaaggaccatggcatccgcctgctggaggcccagatcgccacgggcggcatcatcgaccctgaggagagccaccggctgcccgtggaggtggcctacaagcgcggcctcttcgatgaggagatgaacgagatcctgaccgacccctcggacgacaccaagggcttctttgaccctaacacggaggagaacctcacctacctgcagctgatggagcgttgtatcactgacccccagacgggcctgtgtctcttgccgctgaaggagaagaagcgggagcggaagacgtcctccaagtcctccgtgcgcaagcgccgagtggtcatcgtggaccccgagacgggcaaggagatgtcagtgtacgaggcctaccgcaagggcctgattgaccaccagacgtacctggagctgtccgagcaggagtgcgagtgggaggagatcaccatctcctcctcggacggcgtggtcaagtccatgatcatcgaccgccgctccgggcgccagtacgacatcgatgatgccatcgccaagaacctcatcgaccgctcggcactggaccagtaccgcgccggcacgctctccatcaccgagttcgccgacatgctctcgggcaacgccggtggtttccgctcccgttcctcctcggtgggatcctcctcctcctaccccatcagccccgccgtctccaggacccagctggcctcctggtcagaccccactgaggagacgggccccgtggctggcatcctggacacggagacgctggagaaggtgtccatcaccgaggccatgcaccggaacctggtggataacatcacggggcagcggctgctggaggcgcaggcctgcaccgggggcatcatcgaccccagcaccggtgagcgcttccctgtcaccgacgccgtcaacaagggcctggtggacaagatcatggtggaccgcatcaacctggcccagaaggccttctgcggcttcgaggacccacgcaccaagaccaagatgtcggccgcccaggccctgaagaagggctggctctactacgaggccggccagcgcttcctggaggtgcagtacctgaccggcggcttgatcgagcccgacacgccgggccgcgtgcccctggacgaggccctgcagcgcggcacggtggacgcccgcaccgcacagaagctgcgtgacgtgggcgcctactccaagtacctcacctgccctaagaccaagctcaagatctcctataaggacgcgctggaccgcagcatggtggaggagggcacggggctgcggctgctggaggctgccgcgcagtccaccaagggctactacagcccctacagcgtcagcggctccggctctaccgctggctcccgcaccggctcgcgcaccggctcccgggccggctcccgccgcggcagctttgacgccaccggctccggcttctccatgaccttctcttcatcctcctactcctcctcgggctacggccgccgctacgcctcggggtcctcggcctccctggggggccctgagtctgccgtggcctgaggctgcctgcgcccaccccgctctgcatgcggcccagcccggctcccaccgaggcgcgggggccgttttcaacgcttaaaggtgtcttcctcccaagtggtgcctaaagtttaaccaaaaagaccagactaatatattaatatatatctgctgtccagacagcctgtatcttgggggacagggctggcccagccctgctggccgcctcaccccctcgggtctcctcactcccttctacctgccactcacacagccaggtgccttggagggtcccaagctgggccccagcccaccctcctgtcttcccagggtagcccgcctgccagtcctagctgcacagggcagctgggcccaaccctgtctgtagagggccctggtgtttctagcactggcctgcacggtgggccttgctggggacggggggccccagtcagcctctctcccagtctacccagagaagccccttccccatgggaagacgaggccctcgggcccagcccccacagtgctgtctgatctgtgctttccagctcaccccccacactcactcctgagacccctggcctccggcgtcagcctccagcctctgttcccctagtaagtgccttccatgtcggcctctaaccccaggccccgaggacccagacccagtggggaggcggacgttccagccggcatggctgggaactgcagacctgtcctcctggtgggtccaggggcccctccagcttgtggagccccacactggggtgccgcctgcccgtctctctcccatggagccccagccccctttgggcccagggacaccagccaggctctgtgctgaccctcctgttgcacccagccctggtctcagcagcgaccacccctgcctccaccctctgagctttgcatgttccactaaccccgggcgggtggcaggtggaggtgtcaggctgctggcgcctctgcaagggcagaacactaacctgaccgtgggcggggccttgcggtatccgcccccaataaaagcaattccaaccttcctccgaggggcctgtgacctcccacacccctggcccgctccgtctgccccgtgggctcctgccaccgtccccgatgaagatcgtgcccgatgagcgggatcgtgtgcagaagaaaaccttcaccaagtgggtcaacaagcacctcatcaaggcccagaggcacatcagtgacctgtatgaagacctccgcgatggccacaacctcatctccctgctggaggtcctctcgggggacagcctgccccgggagaaggggaggatgcgtttccacaagctgcagaatgtccagattgccctggactacctccggcaccgccaggtgaagctggtgaacatcaggaatgatgacatcgctgacggcaaccccaagctgacccttggcctcatctggacaatcattctgcacttccagatctcagatatccaggtgagtgggcagtcggaggacatgacggccaaggagaagctgctgctgtggtcgcagcgaatggtggaggggtaccagggcctgcgatgcgacaacttcacctccagctggagagacggccgcctcttcaatgccatcatccaccggcacaagcccctgctcatcgacatgaacaaggtgtaccggcagaccaacctggagaacctggaccaggccttctctgtggcggagcgggacctgggagtgacgcggctcctggaccctgaggacgtggatgtccctcagcccgacgagaagtccatcatcacctacgtctcgtcgctgtatgacgccatgccccgcgtgccggacgtgcaggatggggtgagggccaacgagctgcagctgcgctggcaggagtaccgggagctggtgctgctgctgcttcagtggatgcgacaccacacggccgcctttgaggaacgcaggttcccctccagcttcgaggagattgagatcctgtggtctcagttcctgaagtttaaggagatggagctaccagccaaggaggccgacaagaacaggtccaagggcatctaccaatccctggagggagcggtgcaagcaggccagctcaaggtgccccctggctaccacccgctggatgtggagaaggagtggggcaagctgcacgtggccatcctggagcgggagaagcagctccgcagcgagtttgagaggctggagtgtcttcagcgcatcgtgaccaagctgcagatggaggcggggctgtgtgaggagcagctgaaccaggccgacgccctgctgcagtcggatgtccggctgctggctgcaggcaaagtgccacagcgggcgggggaggtggaacgggacttggacaaggcggatagcatgatccggctgctcttcaacgacgtgcagaccctcaaggatggacggcacccgcagggcgagcagatgtaccgcagggtgtaccgtctgcacgagcgcctggtagccatccgcaccgagtacaacctacggctgaaggcaggcgtggcggcccctgcaacccaggtggcccaggtgactctgcagagtgtgcagaggcgccccgagctggaggactccactctgcgctacctgcaggacctgctggcctgggtggaggagaaccagcaccgtgtggatggcgctgagtggggtgtggacctgcccagcgtggaggcgcagctgggcagccaccgaggcctgcaccagtccatcgaagaattccgggccaagatcgagcgggcacggagtgacgagggccagctctcccccgccacccggggtgcctaccgtgactgcctgggtcggctggacctgcagtacgccaagctgctgaactcctccaaggcccgcctcaggtccctggagagcttgcacagctttgtggcagccgccactaaggagctaatgtggctgaatgagaaggaggaggaggaggtgggcttcgactggagcgaccgcaacaccaacatgaccgccaagaaggagagctactcggcgctgatgcgggagctggagctgaaggagaagaagatcaaggagctccaaaatgctggggaccggctgctgcgggaggaccacccggcccggcccacggtggagtccttccaggcggccctgcagacgcagtggagctggatgctacagctgtgctgctgtatcgaggcacacctgaaggagaacgctgcctactttcagttcttctcagatgtgcgggaggccgaggggcagttgcagaagctgcaggaggcactgcgtaggaaatacagttgtgatcgctccgccaccgtcacccggctggaggacctgctgcaggatgcccaggacgagaaggaacagctgaacgagtacaagggccacctctcaggcctggccaagcgggccaaggccgtcgtgcagctgaagccccgccacccagcccaccccatgcggggccgcctgcccctgctggccgtgtgcgactataagcaggtggaggtgactgtgcacaagggtgacgagtgccagctggtgggccctgcacagccgtcccactggaaggtgctcagcagctccggcagcgaggccgccgtgccctccgtgtgcttcctggtgcccccgcccaaccaggaggcccaggaggccgtcaccaggctggaggcccagcaccaggccctggtcacgctgtggcaccagttgcacgtggacatgaagagccttctggcctggcagagccttcgccgcgacgtgcagctcatccgctcctggtccctggccacgttccgcaccctgaagccagaggagcagcgccaagccctgcacagcctggagctgcactaccaggccttcctgcgggacagccaggacgcgggcggcttcggacccgaggaccggctgatggctgagcgcgagtacggctcctgcagccaccactaccagcagctgctgcagagcctggaacagggtgcacaggaagagtctcgctgccagcgctgcatctccgagctcaaagacatccggctgcagctggaggcctgtgagacgcgcaccgtgcaccgcctgcggctgccgctggacaaagagccggcacgggagtgtgcccagcgcatcgccgagcagcagaaggcacaggcagaggtggaggggctgggcaagggggtcgcccggctctctgccgaggccgagaaggtcttggccctaccagagccatcgcctgcggcccccacgctgcgctcggagctggagctgacgctgggcaagctggagcaggtccgcagcctgtctgccatctacctggagaagctcaagaccatcagcctggtgatccgcggcacgcagggggccgaggaggtgctcagggcccacgaggagcagctcaaggaggcccaggccgtgccggccaccctcccggagctcgaggccaccaaggcctctctgaagaagctgcgggcccaggccgaggcacagcagcccacgttcgacgccctgcgggatgagctgcggggggcacaggaggtgggggagcgactgcagcagcggcacggggagcgggacgtggaggtggagcgctggcgggagcgggtcgcccagttgcttgagcgctggcaggctgtgctggcccagaccgacgtgcggcagcgcgagctcgagcaactgggccgccagctgcgttactaccgcgagagtgcagaccccttgggcgcctggctgcaggacgccaggcggcggcaggagcagatccaggccatgccgctggccgacagccaggctgtgcgggagcagctgcggcaggagcaggccctgctggaggagatcgagcgccacggcgagaaggtcgaggagtgccagaggtttgcgaaacagtacatcaacgccatcaaggactatgaactccagctggtgacgtacaaggcgcagcttgagccggtggcctccccggccaagaagcccaaggtccagtcgggatcagagagtgtcatccaggagtacgtggacctgcgtacgcactacagcgagctgaccacactgacgagccagtacatcaagttcatcagcgagactctgcggcgcatggaggaggaggagaggctggctgagcagcagcgggcagaggagcgcgagcggctggccgaggtggaggccgcgctggagaagcagcggcagctggccgaggcgcacgcccaggcaaaggcacaggcggagcgggaggcgaaggagctgcagcagcgcatgcaggaggaggtggtgcggcgggaggaggcggcggtggacgcgcagcagcagaagcgcagcattcaggaggagctgcagcagctgcggcagagctcggaggcggagatccaggccaaggcccggcaggcagaggcggctgagcgcagccggctgcgcatcgaggaggagatccgcgtggtgcgcctgcagttggaggccaccgagcgccagcgtggcggggctgagggggagctgcaggcactgcgtgcacgggcggaggaggctgaggcacaaaagcgacaggcgcaggaggaggccgagcgcttgcggaggcaggtgcaggacgagagccagcgtaagcggcaggcggaggtggagctggcctcgcgcgtgaaggccgaggccgaggcggcgcgcgagaagcagcgggccctgcaggccctggaggagctgcggctgcaggcggaggaggcggagcggcgcctgcggcaggccgaggtggagcgagcgcggcaggtacaggtggccctggagacggcgcagcgcagtgcagaggcggagctgcagagcaaacgcgcctccttcgccgagaagacggcacagctggagcgctccctgcaggaggaacacgtggctgtggcacagctgcgggaggaggctgagcggcgggcacagcagcaggccgaggccgagcgggcgcgcgaggaggcagagcgggagctggagcgctggcagctcaaggccaacgaggcgctacggctgcggctgcaggcggaggaggtggcgcagcagaagagcctggcgcaggccgaggctgagaagcagaaggaggaggcggagcgcgaggcgcggcggcgcggcaaggcggaggagcaggccgtccggcagcgggagctggctgaacaagagctggagaagcagcggcagctggcggaaggcaccgcgcagcagcgcctggccgcggagcaggagttgatccggctgcgggccgagacggagcagggggagcagcagcggcagctgctggaggaggagctggcccggctgcagcgtgaggcggctgcagccacgcagaaacggcaggagctggaagccgagctggccaaggtgcgggccgagatggaggtgctgctggccagcaaggcgagggctgaggaggagtcgcgctccaccagcgagaagtccaagcagaggctggaggccgaggccggccggttccgcgagctggccgaggaggccgcccgcctgcgtgccctggcggaagaggccaagcggcagcggcagctggccgaggaagacgcggcgcggcagcgggccgaggcggagcgggtgcttgcggagaagctggccgccatcggcgaggccacgcggctcaagacggaggcggagatcgcgctcaaggagaaggaggcggagaacgagcgcctgcggcggctggcggaggacgaggccttccagcggcggcggctggaggagcaggccgcgcaacacaaggctgacatcgaggagcgcctggcccagctgcgcaaggcatcggacagcgagctggagcggcagaaggggctggtggaggacacgctgaggcagcggcggcaggtggaggaggagatcctggcgctgaaggcgagcttcgagaaggcggccgctggcaaggcggagctggagctggagctgggacgcatccgcagcaacgcggaggacacgctgcgcagcaaggagcaggccgagctggaggctgcgaggcagcggcagctggcggcggaggaggagcggcggcgccgtgaggctgaggagcgcgtgcagaagagcctggcggccgaggaggaggccgcacggcagcggaaggcggcgctggaggaagtcgagcggctgaaagccaaggtggaggaggcgcggcgcctgcgggagcgagcggagcaggagtcggcgcggcagctgcagctggcccaggaggccgcccagaagcggctgcaggcggaagagaaggcacacgccttcgcggtgcagcagaaggagcaggagctacagcagacgctgcagcaggagcagagcgtgctggaccagctgcgcggcgaggcggaggcggcccggcgggcggctgaggaggcggaggaggcccgggtgcaggcggagcgtgaggcggcgcagtcccggcggcaggtggaagaggccgagcggctgaagcagtcggcagaggagcaggcacaggcccgggctcaggcacaggcggctgcagagaagctgcgcaaggaggccgagcaagaggcggcgcggcgggcacaggcggagcaggcggccctgcggcagaagcaggcagctgacgcggagatggagaagcataagaaattcgccgagcagacgctgcggcagaaggcgcaggtggagcaggagctgacaacactgcggctgcagctggaggagaccgaccaccagaagaacctgctggacgaggagctgcagcggctgaaggcggaggccacggaggccgcacgccagcgcagccaggtggaggaggagctcttctcggtgcgcgtgcagatggaggagctgagcaagctcaaggcacgcatcgaggctgagaaccgcgcactcatcttgcgtgacaaggacaatacgcagcgcttcctgcaggaggaggctgagaagatgaagcaggtggcggaggaggccgcgcggctgagtgtggcggcccaagaggctgcgcgactgcggcagctggcagaggaggacctggcacagcagcgggccttggcagagaagatgctcaaggagaagatgcaggcggtgcaggaggccacgcgactcaaggctgaggcggaactgctgcagcagcagaaggagcttgcgcaggagcaggcgcggcggctgcaggaggacaaggagcagatggcgcagcagctggcggaggagacgcagggcttccagcggacgctggaggccgagcggcagcggcagctggagatgagcgctgaggctgagcgcctcaagctgcgtgtggccgagatgagccgagcccaggcccgcgctgaggaggacgcccagcgcttccggaagcaggcggaggagatcggtgagaagctgcaccgcacggagctcgccacccaggagaaggtgaccctggtgcagacactggagatccagcgacagcagagtgaccatgatgccgagcgcctgcgggaggccatcgctgagctggagcgtgagaaggagaagctccaacaggaggccaaactgctgcagctcaagtctgaggagatgcagacggtgcagcaggagcagctgctgcaggagacgcaggccctgcagcaaagcttcctctctgaaaaggacagcctgctacagcgggagcgcttcatcgagcaggagaaggccaagctggagcagctcttccaggacgaggtggccaaggcacagcagctgcgtgaggagcagcagcggcagcagcagcagatggagcaggaacggcagcggctggtggccagcatggaggaggcgcggcggcggcagcatgaggccgaggagggcgtgcggcgcaagcaggaggagctgcagcagctggagcagcagcggcggcagcaggaggagctgctggctgaggagaaccagaggctgcgtgagcagctgcagctcctggaggagcagcaccgggccgcgctggcgcactcagaggaggtcactgcctcgcaggtggctgccacaaagaccctgcccaatggccgggatgcacttgatggccccgcggcagaggcagagccggagcacagcttcgatggcctgcggcggaaggtgtcagctcagaggctgcaggaggccggcatcctgagtgcggaggagctgcagcggttggcgcagggccacaccacggtggacgagctcgcacggcgggaagacgtgcgccactacctgcagggccgcagcagtatcgcagggctgttgctgaaggccaccaatgagaagctgagtgtttacgccgccctgcagaggcagctgctgagtcccggcacggccctcatcctgctggaggcgcaggcggcctcaggcttcctgctggaccctgtgcggaaccggcggctgaccgtcaacgaggctgtgaaggagggtgtggtgggccccgagctgcaccacaagctgctgtcggccgagcgcgccgtcactggctacaaggacccctacactggccagcagatctctctcttccaagccatgcagaagggcctcatcgtccgggagcacggcatccgcctgctggaggcccagatcgccacgggcggcgttatcgaccccgtgcacagccaccgcgtgcccgtggacgtggcctaccggcgcggctacttcgacgaggagatgaaccgcgtcctggcggaccccagcgacgacaccaagggcttctttgaccccaacacgcacgagaacctcacgtacctgcagctactggagcgctgcgtggaggaccccgagacgggcctgtgccttctgccactcacggataaggctgccaagggcggggagctggtctacactgactccgaggcccgggacgtctttgagaaggccaccgtgtctgcgccgttcggcaagttccagggcaagacggtgaccatttgggagatcatcaactcggaatacttcacggcagagcagcggcgggacctgctgcggcagttccgcacgggccggatcacagtggagaagatcatcaagatcatcatcacggtggtggaggagcaggagcagaagggccggctttgctttgagggcctgcgcagcctggtgccagccgccgagctgctggagagcagggtcatcgaccgcgagctctaccagcagctgcagcgaggtgagcgctctgtgcgagacgtagccgaggtggacactgtgcggcgggctctccggggtgccaacgtcatcgcgggtgtatggctggaggaggcggggcagaagctgagtatctacaatgccctgaagaaagacctgctgccatccgacatggccgtggccctgttggaagcccaggccggcaccgggcacatcatcgaccccgccaccagcgcccggctgaccgtggacgaggcagtgcgtgctggcctggtgggccccgagtttcatgagaagctgctatcagccgagaaggctgtgacagggtacagggacccctacacagggcagagcgtctccctgttccaggccctgaagaagggcctcattccccgggagcagggcctgcgcctgttggacgcccagctgtccacgggcggcatcgtggaccccagcaagagccaccgcgtgcccctggatgtcgcctgcgcccgaggctgcctggatgaggagaccagcagggccctgtcggcaccaagggccgacgccaaggcctacagtgaccccagcacaggggagccggccacctacggcgagctccagcagcggtgccggcccgaccagctgaccgggctgagcctgctgccgctctcagaaaaggctgctcgggcccggcaggaggagctctactcagagctgcaggcccgtgagacctttgaaaagaccccggttgaggtccccgtgggtggcttcaagggcaggacggtgacggtgtgggagctcatcagctctgagtacttcactgcggagcagcggcaggagctgttgcgtcagttccgcacgggcaaggtcaccgtggagaaggtcatcaagattctcattaccatcgtggaggaggtggagaccctgcggcaggagaggctgtccttcagcggcctccgtgcccctgtgccagccagcgagctcctggcttccggggtcctcagcagagcccagtttgagcagctcaaggacggcaagacgacggtcaaggacctttcggagctgggctccgtgcggacgctgctgcagggcagtggctgcctcgccggcatctacctggaggacaccaaggagaaggtgtccatctacgaggccatgcgccggggcctgctgagagccacaacggctgcgctcctgctggaggcgcaggcggccactggcttcctggtggaccccgtgcggaaccagcgcctgtatgtccacgaggccgtgaaggcgggcgtggtgggccccgagcttcacgagcagctgctgtctgccgagaaggccgtcaccggctacagagacccctactcgggcagcaccatctccctcttccaggccatgcagaagggcctggttctccggcagcacggcatccgcctgctggaggcccagatcgccacgggcggcatcatcgaccccgtgcacagccaccgcgtgcctgtggacgtggcctaccagcgcggctacttcagtgaggagatgaaccgcgtcctggcggaccccagcgacgacaccaagggcttctttgaccccaacacgcatgagaacctcacgtacaggcagctgctggagcggtgcgtggaggaccccgagacgggcttgcgccttctgccactgaaaggggcggagaaggctgaggtggtggagaccacgcaggtgtacactgaggaggagacaagaagggcatttgaagagacacagatcgacattcccggcggcggcagccacggcggctccaccatgtccctgtgggaggtgatgcagtcggacctgatccccgaggagcagcgggcccagctgatggctgacttccaggccggccgggtgaccaaggaacgcatgatcatcatcatcatcgagatcattgagaagacagagatcatccgccagcagggtctggcctcctacgactacgtgcgccgccgcctcacggctgaggacctgttcgaggctcggatcatctctctcgagacctacaacctgctccgggagggcaccaggagcctccgtgaggctctcgaggcggagtccgcctggtgctacctctatggcacgggctccgtggctggtgtctacctgcccggttccaggcagacactgagcatctaccaggctctcaagaaagggctgctgagtgccgaggtggcccgcctgctgctggaggcacaggcagccacaggcttcctgctggacccggtgaagggggagcggctgactgtggatgaggctgtgcggaagggcctcgtggggcccgagctgcacgaccgcctgctctcggctgagcgggcggtcaccggctaccgtgacccctacaccgagcagaccatctcgctcttccaggccatgaagaaggagctgatccctactgaggaggccctgcggctgctggatgcccagctggccaccggcggcatcgtggacccccgcctgggcttccaccttcccctggaggtggcttaccagcgtggctacctcaacaaggacacgcacgaccagctgtcagagcccagcgaggtgcgcagctacgtggacccgtccaccgacgagcgcctcagctacacgcagctgctcaggcggtgccgtcgtgacgacggcaccggccagctgctcctgccactgtcggacgcccgcaagctgaccttccgtggcctgcggaagcagatcaccatggaggagctggtgcgctcgcaggtcatggacgaggccacggcgctgcagctgcgggagggcctgacctccatcgaggaggtcaccaagaacttgcagaagttcctggaaggcaccagctgcatcgctggtgtcttcgtggacgccaccaaggaacggctctcggtgtaccaggccatgaagaagggcatcatccgccccggcacagcctttgagctcctggaggcgcaggcggccaccggttacgtcatcgaccccatcaagggactgaagctgacggtggaggaggctgtgcgtatgggcattgtgggccccgagttcaaggacaagctgctgtcggccgagcgcgccgtcactgggtacaaggacccctactctgggaagctcatctccctcttccaggccatgaagaagggcctgatcctgaaggaccatggcatccgcctgctggaggcccagatcgccacgggcggcatcatcgaccctgaggagagccaccggctgcccgtggaggtggcctacaagcgcggcctcttcgatgaggagatgaacgagatcctgaccgacccctcggacgacaccaagggcttctttgaccctaacacggaggagaacctcacctacctgcagctgatggagcgttgtatcactgacccccagacgggcctgtgtctcttgccgctgaaggagaagaagcgggagcggaagacgtcctccaagtcctccgtgcgcaagcgccgagtggtcatcgtggaccccgagacgggcaaggagatgtcagtgtacgaggcctaccgcaagggcctgattgaccaccagacgtacctggagctgtccgagcaggagtgcgagtgggaggagatcaccatctcctcctcggacggcgtggtcaagtccatgatcatcgaccgccgctccgggcgccagtacgacatcgatgatgccatcgccaagaacctcatcgaccgctcggcactggaccagtaccgcgccggcacgctctccatcaccgagttcgccgacatgctctcgggcaacgccggtggtttccgctcccgttcctcctcggtgggatcctcctcctcctaccccatcagccccgccgtctccaggacccagctggcctcctggtcagaccccactgaggagacgggccccgtggctggcatcctggacacggagacgctggagaaggtgtccatcaccgaggccatgcaccggaacctggtggataacatcacggggcagcggctgctggaggcgcaggcctgcaccgggggcatcatcgaccccagcaccggtgagcgcttccctgtcaccgacgccgtcaacaagggcctggtggacaagatcatggtggaccgcatcaacctggcccagaaggccttctgcggcttcgaggacccacgcaccaagaccaagatgtcggccgcccaggccctgaagaagggctggctctactacgaggccggccagcgcttcctggaggtgcagtacctgaccggcggcttgatcgagcccgacacgccgggccgcgtgcccctggacgaggccctgcagcgcggcacggtggacgcccgcaccgcacagaagctgcgtgacgtgggcgcctactccaagtacctcacctgccctaagaccaagctcaagatctcctataaggacgcgctggaccgcagcatggtggaggagggcacggggctgcggctgctggaggctgccgcgcagtccaccaagggctactacagcccctacagcgtcagcggctccggctctaccgctggctcccgcaccggctcgcgcaccggctcccgggccggctcccgccgcggcagctttgacgccaccggctccggcttctccatgaccttctcttcatcctcctactcctcctcgggctacggccgccgctacgcctcggggtcctcggcctccctggggggccctgagtctgccgtggcctgaggctgcctgcgcccaccccgctctgcatgcggcccagcccggctcccaccgaggcgcgggggccgttttcaacgcttaaaggtgtcttcctcccaagtggtgcctaaagtttaaccaaaaagaccagactaatatattaatatatatctgctgtccagacagcctgtatcttgggggacagggctggcccagccctgctggccgcctcaccccctcgggtctcctcactcccttctacctgccactcacacagccaggtgccttggagggtcccaagctgggccccagcccaccctcctgtcttcccagggtagcccgcctgccagtcctagctgcacagggcagctgggcccaaccctgtctgtagagggccctggtgtttctagcactggcctgcacggtgggccttgctggggacggggggccccagtcagcctctctcccagtctacccagagaagccccttccccatgggaagacgaggccctcgggcccagcccccacagtgctgtctgatctgtgctttccagctcaccccccacactcactcctgagacccctggcctccggcgtcagcctccagcctctgttcccctagtaagtgccttccatgtcggcctctaaccccaggccccgaggacccagacccagtggggaggcggacgttccagccggcatggctgggaactgcagacctgtcctcctggtgggtccaggggcccctccagcttgtggagccccacactggggtgccgcctgcccgtctctctcccatggagccccagccccctttgggcccagggacaccagccaggctctgtgctgaccctcctgttgcacccagccctggtctcagcagcgaccacccctgcctccaccctctgagctttgcatgttccactaaccccgggcgggtggcaggtggaggtgtcaggctgctggcgcctctgcaagggcagaacactaacctgaccgtgggcggggccttgcggtatccgcccccaataaaagcaattccaaccttcctccgaggggcctgtgacctcccacacccctggcccgctccgtctgccccgtgggctcctgccaccgtccccgatgaagatcgtgcccgatgagcgggatcgtgtgcagaagaaaaccttcaccaagtgggtcaacaagcacctcatcaaggcccagaggcacatcagtgacctgtatgaagacctccgcgatggccacaacctcatctccctgctggaggtcctctcgggggacagcctgccccgggagaaggggaggatgcgtttccacaagctgcagaatgtccagattgccctggactacctccggcaccgccaggtgaagctggtgaacatcaggaatgatgacatcgctgacggcaaccccaagctgacccttggcctcatctggacaatcattctgcacttccagatctcagatatccaggtgagtgggcagtcggaggacatgacggccaaggagaagctgctgctgtggtcgcagcgaatggtggaggggtaccagggcctgcgatgcgacaacttcacctccagctggagagacggccgcctcttcaatgccatcatccaccggcacaagcccctgctcatcgacatgaacaaggtgtaccggcagaccaacctggagaacctggaccaggccttctctgtggcggagcgggacctgggagtgacgcggctcctggaccctgaggacgtggatgtccctcagcccgacgagaagtccatcatcacctacgtctcgtcgctgtatgacgccatgccccgcgtgccggacgtgcaggatggggtgagggccaacgagctgcagctgcgctggcaggagtaccgggagctggtgctgctgctgcttcagtggatgcgacaccacacggccgcctttgaggaacgcaggttcccctccagcttcgaggagattgagatcctgtggtctcagttcctgaagtttaaggagatggagctaccagccaaggaggccgacaagaacaggtccaagggcatctaccaatccctggagggagcggtgcaagcaggccagctcaaggtgccccctggctaccacccgctggatgtggagaaggagtggggcaagctgcacgtggccatcctggagcgggagaagcagctccgcagcgagtttgagaggctggagtgtcttcagcgcatcgtgaccaagctgcagatggaggcggggctgtgtgaggagcagctgaaccaggccgacgccctgctgcagtcggatgtccggctgctggctgcaggcaaagtgccacagcgggcgggggaggtggaacgggacttggacaaggcggatagcatgatccggctgctcttcaacgacgtgcagaccctcaaggatggacggcacccgcagggcgagcagatgtaccgcagggtgtaccgtctgcacgagcgcctggtagccatccgcaccgagtacaacctacggctgaaggcaggcgtggcggcccctgcaacccaggtggcccaggtgactctgcagagtgtgcagaggcgccccgagctggaggactccactctgcgctacctgcaggacctgctggcctgggtggaggagaaccagcaccgtgtggatggcgctgagtggggtgtggacctgcccagcgtggaggcgcagctgggcagccaccgaggcctgcaccagtccatcgaagaattccgggccaagatcgagcgggcacggagtgacgagggccagctctcccccgccacccggggtgcctaccgtgactgcctgggtcggctggacctgcagtacgccaagctgctgaactcctccaaggcccgcctcaggtccctggagagcttgcacagctttgtggcagccgccactaaggagctaatgtggctgaatgagaaggaggaggaggaggtgggcttcgactggagcgaccgcaacaccaacatgaccgccaagaaggagagctactcggcgctgatgcgggagctggagctgaaggagaagaagatcaaggagctccaaaatgctggggaccggctgctgcgggaggaccacccggcccggcccacggtggagtccttccaggcggccctgcagacgcagtggagctggatgctacagctgtgctgctgtatcgaggcacacctgaaggagaacgctgcctactttcagttcttctcagatgtgcgggaggccgaggggcagttgcagaagctgcaggaggcactgcgtaggaaatacagttgtgatcgctccgccaccgtcacccggctggaggacctgctgcaggatgcccaggacgagaaggaacagctgaacgagtacaagggccacctctcaggcctggccaagcgggccaaggccgtcgtgcagctgaagccccgccacccagcccaccccatgcggggccgcctgcccctgctggccgtgtgcgactataagcaggtggaggtgactgtgcacaagggtgacgagtgccagctggtgggccctgcacagccgtcccactggaaggtgctcagcagctccggcagcgaggccgccgtgccctccgtgtgcttcctggtgcccccgcccaaccaggaggcccaggaggccgtcaccaggctggaggcccagcaccaggccctggtcacgctgtggcaccagttgcacgtggacatgaagagccttctggcctggcagagc

SEQ ID NO: 641 - DNA, 32765 bp, Homo sapiens
  misc_feature (212)..(212): second gene starts at position 212
atgttcagctttgtggacctccggctcctgctcctcttagcggccaccgccctcctgacgcacggccaagaggaaggccaagtcgagggccaagacgaagacatcccaccaatcacctgcgtacagaacggcctcaggtaccatgaccgagacgtgtggaaacccgagccctgccggatctgcgtctgcgacaacggcaaggtgttgtgcgatgacgtgatctgtgacgagaccaagaactgccccggcgccgaagtccccgagggcgagtgctgtcccgtctgccccgacggctcagagtcacccaccgaccaagaaaccaccggcgtcgagggacccaagggagacactggcccccgaggcccaaggggacccgcaggcccccctggccgagatggcatccctggacagcctggacttcccggaccccccggaccccccggacctcccggaccccctggcctcggaggaaactttgctccccagctgtcttatggctatgatgagaaatcaaccggaggaatttccgtgcctggccccatgggtccctctggtcctcgtggtctccctggcccccctggtgcacctggtccccaaggcttccaaggtccccctggtgagcctggcgagcctggagcttcaggtcccatgggtccccgaggtcccccaggtccccctggaaagaatggagatgatggggaagctggaaaacctggtcgtcctggtgagcgtgggcctcctgggcctcagggtgctcgaggattgcccggaacagctggcctccctggaatgaagggacacagaggtttcagtggtttggatggtgccaagggagatgctggtcctgctggtcctaagggtgagcctggcagccctggtgaaaatggagctcctggtcagatgggcccccgtggcctgcctggtgagagaggtcgccctggagcccctggccctgctggtgctcgtggaaatgatggtgctactggtgctgccgggccccctggtcccaccggccccgctggtcctcctggcttccctggtgctgttggtgctaagggtgaagctggtccccaagggccccgaggctctgaaggtccccagggtgtgcgtggtgagcctggcccccctggccctgctggtgctgctggccctgctggaaaccctggtgctgatggacagcctggtgctaaaggtgccaatggtgctcctggtattgctggtgctcctggcttccctggtgcccgaggcccctctggaccccagggccccggcggccctcctggtcccaagggtaacagcggtgaacctggtgctcctggcagcaaaggagacactggtgctaagggagagcctggccctgttggtgttcaaggaccccctggccctgctggagaggaaggaaagcgaggagctcgaggtgaacccggacccactggcctgcccggaccccctggcgagcgtggtggacctggtagccgtggtttccctggcgcagatggtgttgctggtcccaagggtcccgctggtgaacgtggttctcctggccctgctggccccaaaggatctcctggtgaagctggtcgtcccggtgaagctggtctgcctggtgccaagggtctgactggaagccctggcagccctggtcctgatggcaaaactggcccccctggtcccgccggtcaagatggtcgccccggacccccaggcccacctggtgcccgtggtcaggctggtgtgatgggattccctggacctaaaggtgctgctggagagcccggcaaggctggagagcgaggtgttcccggaccccctggcgctgtcggtcctgctggcaaagatggagaggctggagctcagggaccccctggccctgctggtcccgctggcgagagaggtgaacaaggccctgctggctcccccggattccagggtctccctggtcctgctggtcctccaggtgaagcaggcaaacctggtgaacagggtgttcctggagaccttggcgcccctggcccctctggagcaagaggcgagagaggtttccctggcgagcgtggtgtgcaaggtccccctggtcctgctggtccccgaggggccaacggtgctcccggcaacgatggtgctaagggtgatgctggtgcccctggagctcccggtagccagggcgcccctggccttcagggaatgcctggtgaacgtggtgcagctggtcttccagggcctaagggtgacagaggtgatgctggtcccaaaggtgctgatggctctcctggcaaagatggcgtccgtggtctgactggccccattggtcctcctggccctgctggtgcccctggtgacaagggtgaaagtggtcccagcggccctgctggtcccactggagctcgtggtgcccccggagaccgtggtgagcctggtccccccggccctgctggctttgctggcccccctggtgctgacggccaacctggtgctaaaggcgaacctggtgatgctggtgctaaaggcgatgctggtccccctggccctgccggacccgctggaccccctggccccattggtaatgttggtgctcctggagccaaaggtgctcgcggcagcgctggtccccctggtgctactggtttccctggtgctgctggccgagtcggtcctcctggcccctctggaaatgctggaccccctggccctcctggtcctgctggcaaagaaggcggcaaaggtccccgtggtgagactggccctgctggacgtcctggtgaagttggtccccctggtccccctggccctgctggcgagaaaggatcccctggtgctgatggtcctgctggtgctcctggtactcccgggcctcaaggtattgctggacagcgtggtgtggtcggcctgcctggtcagagaggagagagaggcttccctggtcttcctggcccctctggtgaacctggcaaacaaggtccctctggagcaagtggtgaacgtggtccccctggtcccatgggcccccctggattggctggaccccctggtgaatctggacgtgagggggctcctggtgccgaaggttcccctggacgagacggttctcctggcgccaagggtgaccgtggtgagaccggccccgctggaccccctggtgctcctggtgctcctggtgcccctggccccgttggccctgctggcaagagtggtgatcgtggtgagactggtccgtgtgcgactataagcaggtggaggtgactgtgcacaagggtgacgagtgccagctggtgggccctgcacagccgtcccactggaaggtgctcagcagctccggcagcgaggccgccgtgccctccgtgtgcttcctggtgcccccgcccaaccaggaggcccaggaggccgtcaccaggctggaggcccagcaccaggccctggtcacgctgtggcaccagttgcacgtggacatgaagagccttctggcctggcagagccttcgccgcgacgtgcagctcatccgctcctggtccctggccacgttccgcaccctgaagccagaggagcagcgccaagccctgcacagcctggagctgcactaccaggccttcctgcgggacagccaggacgcgggcggcttcggacccgaggaccggctgatggctgagcgcgagtacggctcctgcagccaccactaccagcagctgctgcagagcctggaacagggtgcacaggaagagtctcgctgccagcgctgcatctccgagctcaaagacatccggctgcagctggaggcctgtgagacgcgcaccgtgcaccgcctgcggctgccgctggacaaagagccggcacgggagtgtgcccagcgcatcgccgagcagcagaaggcacaggcagaggtggaggggctgggcaagggggtcgcccggctctctgccgaggccgagaaggtcttggccctaccagagccatcgcctgcggcccccacgctgcgctcggagctggagctgacgctgggcaagctggagcaggtccgcagcctgtctgccatctacctggagaagctcaagaccatcagcctggtgatccgcggcacgcagggggccgaggaggtgctcagggcccacgaggagcagctcaaggaggcccaggccgtgccggccaccctcccggagctcgaggccaccaaggcctctctgaagaagctgcgggcccaggccgaggcacagcagcccacgttcgacgccctgcgggatgagctgcggggggcacaggaggtgggggagcgactgcagcagcggcacggggagcgggacgtggaggtggagcgctggcgggagcgggtcgcccagttgcttgagcgctggcaggctgtgctggcccagaccgacgtgcggcagcgcgagctcgagcaactgggccgccagctgcgttactaccgcgagagtgcagaccccttgggcgcctggctgcaggacgccaggcggcggcaggagcagatccaggccatgccgctggccgacagccaggctgtgcgggagcagctgcggcaggagcaggccctgctggaggagatcgagcgccacggcgagaaggtcgaggagtgccagaggtttgcgaaacagtacatcaacgccatcaaggactatgaactccagctggtgacgtacaaggcgcagcttgagccggtggcctccccggccaagaagcccaaggtccagtcgggatcagagagtgtcatccaggagtacgtggacctgcgtacgcactacagcgagctgaccacactgacgagccagtacatcaagttcatcagcgagactctgcggcgcatggaggaggaggagaggctggctgagcagcagcgggcagaggagcgcgagcggctggccgaggtggaggccgcgctggagaagcagcggcagctggccgaggcgcacgcccaggcaaaggcacaggcggagcgggaggcgaaggagctgcagcagcgcatgcaggaggaggtggtgcggcgggaggaggcggcggtggacgcgcagcagcagaagcgcagcattcaggaggagctgcagcagctgcggcagagctcggaggcggagatccaggccaaggcccggcaggcagaggcggctgagcgcagccggctgcgcatcgaggaggagatccgcgtggtgcgcctgcagttggaggccaccgagcgccagcgtggcggggctgagggggagctgcaggcactgcgtgcacgggcggaggaggctgaggcacaaaagcgacaggcgcaggaggaggccgagcgcttgcggaggcaggtgcaggacgagagccagcgtaagcggcaggcggaggtggagctggcctcgcgcgtgaaggccgaggccgaggcggcgcgcgagaagcagcgggccctgcaggccctggaggagctgcggctgcaggcggaggaggcggagcggcgcctgcggcaggccgaggtggagcgagcgcggcaggtacaggtggccctggagacggcgcagcgcagtgcagaggcggagctgcagagcaaacgcgcctccttcgccgagaagacggcacagctggagcgctccctgcaggaggaacacgtggctgtggcacagctgcgggaggaggctgagcggcgggcacagcagcaggccgaggccgagcgggcgcgcgaggaggcagagcgggagctggagcgctggcagctcaaggccaacgaggcgctacggctgcggctgcaggcggaggaggtggcgcagcagaagagcctggcgcaggccgaggctgagaagcagaaggaggaggcggagcgcgaggcgcggcggcgcggcaaggcggaggagcaggccgtccggcagcgggagctggctgaacaagagctggagaagcagcggcagctggcggaaggcaccgcgcagcagcgcctggccgcggagcaggagttgatccggctgcgggccgagacggagcagggggagcagcagcggcagctgctggaggaggagctggcccggctgcagcgtgaggcggctgcagccacgcagaaacggcaggagctggaagccgagctggccaaggtgcgggccgagatggaggtgctgctggccagcaaggcgagggctgaggaggagtcgcgctccaccagcgagaagtccaagcagaggctggaggccgaggccggccggttccgcgagctggccgaggaggccgcccgcctgcgtgccctggcggaagaggccaagcggcagcggcagctggccgaggaagacgcggcgcggcagcgggccgaggcggagcgggtgcttgcggagaagctggccgccatcggcgaggccacgcggctcaagacggaggcggagatcgcgctcaaggagaaggaggcggagaacgagcgcctgcggcggctggcggaggacgaggccttccagcggcggcggctggaggagcaggccgcgcaacacaaggctgacatcgaggagcgcctggcccagctgcgcaaggcatcggacagcgagctggagcggcagaaggggctggtggaggacacgctgaggcagcggcggcaggtggaggaggagatcctggcgctgaaggcgagcttcgagaaggcggccgctggcaaggcggagctggagctggagctgggacgcatccgcagcaacgcggaggacacgctgcgcagcaaggagcaggccgagctggaggctgcgaggcagcggcagctggcggcggaggaggagcggcggcgccgtgaggctgaggagcgcgtgcagaagagcctggcggccgaggaggaggccgcacggcagcggaaggcggcgctggaggaagtcgagcggctgaaagccaaggtggaggaggcgcggcgcctgcgggagcgagcggagcaggagtcggcgcggcagctgcagctggcccaggaggccgcccagaagcggctgcaggcggaagagaaggcacacgccttcgcggtgcagcagaaggagcaggagctacagcagacgctgcagcaggagcagagcgtgctggaccagctgcgcggcgaggcggaggcggcccggcgggcggctgaggaggcggaggaggcccgggtgcaggcggagcgtgaggcggcgcagtcccggcggcaggtggaagaggccgagcggctgaagcagtcggcagaggagcaggcacaggcccgggctcaggcacaggcggctgcagagaagctgcgcaaggaggccgagcaagaggcggcgcggcgggcacaggcggagcaggcggccctgcggcagaagcaggcagctgacgcggagatggagaagcataagaaattcgccgagcagacgctgcggcagaaggcgcaggtggagcaggagctgacaacactgcggctgcagctggaggagaccgaccaccagaagaacctgctggacgaggagctgcagcggctgaaggcggaggccacggaggccgcacgccagcgcagccaggtggaggaggagctcttctcggtgcgcgtgcagatggaggagctgagcaagctcaaggcacgcatcgaggctgagaaccgcgcactcatcttgcgtgacaaggacaatacgcagcgcttcctgcaggaggaggctgagaagatgaagcaggtggcggaggaggccgcgcggctgagtgtggcggcccaagaggctgcgcgactgcggcagctggcagaggaggacctggcacagcagcgggccttggcagagaagatgctcaaggagaagatgcaggcggtgcaggaggccacgcgactcaaggctgaggcggaactgctgcagcagcagaaggagcttgcgcaggagcaggcgcggcggctgcaggaggacaaggagcagatggcgcagcagctggcggaggagacgcagggcttccagcggacgctggaggccgagcggcagcggcagctggagatgagcgctgaggctgagcgcctcaagctgcgtgtggccgagatgagccgagcccaggcccgcgctgaggaggacgcccagcgcttccggaagcaggcggaggagatcggtgagaagctgcaccgcacggagctcgccacccaggagaaggtgaccctggtgcagacactggagatccagcgacagcagagtgaccatgatgccgagcgcctgcgggaggccatcgctgagctggagcgtgagaaggagaagctccaacaggaggccaaactgctgcagctcaagtctgaggagatgcagacggtgcagcaggagcagctgctgcaggagacgcaggccctgcagcaaagcttcctctctgaaaaggacagcctgctacagcgggagcgcttcatcgagcaggagaaggccaagctggagcagctcttccaggacgaggtggccaaggcacagcagctgcgtgaggagcagcagcggcagcagcagcagatggagcaggaacggcagcggctggtggccagcatggaggaggcgcggcggcggcagcatgaggccgaggagggcgtgcggcgcaagcaggaggagctgcagcagctggagcagcagcggcggcagcaggaggagctgctggctgaggagaaccagaggctgcgtgagcagctgcagctcctggaggagcagcaccgggccgcgctggcgcactcagaggaggtcactgcctcgcaggtggctgccacaaagaccctgcccaatggccgggatgcacttgatggccccgcggcagaggcagagccggagcacagcttcgatggcctgcggcggaaggtgtcagctcagaggctgcaggaggccggcatcctgagtgcggaggagctgcagcggttggcgcagggccacaccacggtggacgagctcgcacggcgggaagacgtgcgccactacctgcagggccgcagcagtatcgcagggctgttgctgaaggccaccaatgagaagctgagtgtttacgccgccctgcagaggcagctgctgagtcccggcacggccctcatcctgctggaggcgcaggcggcctcaggcttcctgctggaccctgtgcggaaccggcggctgaccgtcaacgaggctgtgaaggagggtgtggtgggccccgagctgcaccacaagctgctgtcggccgagcgcgccgtcactggctacaaggacccctacactggccagcagatctctctcttccaagccatgcagaagggcctcatcgtccgggagcacggcatccgcctgctggaggcccagatcgccacgggcggcgttatcgaccccgtgcacagccaccgcgtgcccgtggacgtggcctaccggcgcggctacttcgacgaggagatgaaccgcgtcctggcggaccccagcgacgacaccaagggcttctttgaccccaacacgcacgagaacctcacgtacctgcagctactggagcgctgcgtggaggaccccgagacgggcctgtgccttctgccactcacggataaggctgccaagggcggggagctggtctacactgactccgaggcccgggacgtctttgagaaggccaccgtgtctgcgccgttcggcaagttccagggcaagacggtgaccatttgggagatcatcaactcggaatacttcacggcagagcagcggcgggacctgctgcggcagttccgcacgggccggatcacagtggagaagatcatcaagatcatcatcacggtggtggaggagcaggagcagaagggccggctttgctttgagggcctgcgcagcctggtgccagccgccgagctgctggagagcagggtcatcgaccgcgagctctaccagcagctgcagcgaggtgagcgctctgtgcgagacgtagccgaggtggacactgtgcggcgggctctccggggtgccaacgtcatcgcgggtgtatggctggaggaggcggggcagaagctgagtatctacaatgccctgaagaaagacctgctgccatccgacatggccgtggccctgttggaagcccaggccggcaccgggcacatcatcgaccccgccaccagcgcccggctgaccgtggacgaggcagtgcgtgctggcctggtgggccccgagtttcatgagaagctgctatcagccgagaaggctgtgacagggtacagggacccctacacagggcagagcgtctccctgttccaggccctgaagaagggcctcattccccgggagcagggcctgcgcctgttggacgcccagctgtccacgggcggcatcgtggaccccagcaagagccaccgcgtgcccctggatgtcgcctgcgcccgaggctgcctggatgaggagaccagcagggccctgtcggcaccaagggccgacgccaaggcctacagtgaccccagcacaggggagccggccacctacggcgagctccagcagcggtgccggcccgaccagctgaccgggctgagcctgctgccgctctcagaaaaggctgctcgggcccggcaggaggagctctactcagagctgcaggcccgtgagacctttgaaaagaccccggttgaggtccccgtgggtggcttcaagggcaggacggtgacggtgtgggagctcatcagctctgagtacttcactgcggagcagcggcaggagctgttgcgtcagttccgcacgggcaaggtcaccgtggagaaggtcatcaagattctcattaccatcgtggaggaggtggagaccctgcggcaggagaggctgtccttcagcggcctccgtgcccctgtgccagccagcgagctcctggcttccggggtcctcagcagagcccagtttgagcagctcaaggacggcaagacgacggtcaaggacctttcggagctgggctccgtgcggacgctgctgcagggcagtggctgcctcgccggcatctacctggaggacaccaaggagaaggtgtccatctacgaggccatgcgccggggcctgctgagagccacaacggctgcgctcctgctggaggcgcaggcggccactggcttcctggtggaccccgtgcggaaccagcgcctgtatgtccacgaggccgtgaaggcgggcgtggtgggccccgagcttcacgagcagctgctgtctgccgagaaggccgtcaccggctacagagacccctactcgggcagcaccatctccctcttccaggccatgcagaagggcctggttctccggcagcacggcatccgcctgctggaggcccagatcgccacgggcggcatcatcgaccccgtgcacagccaccgcgtgcctgtggacgtggcctaccagcgcggctacttcagtgaggagatgaaccgcgtcctggcggaccccagcgacgacaccaagggcttctttgaccccaacacgcatgagaacctcacgtacaggcagctgctggagcggtgcgtggaggaccccgagacgggcttgcgccttctgccactgaaaggggcggagaaggctgaggtggtggagaccacgcaggtgtacactgaggaggagacaagaagggcatttgaagagacacagatcgacattcccggcggcggcagccacggcggctccaccatgtccctgtgggaggtgatgcagtcggacctgatccccgaggagcagcgggcccagctgatggctgacttccaggccggccgggtgaccaaggaacgcatgatcatcatcatcatcgagatcattgagaagacagagatcatccgccagcagggtctggcctcctacgactacgtgcgccgccgcctcacggctgaggacctgttcgaggctcggatcatctctctcgagacctacaacctgctccgggagggcaccaggagcctccgtgaggctctcgaggcggagtccgcctggtgctacctctatggcacgggctccgtggctggtgtctacctgcccggttccaggcagacactgagcatctaccaggctctcaagaaagggctgctgagtgccgaggtggcccgcctgctgctggaggcacaggcagccacaggcttcctgctggacccggtgaagggggagcggctgactgtggatgaggctgtgcggaagggcctcgtggggcccgagctgcacgaccgcctgctctcggctgagcgggcggtcaccggctaccgtgacccctacaccgagcagaccatctcgctcttccaggccatgaagaaggagctgatccctactgaggaggccctgcggctgctggatgcccagctggccaccggcggcatcgtggacccccgcctgggcttccaccttcccctggaggtggcttaccagcgtggctacctcaacaaggacacgcacgaccagctgtcagagcccagcgaggtgcgcagctacgtggacccgtccaccgacgagcgcctcagctacacgcagctgctcaggcggtgccgtcgtgacgacggcaccggccagctgctcctgccactgtcggacgcccgcaagctgaccttccgtggcctgcggaagcagatcaccatggaggagctggtgcgctcgcaggtcatggacgaggccacggcgctgcagctgcgggagggcctgacctccatcgaggaggtcaccaagaacttgcagaagttcctggaaggcaccagctgcatcgctggtgtcttcgtggacgccaccaaggaacggctctcggtgtaccaggccatgaagaagggcatcatccgccccggcacagcctttgagctcctggaggcgcaggcggccaccggttacgtcatcgaccccatcaagggactgaagctgacggtggaggaggctgtgcgtatgggcattgtgggccccgagttcaaggacaagctgctgtcggccgagcgcgccgtcactgggtacaaggacccctactctgggaagctcatctccctcttccaggccatgaagaagggcctgatcctgaaggaccatggcatccgcctgctggaggcccagatcgccacgggcggcatcatcgaccctgaggagagccaccggctgcccgtggaggtggcctacaagcgcggcctcttcgatgaggagatgaacgagatcctgaccgacccctcggacgacaccaagggcttctttgaccctaacacggaggagaacctcacctacctgcagctgatggagcgttgtatcactgacccccagacgggcctgtgtctcttgccgctgaaggagaagaagcgggagcggaagacgtcctccaagtcctccgtgcgcaagcgccgagtggtcatcgtggaccccgagacgggcaaggagatgtcagtgtacgaggcctaccgcaagggcctgattgaccaccagacgtacctggagctgtccgagcaggagtgcgagtgggaggagatcaccatctcctcctcggacggcgtggtcaagtccatgatcatcgaccgccgctccgggcgccagtacgacatcgatgatgccatcgccaagaacctcatcgaccgctcggcactggaccagtaccgcgccggcacgctctccatcaccgagttcgccgacatgctctcgggcaacgccggtggtttccgctcccgttcctcctcggtgggatcctcctcctcctaccccatcagccccgccgtctccaggacccagctggcctcctggtcagaccccactgaggagacgggccccgtggctggcatcctggacacggagacgctggagaaggtgtccatcaccgaggccatgcaccggaacctggtggataacatcacggggcagcggctgctggaggcgcaggcctgcaccgggggcatcatcgaccccagcaccggtgagcgcttccctgtcaccgacgccgtcaacaagggcctggtggacaagatcatggtggaccgcatcaacctggcccagaaggccttctgcggcttcgaggacccacgcaccaagaccaagatgtcggccgcccaggccctgaagaagggctggctctactacgaggccggccagcgcttcctggaggtgcagtacctgaccggcggcttgatcgagcccgacacgccgggccgcgtgcccctggacgaggccctgcagcgcggcacggtggacgcccgcaccgcacagaagctgcgtgacgtgggcgcctactccaagtacctcacctgccctaagaccaagctcaagatctcctataaggacgcgctggaccgcagcatggtggaggagggcacggggctgcggctgctggaggctgccgcgcagtccaccaagggctactacagcccctacagcgtcagcggctccggctctaccgctggctcccgcaccggctcgcgcaccggctcccgggccggctcccgccgcggcagctttgacgccaccggctccggcttctccatgaccttctcttcatcctcctactcctcctcgggctacggccgccgctacgcctcggggtcctcggcctccctggggggccctgagtctgccgtggcctgaggctgcctgcgcccaccccgctctgcatgcggcccagcccggctcccaccgaggcgcgggggccgttttcaacgcttaaaggtgtcttcctcccaagtggtgcctaaagtttaaccaaaaagaccagactaatatattaatatatatctgctgtccagacagcctgtatcttgggggacagggctggcccagccctgctggccgcctcaccccctcgggtctcctcactcccttctacctgccactcacacagccaggtgccttggagggtcccaagctgggccccagcccaccctcctgtcttcccagggtagcccgcctgccagtcctagctgcacagggcagctgggcccaaccctgtctgtagagggccctggtgtttctagcactggcctgcacggtgggccttgctggggacggggggccccagtcagcctctctcccagtctacccagagaagccccttccccatgggaagacgaggccctcgggcccagcccccacagtgctgtctgatctgtgctttccagctcaccccccacactcactcctgagacccctggcctccggcgtcagcctccagcctctgttcccctagtaagtgccttccatgtcggcctctaaccccaggccccgaggacccagacccagtggggaggcggacgttccagccggcatggctgggaactgcagacctgtcctcctggtgggtccaggggcccctccagcttgtggagccccacactggggtgccgcctgcccgtctctctcccatggagccccagccccctttgggcccagggacaccagccaggctctgtgctgaccctcctgttgcacccagccctggtctcagcagcgaccacccctgcctccaccctctgagctttgcatgttccactaaccccgggcgggtggcaggtggaggtgtcaggctgctggcgcctctgcaagggcagaacactaacctgaccgtgggcggggccttgcggtatccgcccccaataaaagcaattccaaccttcagccggttcccagcgcaggaagggcagccctggcggctccgcgtggcggctatggagccctcgggcagcctgtttccctccctggtggttgtgggtcacgttgtcaccctggccgctgtgtggcactggcgcaggggacgtcggtgggcgcaggacgagcaagatgagcgggatcgtgtgcagaagaaaaccttcaccaagtgggtcaacaagcacctcatcaaggcccagaggcacatcagtgacctgtatgaagacctccgcgatggccacaacctcatctccctgctggaggtcctctcgggggacagcctgccccgggagaaggggaggatgcgtttccacaagctgcagaatgtccagattgccctggactacctccggcaccgccaggtgaagctggtgaacatcaggaatgatgacatcgctgacggcaaccccaagctgacccttggcctcatctggacaatcattctgcacttccagatctcagatatccaggtgagtgggcagtcggaggacatgacggccaaggagaagctgctgctgtggtcgcagcgaatggtggaggggtaccagggcctgcgatgcgacaacttcacctccagctggagagacggccgcctcttcaatgccatcatccaccggcacaagcccctgctcatcgacatgaacaaggtgtaccggcagaccaacctggagaacctggaccaggccttctctgtggcggagcgggacctgggagtgacgcggctcctggaccctgaggacgtggatgtccctcagcccgacgagaagtccatcatcacctacgtctcgtcgctgtatgacgccatgccccgcgtgccggacgtgcaggatggggtgagggccaacgagctgcagctgcgctggcaggagtaccgggagctggtgctgctgctgcttcagtggatgcgacaccacacggccgcctttgaggaacgcaggttcccctccagcttcgaggagattgagatcctgtggtctcagttcctgaagtttaaggagatggagctaccagccaaggaggccgacaagaacaggtccaagggcatctaccaatccctggagggagcggtgcaagcaggccagctcaaggtgccccctggctaccacccgctggatgtggagaaggagtggggcaagctgcacgtggccatcctggagcgggagaagcagctccgcagcgagtttgagaggctggagtgtcttcagcgcatcgtgaccaagctgcagatggaggcggggctgtgtgaggagcagctgaaccaggccgacgccctgctgcagtcggatgtccggctgctggctgcaggcaaagtgccacagcgggcgggggaggtggaacgggacttggacaaggcggatagcatgatccggctgctcttcaacgacgtgcagaccctcaaggatggacggcacccgcagggcgagcagatgtaccgcagggtgtaccgtctgcacgagcgcctggtagccatccgcaccgagtacaacctacggctgaaggcaggcgtggcggcccctgcaacccaggtggcccaggtgactctgcagagtgtgcagaggcgccccgagctggaggactccactctgcgctacctgcaggacctgctggcctgggtggaggagaaccagcaccgtgtggatggcgctgagtggggtgtggacctgcccagcgtggaggcgcagctgggcagccaccgaggcctgcaccagtccatcgaagaattccgggccaagatcgagcgggcacggagtgacgagggccagctctcccccgccacccggggtgcctaccgtgactgcctgggtcggctggacctgcagtacgccaagctgctgaactcctccaaggcccgcctcaggtccctggagagcttgcacagctttgtggcagccgccactaaggagctaatgtggctgaatgagaaggaggaggaggaggtgggcttcgactggagcgaccgcaacaccaacatgaccgccaagaaggagagctactcggcgctgatgcgggagctggagctgaaggagaagaagatcaaggagctccaaaatgctggggaccggctgctgcgggaggaccacccggcccggcccacggtggagtccttccaggcggccctgcagacgcagtggagctggatgctacagctgtgctgctgtatcgaggcacacctgaaggagaacgctgcctactttcagttcttctcagatgtgcgggaggccgaggggcagttgcagaagctgcaggaggcactgcgtaggaaatacagttgtgatcgctccgccaccgtcacccggctggaggacctgctgcaggatgcccaggacgagaaggaacagctgaacgagtacaagggccacctctcaggcctggccaagcgggccaaggccgtcgtgcagctgaagccccgccacccagcccaccccatgcggggccgcctgcccctgctggccgtgtgcgactataagcaggtggaggtgactgtgcacaagggtgacgagtgccagctggtgggccctgcacagccgtcccactggaaggtgctcagcagctccggcagcgaggccgccgtgccctccgtgtgcttcctggtgcccccgcccaaccaggaggcccaggaggccgtcaccaggctggaggcccagcaccaggccctggtcacgctgtggcaccagttgcacgtggacatgaagagccttctggcctggcagagccttcgccgcgacgtgcagctcatccgctcctggtccctggccacgttccgcaccctgaagccagaggagcagcgccaagccctgcacagcctggagctgcactaccaggccttcctgcgggacagccaggacgcgggcggcttcggacccgaggaccggctgatggctgagcgcgagtacggctcctgcagccaccactaccagcagctgctgcagagcctggaacagggtgcacaggaagagtctcgctgccagcgctgcatctccgagctcaaagacatccggctgcagctggaggcctgtgagacgcgcaccgtgcaccgcctgcggctgccgctggacaaagagccggcacgggagtgtgcccagcgcatcgccgagcagcagaaggcacaggcagaggtggaggggctgggcaagggggtcgcccggctctctgccgaggccgagaaggtcttggccctaccagagccatcgcctgcggcccccacgctgcgctcggagctggagctgacgctgggcaagctggagcaggtccgcagcctgtctgccatctacctggagaagctcaagaccatcagcctggtgatccgcggcacgcagggggccgaggaggtgctcagggcccacgaggagcagctcaaggaggcccaggccgtgccggccaccctcccggagctcgaggccaccaaggcctctctgaagaagctgcgggcccaggccgaggcacagcagcccacgttcgacgccctgcgggatgagctgcggggggcacaggaggtgggggagcgactgcagcagcggcacggggagcgggacgtggaggtggagcgctggcgggagcgggtcgcccagttgcttgagcgctggcaggctgtgctggcccagaccgacgtgcggcagcgcgagctcgagcaactgggccgccagctgcgttactaccgcgagagtgcagaccccttgggcgcctggctgcaggacgccaggcggcggcaggagcagatccaggccatgccgctggccgacagccaggctgtgcgggagcagctgcggcaggagcaggccctgctggaggagatcgagcgccacggcgagaaggtcgaggagtgccagaggtttgcgaaacagtacatcaacgccatcaaggactatgaactccagctggtgacgtacaaggcgcagcttgagccggtggcctccccggccaagaagcccaaggtccagtcgggatcagagagtgtcatccaggagtacgtggacctgcgtacgcactacagcgagctgaccacactgacgagccagtacatcaagttcatcagcgagactctgcggcgcatggaggaggaggagaggctggctgagcagcagcgggcagaggagcgcgagcggctggccgaggtggaggccgcgctggagaagcagcggcagctggccgaggcgcacgcccaggcaaaggcacaggcggagcgggaggcgaaggagctgcagcagcgcatgcaggaggaggtggtgcggcgggaggaggcggcggtggacgcgcagcagcagaagcgcagcattcaggaggagctgcagcagctgcggcagagctcggaggcggagatccaggccaaggcccggcaggcagaggcggctgagcgcagccggctgcgcatcgaggaggagatccgcgtggtgcgcctgcagttggaggccaccgagcgccagcgtggcggggctgagggggagctgcaggcactgcgtgcacgggcggaggaggctgaggcacaaaagcgacaggcgcaggaggaggccgagcgcttgcggaggcaggtgcaggacgagagccagcgtaagcggcaggcggaggtggagctggcctcgcgcgtgaaggccgaggccgaggcggcgcgcgagaagcagcgggccctgcaggccctggaggagctgcggctgcaggcggaggaggcggagcggcgcctgcggcaggccgaggtggagcgagcgcggcaggtacaggtggccctggagacggcgcagcgcagtgcagaggcggagctgcagagcaaacgcgcctccttcgccgagaagacggcacagctggagcgctccctgcaggaggaacacgtggctgtggcacagctgcgggaggaggctgagcggcgggcacagcagcaggccgaggccgagcgggcgcgcgaggaggcagagcgggagctggagcgctggcagctcaaggccaacgaggcgctacggctgcggctgcaggcggaggaggtggcgcagcagaagagcctggcgcaggccgaggctgagaagcagaaggaggaggcggagcgcgaggcgcggcggcgcggcaaggcggaggagcaggccgtccggcagcgggagctggctgaacaagagctggagaagcagcggcagctggcggaaggcaccgcgcagcagcgcctggccgcggagcaggagttgatccggctgcgggccgagacggagcagggggagcagcagcggcagctgctggaggaggagctggcccggctgcagcgtgaggcggctgcagccacgcagaaacggcaggagctggaagccgagctggccaaggtgcgggccgagatggaggtgctgctggccagcaaggcgagggctgaggaggagtcgcgctccaccagcgagaagtccaagcagaggctggaggccgaggccggccggttccgcgagctggccgaggaggccgcccgcctgcgtgccctggcggaagaggccaagcggcagcggcagctggccgaggaagacgcggcgcggcagcgggccgaggcggagcgggtgcttgcggagaagctggccgccatcggcgaggccacgcggctcaagacggaggcggagatcgcgctcaaggagaaggaggcggagaacgagcgcctgcggcggctggcggaggacgaggccttccagcggcggcggctggaggagcaggccgcgcaacacaaggctgacatcgaggagcgcctggcccagctgcgcaaggcatcggacagcgagctggagcggcagaaggggctggtggaggacacgctgaggcagcggcggcaggtggaggaggagatcctggcgctgaaggcgagcttcgagaaggcggccgctggcaaggcggagctggagctggagctgggacgcatccgcagcaacgcggaggacacgctgcgcagcaaggagcaggccgagctggaggctgcgaggcagcggcagctggcggcggaggaggagcggcggcgccgtgaggctgaggagcgcgtgcagaagagcctggcggccgaggaggaggccgcacggcagcggaaggcggcgctggaggaagtcgagcggctgaaagccaaggtggaggaggcgcggcgcctgcgggagcgagcggagcaggagtcggcgcggcagctgcagctggcccaggaggccgcccagaagcggctgcaggcggaagagaaggcacacgccttcgcggtgcagcagaaggagcaggagctacagcagacgctgcagcaggagcagagcgtgctggaccagctgcgcggcgaggcggaggcggcccggcgggcggctgaggaggcggaggaggcccgggtgcaggcggagcgtgaggcggcgcagtcccggcggcaggtggaagaggccgagcggctgaagcagtcggcagaggagcaggcacaggcccgggctcaggcacaggcggctgcagagaagctgcgcaaggaggccgagcaagaggcggcgcggcgggcacaggcggagcaggcggccctgcggcagaagcaggcagctgacgcggagatggagaagcataagaaattcgccgagcagacgctgcggcagaaggcgcaggtggagcaggagctgacaacactgcggctgcagctggaggagaccgaccaccagaagaacctgctggacgaggagctgcagcggctgaaggcggaggccacggaggccgcacgccagcgcagccaggtggaggaggagctcttctcggtgcgcgtgcagatggaggagctgagcaagctcaaggcacgcatcgaggctgagaaccgcgcactcatcttgcgtgacaaggacaatacgcagcgcttcctgcaggaggaggctgagaagatgaagcaggtggcggaggaggccgcgcggctgagtgtggcggcccaagaggctgcgcgactgcggcagctggcagaggaggacctggcacagcagcgggccttggcagagaagatgctcaaggagaagatgcaggcggtgcaggaggccacgcgactcaaggctgaggcggaactgctgcagcagcagaaggagcttgcgcaggagcaggcgcggcggctgcaggaggacaaggagcagatggcgcagcagctggcggaggagacgcagggcttccagcggacgctggaggccgagcggcagcggcagctggagatgagcgctgaggctgagcgcctcaagctgcgtgtggccgagatgagccgagcccaggcccgcgctgaggaggacgcccagcgcttccggaagcaggcggaggagatcggtgagaagctgcaccgcacggagctcgccacccaggagaaggtgaccctggtgcagacactggagatccagcgacagcagagtgaccatgatgccgagcgcctgcgggaggccatcgctgagctggagcgtgagaaggagaagctccaacaggaggccaaactgctgcagctcaagtctgaggagatgcagacggtgcagcaggagcagctgctgcaggagacgcaggccctgcagcaaagcttcctctctgaaaaggacagcctgctacagcgggagcgcttcatcgagcaggagaaggccaagctggagcagctcttccaggacgaggtggccaaggcacagcagctgcgtgaggagcagcagcggcagcagcagcagatggagcaggaacggcagcggctggtggccagcatggaggaggcgcggcggcggcagcatgaggccgaggagggcgtgcggcgcaagcaggaggagctgcagcagctggagcagcagcggcggcagcaggaggagctgctggctgaggagaaccagaggctgcgtgagcagctgcagctcctggaggagcagcaccgggccgcgctggcgcactcagaggaggtcactgcctcgcaggtggctgccacaaagaccctgcccaatggccgggatgcacttgatggccccgcggcagaggcagagccggagcacagcttcgatggcctgcggcggaaggtgtcagctcagaggctgcaggaggccggcatcctgagtgcggaggagctgcagcggttggcgcagggccacaccacggtggacgagctcgcacggcgggaagacgtgcgccactacctgcagggccgcagcagtatcgcagggctgttgctgaaggccaccaatgagaagctgagtgtttacgccgccctgcagaggcagctgctgagtcccggcacggccctcatcctgctggaggcgcaggcggcctcaggcttcctgctggaccctgtgcggaaccggcggctgaccgtcaacgaggctgtgaaggagggtgtggtgggccccgagctgcaccacaagctgctgtcggccgagcgcgccgtcactggctacaaggacccctacactggccagcagatctctctcttccaagccatgcagaagggcctcatcgtccgggagcacggcatccgcctgctggaggcccagatcgccacgggcggcgttatcgaccccgtgcacagccaccgcgtgcccgtggacgtggcctaccggcgcggctacttcgacgaggagatgaaccgcgtcctggcggaccccagcgacgacaccaagggcttctttgaccccaacacgcacgagaacctcacgtacctgcagctactggagcgctgcgtggaggaccccgagacgggcctgtgccttctgccactcacggataaggctgccaagggcggggagctggtctacactgactccgaggcccgggacgtctttgagaaggccaccgtgtctgcgccgttcggcaagttccagggcaagacggtgaccatttgggagatcatcaactcggaatacttcacggcagagcagcggcgggacctgctgcggcagttccgcacgggccggatcacagtggagaagatcatcaagatcatcatcacggtggtggaggagcaggagcagaagggccggctttgctttgagggcctgcgcagcctggtgccagccgccgagctgctggagagcagggtcatcgaccgcgagctctaccagcagctgcagcgaggtgagcgctctgtgcgagacgtagccgaggtggacactgtgcggcgggctctccggggtgccaacgtcatcgcgggtgtatggctggaggaggcggggcagaagctgagtatctacaatgccctgaagaaagacctgctgccatccgacatggccgtggccctgttggaagcccaggccggcaccgggcacatcatcgaccccgccaccagcgcccggctgaccgtggacgaggcagtgcgtgctggcctggtgggccccgagtttcatgagaagctgctatcagccgagaaggctgtgacagggtacagggacccctacacagggcagagcgtctccctgttccaggccctgaagaagggcctcattccccgggagcagggcctgcgcctgttggacgcccagctgtccacgggcggcatcgtggaccccagcaagagccaccgcgtgcccctggatgtcgcctgcgcccgaggctgcctggatgaggagaccagcagggccctgtcggcaccaagggccgacgccaaggcctacagtgaccccagcacaggggagccggccacctacggcgagctccagcagcggtgccggcccgaccagctgaccgggctgagcctgctgccgctctcagaaaaggctgctcgggcccggcaggaggagctctactcagagctgcaggcccgtgagacctttgaaaagaccccggttgaggtccccgtgggtggcttcaagggcaggacggtgacggtgtgggagctcatcagctctgagtacttcactgcggagcagcggcaggagctgttgcgtcagttccgcacgggcaaggtcaccgtggagaaggtcatcaagattctcattaccatcgtggaggaggtggagaccctgcggcaggagaggctgtccttcagcggcctccgtgcccctgtgccagccagcgagctcctggcttccggggtcctcagcagagcccagtttgagcagctcaaggacggcaagacgacggtcaaggacctttcggagctgggctccgtgcggacgctgctgcagggcagtggctgcctcgccggcatctacctggaggacaccaaggagaaggtgtccatctacgaggccatgcgccggggcctgctgagagccacaacggctgcgctcctgctggaggcgcaggcggccactggcttcctggtggaccccgtgcggaaccagcgcctgtatgtccacgaggccgtgaaggcgggcgtggtgggccccgagcttcacgagcagctgctgtctgccgagaaggccgtcaccggctacagagacccctactcgggcagcaccatctccctcttccaggccatgcagaagggcctggttctccggcagcacggcatccgcctgctggaggcccagatcgccacgggcggcatcatcgaccccgtgcacagccaccgcgtgcctgtggacgtggcctaccagcgcggctacttcagtgaggagatgaaccgcgtcctggcggaccccagcgacgacaccaagggcttctttgaccccaacacgcatgagaacctcacgtacaggcagctgctggagcggtgcgtggaggaccccgagacgggcttgcgccttctgccactgaaaggggcggagaaggctgaggtggtggagaccacgcaggtgtacactgaggaggagacaagaagggcatttgaagagacacagatcgacattcccggcggcggcagccacggcggctccaccatgtccctgtgggaggtgatgcagtcggacctgatccccgaggagcagcgggcccagctgatggctgacttccaggccggccgggtgaccaaggaacgcatgatcatcatcatcatcgagatcattgagaagacagagatcatccgccagcagggtctggcctcctacgactacgtgcgccgccgcctcacggctgaggacctgttcgaggctcggatcatctctctcgagacctacaacctgctccgggagggcaccaggagcctccgtgaggctctcgaggcggagtccgcctggtgctacctctatggcacgggctccgtggctggtgtctacctgcccggttccaggcagacactgagcatctaccaggctctcaagaaagggctgctgagtgccgaggtggcccgcctgctgctggaggcacaggcagccacaggcttcctgctggacccggtgaagggggagcggctgactgtggatgaggctgtgcggaagggcctcgtggggcccgagctgcacgaccgcctgctctcggctgagcgggcggtcaccggctaccgtgacccctacaccgagcagaccatctcgctcttccaggccatgaagaaggagctgatccctactgaggaggccctgcggctgctggatgcccagctggccaccggcggcatcgtggacccccgcctgggcttccaccttcccctggaggtggcttaccagcgtggctacctcaacaaggacacgcacgaccagctgtcagagcccagcgaggtgcgcagctacgtggacccgtccaccgacgagcgcctcagctacacgcagctgctcaggcggtgccgtcgtgacgacggcaccggccagctgctcctgccactgtcggacgcccgcaagctgaccttccgtggcctgcggaagcagatcaccatggaggagctggtgcgctcgcaggtcatggacgaggccacggcgctgcagctgcgggagggcctgacctccatcgaggaggtcaccaagaacttgcagaagttcctggaaggcaccagctgcatcgctggtgtcttcgtggacgccaccaaggaacggctctcggtgtaccaggccatgaagaagggcatcatccgccccggcacagcctttgagctcctggaggcgcaggcggccaccggttacgtcatcgaccccatcaagggactgaagctgacggtggaggaggctgtgcgtatgggcattgtgggccccgagttcaaggacaagctgctgtcggccgagcgcgccgtcactgggtacaaggacccctactctgggaagctcatctccctcttccaggccatgaagaagggcctgatcctgaaggaccatggcatccgcctgctggaggcccagatcgccacgggcggcatcatcgaccctgaggagagccaccggctgcccgtggaggtggcctacaagcgcggcctcttcgatgaggagatgaacgagatcctgaccgacccctcggacgacaccaagggcttctttgaccctaacacggaggagaacctcacctacctgcagctgatggagcgttgtatcactgacccccagacgggcctgtgtctcttgccgctgaaggagaagaagcgggagcggaagacgtcctccaagtcctccgtgcgcaagcgccgagtggtcatcgtggaccccgagacgggcaaggagatgtcagtgtacgaggcctaccgcaagggcctgattgaccaccagacgtacctggagctgtccgagcaggagtgcgagtgggaggagatcaccatctcctcctcggacggcgtggtcaagtccatgatcatcgaccgccgctccgggcgccagtacgacatcgatgatgccatcgccaagaacctcatcgaccgctcggcactggaccagtaccgcgccggcacgctctccatcaccgagttcgccgacatgctctcgggcaacgccggtggtttccgctcccgttcctcctcggtgggatcctcctcctcctaccccatcagccccgccgtctccaggacccagctggcctcctggtcagaccccactgaggagacgggccccgtggctggcatcctggacacggagacgctggagaaggtgtccatcaccgaggccatgcaccggaacctggtggataacatcacggggcagcggctgctggaggcgcaggcctgcaccgggggcatcatcgaccccagcaccggtgagcgcttccctgtcaccgacgccgtcaacaagggcctggtggacaagatcatggtggaccgcatcaacctggcccagaaggccttctgcggcttcgaggacccacgcaccaagaccaagatgtcggccgcccaggccctgaagaagggctggctctactacgaggccggccagcgcttcctggaggtgcagtacctgaccggcggcttgatcgagcccgacacgccgggccgcgtgcccctggacgaggccctgcagcgcggcacggtggacgcccgcaccgcacagaagctgcgtgacgtgggcgcctactccaagtacctcacctgccctaagaccaagctcaagatctcctataaggacgcgctggaccgcagcatggtggaggagggcacggggctgcggctgctggaggctgccgcgcagtccaccaagggctactacagcccctacagcgtcagcggctccggctctaccgctggctcccgcaccggctcgcgcaccggctcccgggccggctcccgccgcggcagctttgacgccaccggctccggcttctccatgaccttctcttcatcctcctactcctcctcgggctacggccgccgctacgcctcggggtcctcggcctccctggggggccctgagtctgccgtggcctgaggctgcctgcgcccaccccgctctgcatgcggcccagcccggctcccaccgaggcgcgggggccgttttcaacgcttaaaggtgtcttcctcccaagtggtgcctaaagtttaaccaaaaagaccagactaatatattaatatatatctgctgtccagacagcctgtatcttgggggacagggctggcccagccctgctggccgcctcaccccctcgggtctcctcactcccttctacctgccactcacacagccaggtgccttggagggtcccaagctgggccccagcccaccctcctgtcttcccagggtagcccgcctgccagtcctagctgcacagggcagctgggcccaaccctgtctgtagagggccctggtgtttctagcactggcctgcacggtgggccttgctggggacggggggccccagtcagcctctctcccagtctacccagagaagccccttccccatgggaagacgaggccctcgggcccagcccccacagtgctgtctgatctgtgctttccagctcaccccccacactcactcctgagacccctggcctccggcgtcagcctccagcctctgttcccctagtaagtgccttccatgtcggcctctaaccccaggccccgaggacccagacccagtggggaggcggacgttccagccggcatggctgggaactgcagacctgtcctcctggtgggtccaggggcccctccagcttgtggagccccacactggggtgccgcctgcccgtctctctcccatggagccccagccccctttgggcccagggacaccagccaggctctgtgctgaccctcctgttgcacccagccctggtctcagcagcgaccacccctgcctccaccctctgagctttgcatgttccactaaccccgggcgggtggcaggtggaggtgtcaggctgctggcgcctctgcaagggcagaacactaacctgaccgtgggcggggccttgcggtatccgcccccaataaaagcaattccaaccttcagccggttcccagcgcaggaagggcagccctggcggctccgcgtggcggctatggagccctcgggcagcctgtttccctccctggtggttgtgggtcacgttgtcaccctggccgctgtgtggcactggcgcaggggacgtcggtgggcgcaggacgagcaagatgagcgggatcgtgtgcagaagaaaaccttcaccaagtgggtcaacaagcacctcatcaaggcccagaggcacatcagtgacctgtatgaagacctccgcgatggccacaacctcatctccctgctggaggtcctctcgggggacagcctgccccgggagaaggggaggatgcgtttccacaagctgcagaatgtccagattgccctggactacctccggcaccgccaggtgaagctggtgaacatcaggaatgatgacatcgctgacggcaaccccaagctgacccttggcctcatctggacaatcattctgcacttccagatctcagatatccaggtgagtgggcagtcggaggacatgacggccaaggagaagctgctgctgtggtcgcagcgaatggtggaggggtaccagggcctgcgatgcgacaacttcacctccagctggagagacggccgcctcttcaatgccatcatccaccggcacaagcccctgctcatcgacatgaacaaggtgtaccggcagaccaacctggagaacctggaccaggccttctctgtggcggagcgggacctgggagtgacgcggctcctggaccctgaggacgtggatgtccctcagcccgacgagaagtccatcatcacctacgtctcgtcgctgtatgacgccatgccccgcgtgccggacgtgcaggatggggtgagggccaacgagctgcagctgcgctggcaggagtaccgggagctggtgctgctgctgcttcagtggatgcgacaccacacggccgcctttgaggaacgcaggttcccctccagcttcgaggagattgagatcctgtggtctcagttcctgaagtttaaggagatggagctaccagccaaggaggccgacaagaacaggtccaagggcatctaccaatccctggagggagcggtgcaagcaggccagctcaaggtgccccctggctaccacccgctggatgtggagaaggagtggggcaagctgcacgtggccatcctggagcgggagaagcagctccgcagcgagtttgagaggctggagtgtcttcagcgcatcgtgaccaagctgcagatggaggcggggctgtgtgaggagcagctgaaccaggccgacgccctgctgcagtcggatgtccggctgctggctgcaggcaaagtgccacagcgggcgggggaggtggaacgggacttggacaaggcggatagcatgatccggctgctcttcaacgacgtgcagaccctcaaggatggacggcacccgcagggcgagcagatgtaccgcagggtgtaccgtctgcacgagcgcctggtagccatccgcaccgagtacaacctacggctgaaggcaggcgtggcggcccctgcaacccaggtggcccaggtgactctgcagagtgtgcagaggcgccccgagctggaggactccactctgcgctacctgcaggacctgctggcctgggtggaggagaaccagcaccgtgtggatggcgctgagtggggtgtggacctgcccagcgtggaggcgcagctgggcagccaccgaggcctgcaccagtccatcgaagaattccgggccaagatcgagcgggcacggagtgacgagggccagctctcccccgccacccggggtgcctaccgtgactgcctgggtcggctggacctgcagtacgccaagctgctgaactcctccaaggcccgcctcaggtccctggagagcttgcacagctttgtggcagccgccactaaggagctaatgtggctgaatgagaaggaggaggaggaggtgggcttcgactggagcgaccgcaacaccaacatgaccgccaagaaggagagctactcggcgctgatgcgggagctggagctgaaggagaagaagatcaaggagctccaaaatgctggggaccggctgctgcgggaggaccacccggcccggcccacggtggagtccttccaggcggccctgcagacgcagtggagctggatgctacagctgtgctgctgtatcgaggcacacctgaaggagaacgctgcctactttcagttcttctcagatgtgcgggaggccgaggggcagttgcagaagctgcaggaggcactgcgtaggaaatacagttgtgatcgctccgccaccgtcacccggctggaggacctgctgcaggatgcccaggacgagaaggaacagctgaacgagtacaagggccacctctcaggcctggccaagcgggccaaggccgtcgtgcagctgaagccccgccacccagcccaccccatgcggggccgcctgcccctgctggccgtgtgcgactataagcaggtggaggtgactgtgcacaagggtgacgagtgccagctggtgggccctgcacagccgtcccactggaaggtgctcagcagctccggcagcgaggc

SEQ ID NO: 642 - DNA, 32765 bp, Homo sapiens
  misc_feature (212)..(212): second gene starts at position 212
atgttcagctttgtggacctccggctcctgctcctcttagcggccaccgccctcctgacgcacggccaagaggaaggccaagtcgagggccaagacgaagacatcccaccaatcacctgcgtacagaacggcctcaggtaccatgaccgagacgtgtggaaacccgagccctgccggatctgcgtctgcgacaacggcaaggtgttgtgcgatgacgtgatctgtgacgagaccaagaactgccccggcgccgaagtccccgagggcgagtgctgtcccgtctgccccgacggctcagagtcacccaccgaccaagaaaccaccggcgtcgagggacccaagggagacactggcccccgaggcccaaggggacccgcaggcccccctggccgagatggcatccctggacagcctggacttcccggaccccccggaccccccggacctcccggaccccctggcctcggaggaaactttgctccccagctgtcttatggctatgatgagaaatcaaccggaggaatttccgtgcctggccccatgggtccctctggtcctcgtggtctccctggcccccctggtgcacctggtccccaaggcttccaaggtccccctggtgagcctggcgagcctggagcttcaggtcccatgggtccccgaggtcccccaggtccccctggaaagaatggagatgatggggaagctggaaaacctggtcgtcctggtgagcgtgggcctcctgggcctcagggtgctcgaggattgcccggaacagctggcctccctggaatgaagggacacagaggtttcagtggtttggatggtgccaagggagatgctggtcctgctggtcctaagggtgagcctggcagccctggtgaaaatggagctcctggtcagatgggcccccgtggcctgcctggtgagagaggtcgccctggagcccctggccctgctggtgctcgtggaaatgatggtgctactggtgctgccgggccccctggtcccaccggccccgctggtcctcctggcttccctggtgctgttggtgctaagggtgaagctggtccccaagggccccgaggctctgaaggtccccagggtgtgcgtggtgagcctggcccccctggccctgctggtgctgctggccctgctggaaaccctggtgctgatggacagcctggtgctaaaggtgccaatggtgctcctggtattgctggtgctcctggcttccctggtgcccgaggcccctctggaccccagggccccggcggccctcctggtcccaagggtaacagcggtgaacctggtgctcctggcagcaaaggagacactggtgctaagggagagcctggccctgttggtgttcaaggaccccctggccctgctggagaggaaggaaagcgaggagctcgaggtgaacccggacccactggcctgcccggaccccctggcgagcgtggtggacctggtagccgtggtttccctggcgcagatggtgttgctggtcccaagggtcccgctggtgaacgtggttctcctggccctgctggccccaaaggatctcctggtgaagctggtcgtcccggtgaagctggtctgcctggtgccaagggtctgactggaagccctggcagccctggtcctgatggcaaaactggcccccctggtcccgccggtcaagatggtcgccccggacccccaggcccacctggtgcccgtggtcaggctggtgtgatgggattccctggacctaaaggtgctgctggagagcccggcaaggctggagagcgaggtgttcccggaccccctggcgctgtcggtcctgctggcaaagatggagaggctggagctcagggaccccctggccctgctggtcccgctggcgagagaggtgaacaaggccctgctggctcccccggattccagggtctccctggtcctgctggtcctccaggtgaagcaggcaaacctggtgaacagggtgttcctggagaccttggcgcccctggcccctctggagcaagaggcgagagaggtttccctggcgagcgtggtgtgcaaggtccccctggtcctgctggtccccgaggggccaacggtgctcccggcaacgatggtgctaagggtgatgctggtgcccctggagctcccggtagccagggcgcccctggccttcagggaatgcctggtgaacgtggtgcagctggtcttccagggcctaagggtgacagaggtgatgctggtcccaaaggtgctgatggctctcctggcaaagatggcgtccgtggtctgactggccccattggtcctcctggccctgctggtgcccctggtgacaagggtgaaagtggtcccagcggccctgctggtcccactggagctcgtggtgcccccggagaccgtggtgagcctggtccccccggccctgctggctttgctggcccccctggtgctgacggccaacctggtgctaaaggcgaacctggtgatgctggtgctaaaggcgatgctggtccccctggccctgccggacccgctggaccccctggccccattggtaatgttggtgctcctggagccaaaggtgctcgcggcagcgctggtccccctggtgctactggtttccctggtgctgctggccgagtcggtcctcctggcccctctggaaatgctggaccccctggccctcctggtcctgctggcaaagaaggcggcaaaggtccccgtggtgagactggccctgctggacgtcctggtgaagttggtccccctggtccccctggccctgctggcgagaaaggatcccctggtgctgatggtcctgctggtgctcctggtactcccgggcctcaaggtattgctggacagcgtggtgtggtcggcctgcctggtcagagaggagagagaggcttccctggtcttcctggcccctctggtgaacctggcaaacaaggtccctctggagcaagtggtgaacgtggtccccctggtcccatgggcccccctggattggctggaccccctggtgaatctggacgtgagggggctcctggtgccgaaggttcccctggacgagacggttctcctggcgccaagggtgaccgtggtgagaccggccccgctggaccccctggtgctcctggtgctcctggtgcccctggccccgttggccctgctggcaagagtggtgatcgtggtgagactggtccgtgtgcgactataagcaggtggaggtgactgtgcacaagggtgacgagtgccagctggtgggccctgcacagccgtcccactggaaggtgctcagcagctccggcagcgaggccgccgtgccctccgtgtgcttcctggtgcccccgcccaaccaggaggcccaggaggccgtcaccaggctggaggcccagcaccaggccctggtcacgctgtggcaccagttgcacgtggacatgaagagccttctggcctggcagagccttcgccgcgacgtgcagctcatccgctcctggtccctggccacgttccgcaccctgaagccagaggagcagcgccaagccctgcacagcctggagctgcactaccaggccttcctgcgggacagccaggacgcgggcggcttcggacccgaggaccggctgatggctgagcgcgagtacggctcctgcagccaccactaccagcagctgctgcagagcctggaacagggtgcacaggaagagtctcgctgccagcgctgcatctccgagctcaaagacatccggctgcagctggaggcctgtgagacgcgcaccgtgcaccgcctgcggctgccgctggacaaagagccggcacgggagtgtgcccagcgcatcgccgagcagcagaaggcacaggcagaggtggaggggctgggcaagggggtcgcccggctctctgccgaggccgagaaggtcttggccctaccagagccatcgcctgcggcccccacgctgcgctcggagctggagctgacgctgggcaagctggagcaggtccgcagcctgtctgccatctacctggagaagctcaagaccatcagcctggtgatccgcggcacgcagggggccgaggaggtgctcagggcccacgaggagcagctcaaggaggcccaggccgtgccggccaccctcccggagctcgaggccaccaaggcctctctgaagaagctgcgggcccaggccgaggcacagcagcccacgttcgacgccctgcgggatgagctgcggggggcacaggaggtgggggagcgactgcagcagcggcacggggagcgggacgtggaggtggagcgctggcgggagcgggtcgcccagttgcttgagcgctggcaggctgtgctggcccagaccgacgtgcggcagcgcgagctcgagcaactgggccgccagctgcgttactaccgcgagagtgcagaccccttgggcgcctggctgcaggacgccaggcggcggcaggagcagatccaggccatgccgctggccgacagccaggctgtgcgggagcagctgcggcaggagcaggccctgctggaggagatcgagcgccacggcgagaaggtcgaggagtgccagaggtttgcgaaacagtacatcaacgccatcaaggactatgaactccagctggtgacgtacaaggcgcagcttgagccggtggcctccccggccaagaagcccaaggtccagtcgggatcagagagtgtcatccaggagtacgtggacctgcgtacgcactacagcgagctgaccacactgacgagccagtacatcaagttcatcagcgagactctgcggcgcatggaggaggaggagaggctggctgagcagcagcgggcagaggagcgcgagcggctggccgaggtggaggccgcgctggagaagcagcggcagctggccgaggcgcacgcccaggcaaaggcacaggcggagcgggaggcgaaggagctgcagcagcgcatgcaggaggaggtggtgcggcgggaggaggcggcggtggacgcgcagcagcagaagcgcagcattcaggaggagctgcagcagctgcggcagagctcggaggcggagatccaggccaaggcccggcaggcagaggcggctgagcgcagccggctgcgcatcgaggaggagatccgcgtggtgcgcctgcagttggaggccaccgagcgccagcgtggcggggctgagggggagctgcaggcactgcgtgcacgggcggaggaggctgaggcacaaaagcgacaggcgcaggaggaggccgagcgcttgcggaggcaggtgcaggacgagagccagcgtaagcggcaggcggaggtggagctggcctcgcgcgtgaaggccgaggccgaggcggcgcgcgagaagcagcgggccctgcaggccctggaggagctgcggctgcaggcggaggaggcggagcggcgcctgcggcaggccgaggtggagcgagcgcggcaggtacaggtggccctggagacggcgcagcgcagtgcagaggcggagctgcagagcaaacgcgcctccttcgccgagaagacggcacagctggagcgctccctgcaggaggaacacgtggctgtggcacagctgcgggaggaggctgagcggcgggcacagcagcaggccgaggccgagcgggcgcgcgaggaggcagagcgggagctggagcgctggcagctcaaggccaacgaggcgctacggctgcggctgcaggcggaggaggtggcgcagcagaagagcctggcgcaggccgaggctgagaagcagaaggaggaggcggagcgcgaggcgcggcggcgcggcaaggcggaggagcaggccgtccggcagcgggagctggctgaacaagagctggagaagcagcggcagctggcggaaggcaccgcgcagcagcgcctggccgcggagcaggagttgatccggctgcgggccgagacggagcagggggagcagcagcggcagctgctggaggaggagctggcccggctgcagcgtgaggcggctgcagccacgcagaaacggcaggagctggaagccgagctggccaaggtgcgggccgagatggaggtgctgctggccagcaaggcgagggctgaggaggagtcgcgctccaccagcgagaagtccaagcagaggctggaggccgaggccggccggttccgcgagctggccgaggaggccgcccgcctgcgtgccctggcggaagaggccaagcggcagcggcagctggccgaggaagacgcggcgcggcagcgggccgaggcggagcgggtgcttgcggagaagctggccgccatcggcgaggccacgcggctcaagacggaggcggagatcgcgctcaaggagaaggaggcggagaacgagcgcctgcggcggctggcggaggacgaggccttccagcggcggcggctggaggagcaggccgcgcaacacaaggctgacatcgaggagcgcctggcccagctgcgcaaggcatcggacagcgagctggagcggcagaaggggctggtggaggacacgctgaggcagcggcggcaggtggaggaggagatcctggcgctgaaggcgagcttcgagaaggcggccgctggcaaggcggagctggagctggagctgggacgcatccgcagcaacgcggaggacacgctgcgcagcaaggagcaggccgagctggaggctgcgaggcagcggcagctggcggcggaggaggagcggcggcgccgtgaggctgaggagcgcgtgcagaagagcctggcggccgaggaggaggccgcacggcagcggaaggcggcgctggaggaagtcgagcggctgaaagccaaggtggaggaggcgcggcgcctgcgggagcgagcggagcaggagtcggcgcggcagctgcagctggcccaggaggccgcccagaagcggctgcaggcggaagagaaggcacacgccttcgcggtgcagcagaaggagcaggagctacagcagacgctgcagcaggagcagagcgtgctggaccagctgcgcggcgaggcggaggcggcccggcgggcggctgaggaggcggaggaggcccgggtgcaggcggagcgtgaggcggcgcagtcccggcggcaggtggaagaggccgagcggctgaagcagtcggcagaggagcaggcacaggcccgggctcaggcacaggcggctgcagagaagctgcgcaaggaggccgagcaagaggcggcgcggcgggcacaggcggagcaggcggccctgcggcagaagcaggcagctgacgcggagatggagaagcataagaaattcgccgagcagacgctgcggcagaaggcgcaggtggagcaggagctgacaacactgcggctgcagctggaggagaccgaccaccagaagaacctgctggacgaggagctgcagcggctgaaggcggaggccacggaggccgcacgccagcgcagccaggtggaggaggagctcttctcggtgcgcgtgcagatggaggagctgagcaagctcaaggcacgcatcgaggctgagaaccgcgcactcatcttgcgtgacaaggacaatacgcagcgcttcctgcaggaggaggctgagaagatgaagcaggtggcggaggaggccgcgcggctgagtgtggcggcccaagaggctgcgcgactgcggcagctggcagaggaggacctggcacagcagcgggccttggcagagaagatgctcaaggagaagatgcaggcggtgcaggaggccacgcgactcaaggctgaggcggaactgctgcagcagcagaaggagcttgcgcaggagcaggcgcggcggctgcaggaggacaaggagcagatggcgcagcagctggcggaggagacgcagggcttccagcggacgctggaggccgagcggcagcggcagctggagatgagcgctgaggctgagcgcctcaagctgcgtgtggccgagatgagccgagcccaggcccgcgctgaggaggacgcccagcgcttccggaagcaggcggaggagatcggtgagaagctgcaccgcacggagctcgccacccaggagaaggtgaccctggtgcagacactggagatccagcgacagcagagtgaccatgatgccgagcgcctgcgggaggccatcgctgagctggagcgtgagaaggagaagctccaacaggaggccaaactgctgcagctcaagtctgaggagatgcagacggtgcagcaggagcagctgctgcaggagacgcaggccctgcagcaaagcttcctctctgaaaaggacagcctgctacagcgggagcgcttcatcgagcaggagaaggccaagctggagcagctcttccaggacgaggtggccaaggcacagcagctgcgtgaggagcagcagcggcagcagcagcagatggagcaggaacggcagcggctggtggccagcatggaggaggcgcggcggcggcagcatgaggccgaggagggcgtgcggcgcaagcaggaggagctgcagcagctggagcagcagcggcggcagcaggaggagctgctggctgaggagaaccagaggctgcgtgagcagctgcagctcctggaggagcagcaccgggccgcgctggcgcactcagaggaggtcactgcctcgcaggtggctgccacaaagaccctgcccaatggccgggatgcacttgatggccccgcggcagaggcagagccggagcacagcttcgatggcctgcggcggaaggtgtcagctcagaggctgcaggaggccggcatcctgagtgcggaggagctgcagcggttggcgcagggccacaccacggtggacgagctcgcacggcgggaagacgtgcgccactacctgcagggccgcagcagtatcgcagggctgttgctgaaggccaccaatgagaagctgagtgtttacgccgccctgcagaggcagctgctgagtcccggcacggccctcatcctgctggaggcgcaggcggcctcaggcttcctgctggaccctgtgcggaaccggcggctgaccgtcaacgaggctgtgaaggagggtgtggtgggccccgagctgcaccacaagctgctgtcggccgagcgcgccgtcactggctacaaggacccctacactggccagcagatctctctcttccaagccatgcagaagggcctcatcgtccgggagcacggcatccgcctgctggaggcccagatcgccacgggcggcgttatcgaccccgtgcacagccaccgcgtgcccgtggacgtggcctaccggcgcggctacttcgacgaggagatgaaccgcgtcctggcggaccccagcgacgacaccaagggcttctttgaccccaacacgcacgagaacctcacgtacctgcagctactggagcgctgcgtggaggaccccgagacgggcctgtgccttctgccactcacggataaggctgccaagggcggggagctggtctacactgactccgaggcccgggacgtctttgagaaggccaccgtgtctgcgccgttcggcaagttccagggcaagacggtgaccatttgggagatcatcaactcggaatacttcacggcagagcagcggcgggacctgctgcggcagttccgcacgggccggatcacagtggagaagatcatcaagatcatcatcacggtggtggaggagcaggagcagaagggccggctttgctttgagggcctgcgcagcctggtgccagccgccgagctgctggagagcagggtcatcgaccgcgagctctaccagcagctgcagcgaggtgagcgctctgtgcgagacgtagccgaggtggacactgtgcggcgggctctccggggtgccaacgtcatcgcgggtgtatggctggaggaggcggggcagaagctgagtatctacaatgccctgaagaaagacctgctgccatccgacatggccgtggccctgttggaagcccaggccggcaccgggcacatcatcgaccccgccaccagcgcccggctgaccgtggacgaggcagtgcgtgctggcctggtgggccccgagtttcatgagaagctgctatcagccgagaaggctgtgacagggtacagggacccctacacagggcagagcgtctccctgttccaggccctgaagaagggcctcattccccgggagcagggcctgcgcctgttggacgcccagctgtccacgggcggcatcgtggaccccagcaagagccaccgcgtgcccctggatgtcgcctgcgcccgaggctgcctggatgaggagaccagcagggccctgtcggcaccaagggccgacgccaaggcctacagtgaccccagcacaggggagccggccacctacggcgagctccagcagcggtgccggcccgaccagctgaccgggctgagcctgctgccgctctcagaaaaggctgctcgggcccggcaggaggagctctactcagagctgcaggcccgtgagacctttgaaaagaccccggttgaggtccccgtgggtggcttcaagggcaggacggtgacggtgtgggagctcatcagctctgagtacttcactgcggagcagcggcaggagctgttgcgtcagttccgcacgggcaaggtcaccgtggagaaggtcatcaagattctcattaccatcgtggaggaggtggagaccctgcggcaggagaggctgtccttcagcggcctccgtgcccctgtgccagccagcgagctcctggcttccggggtcctcagcagagcccagtttgagcagctcaaggacggcaagacgacggtcaaggacctttcggagctgggctccgtgcggacgctgctgcagggcagtggctgcctcgccggcatctacctggaggacaccaaggagaaggtgtccatctacgaggccatgcgccggggcctgctgagagccacaacggctgcgctcctgctggaggcgcaggcggccactggcttcctggtggaccccgtgcggaaccagcgcctgtatgtccacgaggccgtgaaggcgggcgtggtgggccccgagcttcacgagcagctgctgtctgccgagaaggccgtcaccggctacagagacccctactcgggcagcaccatctccctcttccaggccatgcagaagggcctggttctccggcagcacggcatccgcctgctggaggcccagatcgccacgggcggcatcatcgaccccgtgcacagccaccgcgtgcctgtggacgtggcctaccagcgcggctacttcagtgaggagatgaaccgcgtcctggcggaccccagcgacgacaccaagggcttctttgaccccaacacgcatgagaacctcacgtacaggcagctgctggagcggtgcgtggaggaccccgagacgggcttgcgccttctgccactgaaaggggcggagaaggctgaggtggtggagaccacgcaggtgtacactgaggaggagacaagaagggcatttgaagagacacagatcgacattcccggcggcggcagccacggcggctccaccatgtccctgtgggaggtgatgcagtcggacctgatccccgaggagcagcgggcccagctgatggctgacttccaggccggccgggtgaccaaggaacgcatgatcatcatcatcatcgagatcattgagaagacagagatcatccgccagcagggtctggcctcctacgactacgtgcgccgccgcctcacggctgaggacctgttcgaggctcggatcatctctctcgagacctacaacctgctccgggagggcaccaggagcctccgtgaggctctcgaggcggagtccgcctggtgctacctctatggcacgggctccgtggctggtgtctacctgcccggttccaggcagacactgagcatctaccaggctctcaagaaagggctgctgagtgccgaggtggcccgcctgctgctggaggcacaggcagccacaggcttcctgctggacccggtgaagggggagcggctgactgtggatgaggctgtgcggaagggcctcgtggggcccgagctgcacgaccgcctgctctcggctgagcgggcggtcaccggctaccgtgacccctacaccgagcagaccatctcgctcttccaggccatgaagaaggagctgatccctactgaggaggccctgcggctgctggatgcccagctggccaccggcggcatcgtggacccccgcctgggcttccaccttcccctggaggtggcttaccagcgtggctacctcaacaaggacacgcacgaccagctgtcagagcccagcgaggtgcgcagctacgtggacccgtccaccgacgagcgcctcagctacacgcagctgctcaggcggtgccgtcgtgacgacggcaccggccagctgctcctgccactgtcggacgcccgcaagctgaccttccgtggcctgcggaagcagatcaccatggaggagctggtgcgctcgcaggtcatggacgaggccacggcgctgcagctgcgggagggcctgacctccatcgaggaggtcaccaagaacttgcagaagttcctggaaggcaccagctgcatcgctggtgtcttcgtggacgccaccaaggaacggctctcggtgtaccaggccatgaagaagggcatcatccgccccggcacagcctttgagctcctggaggcgcaggcggccaccggttacgtcatcgaccccatcaagggactgaagctgacggtggaggaggctgtgcgtatgggcattgtgggccccgagttcaaggacaagctgctgtcggccgagcgcgccgtcactgggtacaaggacccctactctgggaagctcatctccctcttccaggccatgaagaagggcctgatcctgaaggaccatggcatccgcctgctggaggcccagatcgccacgggcggcatcatcgaccctgaggagagccaccggctgcccgtggaggtggcctacaagcgcggcctcttcgatgaggagatgaacgagatcctgaccgacccctcggacgacaccaagggcttctttgaccctaacacggaggagaacctcacctacctgcagctgatggagcgttgtatcactgacccccagacgggcctgtgtctcttgccgctgaaggagaagaagcgggagcggaagacgtcctccaagtcctccgtgcgcaagcgccgagtggtcatcgtggaccccgagacgggcaaggagatgtcagtgtacgaggcctaccgcaagggcctgattgaccaccagacgtacctggagctgtccgagcaggagtgcgagtgggaggagatcaccatctcctcctcggacggcgtggtcaagtccatgatcatcgaccgccgctccgggcgccagtacgacatcgatgatgccatcgccaagaacctcatcgaccgctcggcactggaccagtaccgcgccggcacgctctccatcaccgagttcgccgacatgctctcgggcaacgccggtggtttccgctcccgttcctcctcggtgggatcctcctcctcctaccccatcagccccgccgtctccaggacccagctggcctcctggtcagaccccactgaggagacgggccccgtggctggcatcctggacacggagacgctggagaaggtgtccatcaccgaggccatgcaccggaacctggtggataacatcacggggcagcggctgctggaggcgcaggcctgcaccgggggcatcatcgaccccagcaccggtgagcgcttccctgtcaccgacgccgtcaacaagggcctggtggacaagatcatggtggaccgcatcaacctggcccagaaggccttctgcggcttcgaggacccacgcaccaagaccaagatgtcggccgcccaggccctgaagaagggctggctctactacgaggccggccagcgcttcctggaggtgcagtacctgaccggcggcttgatcgagcccgacacgccgggccgcgtgcccctggacgaggccctgcagcgcggcacggtggacgcccgcaccgcacagaagctgcgtgacgtgggcgcctactccaagtacctcacctgccctaagaccaagctcaagatctcctataaggacgcgctggaccgcagcatggtggaggagggcacggggctgcggctgctggaggctgccgcgcagtccaccaagggctactacagcccctacagcgtcagcggctccggctctaccgctggctcccgcaccggctcgcgcaccggctcccgggccggctcccgccgcggcagctttgacgccaccggctccggcttctccatgaccttctcttcatcctcctactcctcctcgggctacggccgccgctacgcctcggggtcctcggcctccctggggggccctgagtctgccgtggcctgaggctgcctgcgcccaccccgctctgcatgcggcccagcccggctcccaccgaggcgcgggggccgttttcaacgcttaaaggtgtcttcctcccaagtggtgcctaaagtttaaccaaaaagaccagactaatatattaatatatatctgctgtccagacagcctgtatcttgggggacagggctggcccagccctgctggccgcctcaccccctcgggtctcctcactcccttctacctgccactcacacagccaggtgccttggagggtcccaagctgggccccagcccaccctcctgtcttcccagggtagcccgcctgccagtcctagctgcacagggcagctgggcccaaccctgtctgtagagggccctggtgtttctagcactggcctgcacggtgggccttgctggggacggggggccccagtcagcctctctcccagtctacccagagaagccccttccccatgggaagacgaggccctcgggcccagcccccacagtgctgtctgatctgtgctttccagctcaccccccacactcactcctgagacccctggcctccggcgtcagcctccagcctctgttcccctagtaagtgccttccatgtcggcctctaaccccaggccccgaggacccagacccagtggggaggcggacgttccagccggcatggctgggaactgcagacctgtcctcctggtgggtccaggggcccctccagcttgtggagccccacactggggtgccgcctgcccgtctctctcccatggagccccagccccctttgggcccagggacaccagccaggctctgtgctgaccctcctgttgcacccagccctggtctcagcagcgaccacccctgcctccaccctctgagctttgcatgttccactaaccccgggcgggtggcaggtggaggtgtcaggctgctggcgcctctgcaagggcagaacactaacctgaccgtgggcggggccttgcggtatccgcccccaataaaagcaattccaaccttgagcccgcgccctcacgctcagcaccccagcctgcctgcccgcccgcctgccctgccgctgcccgctgtcacaccctgtagcgcgggagcttctcgcagcgccccgggccttctcgtggtaccctgcctgctgcctttgcccccgcactgactgcccggctccagcagccatggtggccggcatgctcatgccacgggaccagctgcgggccatctatgaggtgctcttccgcgagggcgtgatggtggccaagaaggaccggcggccccgcagcttgcacccccatgtgcccggcgtcaccaacctgcaggtcatgcgtgccatggcgtccctgcgggcacggggcctggtccgcgagacctttgcctggtgccacttttactggtacctcaccaatgaaggcatcgcccacctccgccagtacctgcacctgccgccagagatcgtgcccgcctctctgcagcgcgtgcgccgccccgtcgccatggtgatgcccgcacgccgcaccccccacgtgcaggctgtgcagggtcccctgggctccccacccaagcgggggccgctgccgacggaggagcagcgggtctaccgtcggaaggagcttgaggaggtgtcacctgagacccctgtggtgcctgctaccacccagcggaccctggccaggccaggcccggagcctgccccagccacagatgagcgggatcgtgtgcagaagaaaaccttcaccaagtgggtcaacaagcacctcatcaaggcccagaggcacatcagtgacctgtatgaagacctccgcgatggccacaacctcatctccctgctggaggtcctctcgggggacagcctgccccgggagaaggggaggatgcgtttccacaagctgcagaatgtccagattgccctggactacctccggcaccgccaggtgaagctggtgaacatcaggaatgatgacatcgctgacggcaaccccaagctgacccttggcctcatctggacaatcattctgcacttccagatctcagatatccaggtgagtgggcagtcggaggacatgacggccaaggagaagctgctgctgtggtcgcagcgaatggtggaggggtaccagggcctgcgatgcgacaacttcacctccagctggagagacggccgcctcttcaatgccatcatccaccggcacaagcccctgctcatcgacatgaacaaggtgtaccggcagaccaacctggagaacctggaccaggccttctctgtggcggagcgggacctgggagtgacgcggctcctggaccctgaggacgtggatgtccctcagcccgacgagaagtccatcatcacctacgtctcgtcgctgtatgacgccatgccccgcgtgccggacgtgcaggatggggtgagggccaacgagctgcagctgcgctggcaggagtaccgggagctggtgctgctgctgcttcagtggatgcgacaccacacggccgcctttgaggaacgcaggttcccctccagcttcgaggagattgagatcctgtggtctcagttcctgaagtttaaggagatggagctaccagccaaggaggccgacaagaacaggtccaagggcatctaccaatccctggagggagcggtgcaagcaggccagctcaaggtgccccctggctaccacccgctggatgtggagaaggagtggggcaagctgcacgtggccatcctggagcgggagaagcagctccgcagcgagtttgagaggctggagtgtcttcagcgcatcgtgaccaagctgcagatggaggcggggctgtgtgaggagcagctgaaccaggccgacgccctgctgcagtcggatgtccggctgctggctgcaggcaaagtgccacagcgggcgggggaggtggaacgggacttggacaaggcggatagcatgatccggctgctcttcaacgacgtgcagaccctcaaggatggacggcacccgcagggcgagcagatgtaccgcagggtgtaccgtctgcacgagcgcctggtagccatccgcaccgagtacaacctacggctgaaggcaggcgtggcggcccctgcaacccaggtggcccaggtgactctgcagagtgtgcagaggcgccccgagctggaggactccactctgcgctacctgcaggacctgctggcctgggtggaggagaaccagcaccgtgtggatggcgctgagtggggtgtggacctgcccagcgtggaggcgcagctgggcagccaccgaggcctgcaccagtccatcgaagaattccgggccaagatcgagcgggcacggagtgacgagggccagctctcccccgccacccggggtgcctaccgtgactgcctgggtcggctggacctgcagtacgccaagctgctgaactcctccaaggcccgcctcaggtccctggagagcttgcacagctttgtggcagccgccactaaggagctaatgtggctgaatgagaaggaggaggaggaggtgggcttcgactggagcgaccgcaacaccaacatgaccgccaagaaggagagctactcggcgctgatgcgggagctggagctgaaggagaagaagatcaaggagctccaaaatgctggggaccggctgctgcgggaggaccacccggcccggcccacggtggagtccttccaggcggccctgcagacgcagtggagctggatgctacagctgtgctgctgtatcgaggcacacctgaaggagaacgctgcctactttcagttcttctcagatgtgcgggaggccgaggggcagttgcagaagctgcaggaggcactgcgtaggaaatacagttgtgatcgctccgccaccgtcacccggctggaggacctgctgcaggatgcccaggacgagaaggaacagctgaacgagtacaagggccacctctcaggcctggccaagcgggccaaggccgtcgtgcagctgaagccccgccacccagcccaccccatgcggggccgcctgcccctgctggccgtgtgcgactataagcaggtggaggtgactgtgcacaagggtgacgagtgccagctggtgggccctgcacagccgtcccactggaaggtgctcagcagctccggcagcgaggccgccgtgccctccgtgtgcttcctggtgcccccgcccaaccaggaggcccaggaggccgtcaccaggctggaggcccagcaccaggccctggtcacgctgtggcaccagttgcacgtggacatgaagagccttctggcctggcagagccttcgccgcgacgtgcagctcatccgctcctggtccctggccacgttccgcaccctgaagccagaggagcagcgccaagccctgcacagcctggagctgcactaccaggccttcctgcgggacagccaggacgcgggcggcttcggacccgaggaccggctgatggctgagcgcgagtacggctcctgcagccaccactaccagcagctgctgcagagcctggaacagggtgcacaggaagagtctcgctgccagcgctgcatctccgagctcaaagacatccggctgcagctggaggcctgtgagacgcgcaccgtgcaccgcctgcggctgccgctggacaaagagccggcacgggagtgtgcccagcgcatcgccgagcagcagaaggcacaggcagaggtggaggggctgggcaagggggtcgcccggctctctgccgaggccgagaaggtcttggccctaccagagccatcgcctgcggcccccacgctgcgctcggagctggagctgacgctgggcaagctggagcaggtccgcagcctgtctgccatctacctggagaagctcaagaccatcagcctggtgatccgcggcacgcagggggccgaggaggtgctcagggcccacgaggagcagctcaaggaggcccaggccgtgccggccaccctcccggagctcgaggccaccaaggcctctctgaagaagctgcgggcccaggccgaggcacagcagcccacgttcgacgccctgcgggatgagctgcggggggcacaggaggtgggggagcgactgcagcagcggcacggggagcgggacgtggaggtggagcgctggcgggagcgggtcgcccagttgcttgagcgctggcaggctgtgctggcccagaccgacgtgcggcagcgcgagctcgagcaactgggccgccagctgcgttactaccgcgagagtgcagaccccttgggcgcctggctgcaggacgccaggcggcggcaggagcagatccaggccatgccgctggccgacagccaggctgtgcgggagcagctgcggcaggagcaggccctgctggaggagatcgagcgccacggcgagaaggtcgaggagtgccagaggtttgcgaaacagtacatcaacgccatcaaggactatgaactccagctggtgacgtacaaggcgcagcttgagccggtggcctccccggccaagaagcccaaggtccagtcgggatcagagagtgtcatccaggagtacgtggacctgcgtacgcactacagcgagctgaccacactgacgagccagtacatcaagttcatcagcgagactctgcggcgcatggaggaggaggagaggctggctgagcagcagcgggcagaggagcgcgagcggctggccgaggtggaggccgcgctggagaagcagcggcagctggccgaggcgcacgcccaggcaaaggcacaggcggagcgggaggcgaaggagctgcagcagcgcatgcaggaggaggtggtgcggcgggaggaggcggcggtggacgcgcagcagcagaagcgcagcattcaggaggagctgcagcagctgcggcagagctcggaggcggagatccaggccaaggcccggcaggcagaggcggctgagcgcagccggctgcgcatcgaggaggagatccgcgtggtgcgcctgcagttggaggccaccgagcgccagcgtggcggggctgagggggagctgcaggcactgcgtgcacgggcggaggaggctgaggcacaaaagcgacaggcgcaggaggaggccgagcgcttgcggaggcaggtgcaggacgagagccagcgtaagcggcaggcggaggtggagctggcctcgcgcgtgaaggccgaggccgaggcggcgcgcgagaagcagcgggccctgcaggccctggaggagctgcggctgcaggcggaggaggcggagcggcgcctgcggcaggccgaggtggagcgagcgcggcaggtacaggtggccctggagacggcgcagcgcagtgcagaggcggagctgcagagcaaacgcgcctccttcgccgagaagacggcacagctggagcgctccctgcaggaggaacacgtggctgtggcacagctgcgggaggaggctgagcggcgggcacagcagcaggccgaggccgagcgggcgcgcgaggaggcagagcgggagctggagcgctggcagctcaaggccaacgaggcgctacggctgcggctgcaggcggaggaggtggcgcagcagaagagcctggcgcaggccgaggctgagaagcagaaggaggaggcggagcgcgaggcgcggcggcgcggcaaggcggaggagcaggccgtccggcagcgggagctggctgaacaagagctggagaagcagcggcagctggcggaaggcaccgcgcagcagcgcctggccgcggagcaggagttgatccggctgcgggccgagacggagcagggggagcagcagcggcagctgctggaggaggagctggcccggctgcagcgtgaggcggctgcagccacgcagaaacggcaggagctggaagccgagctggccaaggtgcgggccgagatggaggtgctgctggccagcaaggcgagggctgaggaggagtcgcgctccaccagcgagaagtccaagcagaggctggaggccgaggccggccggttccgcgagctggccgaggaggccgcccgcctgcgtgccctggcggaagaggccaagcggcagcggcagctggccgaggaagacgcggcgcggcagcgggccgaggcggagcgggtgcttgcggagaagctggccgccatcggcgaggccacgcggctcaagacggaggcggagatcgcgctcaaggagaaggaggcggagaacgagcgcctgcggcggctggcggaggacgaggccttccagcggcggcggctggaggagcaggccgcgcaacacaaggctgacatcgaggagcgcctggcccagctgcgcaaggcatcggacagcgagctggagcggcagaaggggctggtggaggacacgctgaggcagcggcggcaggtggaggaggagatcctggcgctgaaggcgagcttcgagaaggcggccgctggcaaggcggagctggagctggagctgggacgcatccgcagcaacgcggaggacacgctgcgcagcaaggagcaggccgagctggaggctgcgaggcagcggcagctggcggcggaggaggagcggcggcgccgtgaggctgaggagcgcgtgcagaagagcctggcggccgaggaggaggccgcacggcagcggaaggcggcgctggaggaagtcgagcggctgaaagccaaggtggaggaggcgcggcgcctgcgggagcgagcggagcaggagtcggcgcggcagctgcagctggcccaggaggccgcccagaagcggctgcaggcggaagagaaggcacacgccttcgcggtgcagcagaaggagcaggagctacagcagacgctgcagcaggagcagagcgtgctggaccagctgcgcggcgaggcggaggcggcccggcgggcggctgaggaggcggaggaggcccgggtgcaggcggagcgtgaggcggcgcagtcccggcggcaggtggaagaggccgagcggctgaagcagtcggcagaggagcaggcacaggcccgggctcaggcacaggcggctgcagagaagctgcgcaaggaggccgagcaagaggcggcgcggcgggcacaggcggagcaggcggccctgcggcagaagcaggcagctgacgcggagatggagaagcataagaaattcgccgagcagacgctgcggcagaaggcgcaggtggagcaggagctgacaacactgcggctgcagctggaggagaccgaccaccagaagaacctgctggacgaggagctgcagcggctgaaggcggaggccacggaggccgcacgccagcgcagccaggtggaggaggagctcttctcggtgcgcgtgcagatggaggagctgagcaagctcaaggcacgcatcgaggctgagaaccgcgcactcatcttgcgtgacaaggacaatacgcagcgcttcctgcaggaggaggctgagaagatgaagcaggtggcggaggaggccgcgcggctgagtgtggcggcccaagaggctgcgcgactgcggcagctggcagaggaggacctggcacagcagcgggccttggcagagaagatgctcaaggagaagatgcaggcggtgcaggaggccacgcgactcaaggctgaggcggaactgctgcagcagcagaaggagcttgcgcaggagcaggcgcggcggctgcaggaggacaaggagcagatggcgcagcagctggcggaggagacgcagggcttccagcggacgctggaggccgagcggcagcggcagctggagatgagcgctgaggctgagcgcctcaagctgcgtgtggccgagatgagccgagcccaggcccgcgctgaggaggacgcccagcgcttccggaagcaggcggaggagatcggtgagaagctgcaccgcacggagctcgccacccaggagaaggtgaccctggtgcagacactggagatccagcgacagcagagtgaccatgatgccgagcgcctgcgggaggccatcgctgagctggagcgtgagaaggagaagctccaacaggaggccaaactgctgcagctcaagtctgaggagatgcagacggtgcagcaggagcagctgctgcaggagacgcaggccctgcagcaaagcttcctctctgaaaaggacagcctgctacagcgggagcgcttcatcgagcaggagaaggccaagctggagcagctcttccaggacgaggtggccaaggcacagcagctgcgtgaggagcagcagcggcagcagcagcagatggagcaggaacggcagcggctggtggccagcatggaggaggcgcggcggcggcagcatgaggccgaggagggcgtgcggcgcaagcaggaggagctgcagcagctggagcagcagcggcggcagcaggaggagctgctggctgaggagaaccagaggctgcgtgagcagctgcagctcctggaggagcagcaccgggccgcgctggcgcactcagaggaggtcactgcctcgcaggtggctgccacaaagaccctgcccaatggccgggatgcacttgatggccccgcggcagaggcagagccggagcacagcttcgatggcctgcggcggaaggtgtcagctcagaggctgcaggaggccggcatcctgagtgcggaggagctgcagcggttggcgcagggccacaccacggtggacgagctcgcacggcgggaagacgtgcgccactacctgcagggccgcagcagtatcgcagggctgttgctgaaggccaccaatgagaagctgagtgtttacgccgccctgcagaggcagctgctgagtcccggcacggccctcatcctgctggaggcgcaggcggcctcaggcttcctgctggaccctgtgcggaaccggcggctgaccgtcaacgaggctgtgaaggagggtgtggtgggccccgagctgcaccacaagctgctgtcggccgagcgcgccgtcactggctacaaggacccctacactggccagcagatctctctcttccaagccatgcagaagggcctcatcgtccgggagcacggcatccgcctgctggaggcccagatcgccacgggcggcgttatcgaccccgtgcacagccaccgcgtgcccgtggacgtggcctaccggcgcggctacttcgacgaggagatgaaccgcgtcctggcggaccccagcgacgacaccaagggcttctttgaccccaacacgcacgagaacctcacgtacctgcagctactggagcgctgcgtggaggaccccgagacgggcctgtgccttctgccactcacggataaggctgccaagggcggggagctggtctacactgactccgaggcccgggacgtctttgagaaggccaccgtgtctgcgccgttcggcaagttccagggcaagacggtgaccatttgggagatcatcaactcggaatacttcacggcagagcagcggcgggacctgctgcggcagttccgcacgggccggatcacagtggagaagatcatcaagatcatcatcacggtggtggaggagcaggagcagaagggccggctttgctttgagggcctgcgcagcctggtgccagccgccgagctgctggagagcagggtcatcgaccgcgagctctaccagcagctgcagcgaggtgagcgctctgtgcgagacgtagccgaggtggacactgtgcggcgggctctccggggtgccaacgtcatcgcgggtgtatggctggaggaggcggggcagaagctgagtatctacaatgccctgaagaaagacctgctgccatccgacatggccgtggccctgttggaagcccaggccggcaccgggcacatcatcgaccccgccaccagcgcccggctgaccgtggacgaggcagtgcgtgctggcctggtgggccccgagtttcatgagaagctgctatcagccgagaaggctgtgacagggtacagggacccctacacagggcagagcgtctccctgttccaggccctgaagaagggcctcattccccgggagcagggcctgcgcctgttggacgcccagctgtccacgggcggcatcgtggaccccagcaagagccaccgcgtgcccctggatgtcgcctgcgcccgaggctgcctggatgaggagaccagcagggccctgtcggcaccaagggccgacgccaaggcctacagtgaccccagcacaggggagccggccacctacggcgagctccagcagcggtgccggcccgaccagctgaccgggctgagcctgctgccgctctcagaaaaggctgctcgggcccggcaggaggagctctactcagagctgcaggcccgtgagacctttgaaaagaccccggttgaggtccccgtgggtggcttcaagggcaggacggtgacggtgtgggagctcatcagctctgagtacttcactgcggagcagcggcaggagctgttgcgtcagttccgcacgggcaaggtcaccgtggagaaggtcatcaagattctcattaccatcgtggaggaggtggagaccctgcggcaggagaggctgtccttcagcggcctccgtgcccctgtgccagccagcgagctcctggcttccggggtcctcagcagagcccagtttgagcagctcaaggacggcaagacgacggtcaaggacctttcggagctgggctccgtgcggacgctgctgcagggcagtggctgcctcgccggcatctacctggaggacaccaaggagaaggtgtccatctacgaggccatgcgccggggcctgctgagagccacaacggctgcgctcctgctggaggcgcaggcggccactggcttcctggtggaccccgtgcggaaccagcgcctgtatgtccacgaggccgtgaaggcgggcgtggtgggccccgagcttcacgagcagctgctgtctgccgagaaggccgtcaccggctacagagacccctactcgggcagcaccatctccctcttccaggccatgcagaagggcctggttctccggcagcacggcatccgcctgctggaggcccagatcgccacgggcggcatcatcgaccccgtgcacagccaccgcgtgcctgtggacgtggcctaccagcgcggctacttcagtgaggagatgaaccgcgtcctggcggaccccagcgacgacaccaagggcttctttgaccccaacacgcatgagaacctcacgtacaggcagctgctggagcggtgcgtggaggaccccgagacgggcttgcgccttctgccactgaaaggggcggagaaggctgaggtggtggagaccacgcaggtgtacactgaggaggagacaagaagggcatttgaagagacacagatcgacattcccggcggcggcagccacggcggctccaccatgtccctgtgggaggtgatgcagtcggacctgatccccgaggagcagcgggcccagctgatggctgacttccaggccggccgggtgaccaaggaacgcatgatcatcatcatcatcgagatcattgagaagacagagatcatccgccagcagggtctggcctcctacgactacgtgcgccgccgcctcacggctgaggacctgttcgaggctcggatcatctctctcgagacctacaacctgctccgggagggcaccaggagcctccgtgaggctctcgaggcggagtccgcctggtgctacctctatggcacgggctccgtggctggtgtctacctgcccggttccaggcagacactgagcatctaccaggctctcaagaaagggctgctgagtgccgaggtggcccgcctgctgctggaggcacaggcagccacaggcttcctgctggacccggtgaagggggagcggctgactgtggatgaggctgtgcggaagggcctcgtggggcccgagctgcacgaccgcctgctctcggctgagcgggcggtcaccggctaccgtgacccctacaccgagcagaccatctcgctcttccaggccatgaagaaggagctgatccctactgaggaggccctgcggctgctggatgcccagctggccaccggcggcatcgtggacccccgcctgggcttccaccttcccctggaggtggcttaccagcgtggctacctcaacaaggacacgcacgaccagctgtcagagcccagcgaggtgcgcagctacgtggacccgtccaccgacgagcgcctcagctacacgcagctgctcaggcggtgccgtcgtgacgacggcaccggccagctgctcctgccactgtcggacgcccgcaagctgaccttccgtggcctgcggaagcagatcaccatggaggagctggtgcgctcgcaggtcatggacgaggccacggcgctgcagctgcgggagggcctgacctccatcgaggaggtcaccaagaacttgcagaagttcctggaaggcaccagctgcatcgctggtgtcttcgtggacgccaccaaggaacggctctcggtgtaccaggccatgaagaagggcatcatccgccccggcacagcctttgagctcctggaggcgcaggcggccaccggttacgtcatcgaccccatcaagggactgaagctgacggtggaggaggctgtgcgtatgggcattgtgggccccgagttcaaggacaagctgctgtcggccgagcgcgccgtcactgggtacaaggacccctactctgggaagctcatctccctcttccaggccatgaagaagggcctgatcctgaaggaccatggcatccgcctgctggaggcccagatcgccacgggcggcatcatcgaccctgaggagagccaccggctgcccgtggaggtggcctacaagcgcggcctcttcgatgaggagatgaacgagatcctgaccgacccctcggacgacaccaagggcttctttgaccctaacacggaggagaacctcacctacctgcagctgatggagcgttgtatcactgacccccagacgggcctgtgtctcttgccgctgaaggagaagaagcgggagcggaagacgtcctccaagtcctccgtgcgcaagcgccgagtggtcatcgtggaccccgagacgggcaaggagatgtcagtgtacgaggcctaccgcaagggcctgattgaccaccagacgtacctggagctgtccgagcaggagtgcgagtgggaggagatcaccatctcctcctcggacggcgtggtcaagtccatgatcatcgaccgccgctccgggcgccagtacgacatcgatgatgccatcgccaagaacctcatcgaccgctcggcactggaccagtaccgcgccggcacgctctccatcaccgagttcgccgacatgctctcgggcaacgccggtggtttccgctcccgttcctcctcggtgggatcctcctcctcctaccccatcagccccgccgtctccaggacccagctggcctcctggtcagaccccactgaggagacgggccccgtggctggcatcctggacacggagacgctggagaaggtgtccatcaccgaggccatgcaccggaacctggtggataacatcacggggcagcggctgctggaggcgcaggcctgcaccgggggcatcatcgaccccagcaccggtgagcgcttccctgtcaccgacgccgtcaacaagggcctggtggacaagatcatggtggaccgcatcaacctggcccagaaggccttctgcggcttcgaggacccacgcaccaagaccaagatgtcggccgcccaggccctgaagaagggctggctctactacgaggccggccagcgcttcctggaggtgcagtacctgaccggcggcttgatcgagcccgacacgccgggccgcgtgcccctggacgaggccctgcagcgcggcacggtggacgcccgcaccgcacagaagctgcgtgacgtgggcgcctactccaagtacctcacctgccctaagaccaagctcaagatctcctataaggacgcgctggaccgcagcatggtggaggagggcacggggctgcggctgctggaggctgccgcgcagtccaccaagggctactacagcccctacagcgtcagcggctccggctctaccgctggctcccgcaccggctcgcgcaccggctcccgggccggctcccgccgcggcagctttgacgccaccggctccggcttctccatgaccttctcttcatcctcctactcctcctcgggctacggccgccgctacgcctcggggtcctcggcctccctggggggccctgagtctgccgtggcctgaggctgcctgcgcccaccccgctctgcatgcggcccagcccggctcccaccgaggcgcgggggccgttttcaacgcttaaaggtgtcttcctcccaagtggtgcctaaagtttaaccaaaaagaccagactaatatattaatatatatctgctgtccagacagcctgtatcttgggggacagggctggcccagccctgctggccgcctcaccccctcgggtctcctcactcccttctacctgccactcacacagccaggtgccttggagggtcccaagctgggccccagcccaccctcctgtcttcccagggtagcccgcctgccagtcctagctgcacagggcagctgggcccaaccctgtctgtagagggccctggtgtttctagcactggcctgcacggtgggccttgctggggacggggggccccagtcagcctctctcccagtctacccagagaagccccttccccatgggaagacgaggccctcgggcccagcccccacagtgctgtctgatctgtgctttccagctcaccccccacactcactcctgagacccctggcctccggcgtcagcctccagcctctgttcccctagtaagtgccttccatgtcggcctctaaccccaggccccgaggacccagacccagtggggaggcggacgttccagccggcatggctgggaactgcagacctgtcctcctggtgggtccaggggcccctccagcttgtggagccccacactggggtgccgcctgcccgtctctctcccatggagccccagccccctttgggcccagggacaccagccaggctctgtgctgaccctcctgttgcacccagccctggtctcagcagcgaccacccctgcctccaccctctgagctttgcatgttccactaaccccgggcgggtggcaggtggaggtgtcaggctgctggcgcctctgcaagggcagaacactaacctgaccgtgggcggggccttgcggtatccgcccccaataaaagcaattccaaccttgagcccgcgccctcacgctcagcaccccagcctgcctgcccgcccgcctgccctgccgctgcccgctgtcacaccctgtagcgcgggagcttctcgcagcgccccgggccttctcgtggtaccctgcctgctgcctttgcccccgcactgactgcccggctccagcagccatggtggccggcatgctcatgccacgggaccagctgcgggccatctatgaggtgctcttccgcgagggcgtgatggtggccaagaaggaccggcggccccgcagcttgcacccccatgtgcccggcgtcaccaacctgcaggtcatgcgtgccatggcgtccctgcgggcacggggcctggtccgcgagacctttgcctggtgccacttttactggtacctcaccaatgaaggcatcgcccacctccgccagtacctgcacctgccgccagagatcgtgcccgcctctctgcagcgcgtgcgccgccccgtcgccatggtgatgcccgcacgccgcaccccccacgtgcaggctgtgcagggtcccctgggctccccacccaagcgggggccgctgccgacggaggagcagcgggtctaccgtcggaaggagcttgaggaggtgtcacctgagacccctgtggtgcctgctaccacccagcggaccctggccaggccaggcccggagcctgccccagccacagatgagcgggatcgtgtgcagaagaaaaccttcaccaagtgggtcaacaagcacctcatcaaggcccagaggcacatcagtgacctgtatgaagacctccgcgatggccacaacctcatctccctgctggaggtcctctcgggggacagcctgccccgggagaaggggaggatgcgtttccacaagctgcagaatgtccagattgccctggactacctccggcaccgccaggtgaagctggtgaacatcaggaatgatgacatcgctgacggcaaccccaagctgacccttggcctcatctggacaatcattctgcacttccagatctcagatatccaggtgagtgggcagtcggaggacatgacggccaaggagaagctgctgctgtggtcgcagcgaatggtggaggggtaccagggcctgcgatgcgacaacttcacctccagctggagagacggccgcctcttcaatgccatcatccaccggcacaagcccctgctcatcgacatgaacaaggtgtaccggcagaccaacctggagaacctggaccaggccttctctgtggcggagcgggacctgggagtgacgcggctcctggaccctgaggacgtggatgtccctcagcccgacgagaagtccatcatcacctacgtctcgtcgctgtatgacgccatgccccgcgtgccggacgtgcaggatggggtgagggccaacgagctgcagctgcgctggcaggagtaccgggagctggtgctgctgctgcttcagtggatgcgacaccacacggccgcctttgaggaacgcaggttcccctccagcttcgaggagattgagatcctgtggtctcagttcctgaagtttaaggagatggagctaccagccaaggaggccgacaagaacaggtccaagggcatctaccaatccctggagggagcggtgcaagcaggccagctcaaggtgccccctggctaccacccgctggatgtggagaaggagtggggcaagctgcacgtggccatcctggagcgggagaagcagctccgcagcgagtttgagaggctggagtgtcttcagcgcatcgtgaccaagctgcagatggaggcggggctgtgtgaggagcagctgaaccaggccgacgccctgctgcagtcggatgtccggctgctggctgcaggcaaagtgccacagcgggcgggggaggtggaacgggacttggacaaggcggatagcatgatccggctgctcttcaacgacgtgcagaccctcaaggatggacggcacccgcagggcgagcagatgtaccgcagggtgtaccgtctgcacgagcgcctggtagccatccgcaccgagtacaacctacggctgaaggcaggcgtg

SEQ ID NO: 643 - DNA, 32765 bp, Homo sapiens
  misc_feature (212)..(212): second gene starts at position 212
atgttcagctttgtggacctccggctcctgctcctcttagcggccaccgccctcctgacgcacggccaagaggaaggccaagtcgagggccaagacgaagacatcccaccaatcacctgcgtacagaacggcctcaggtaccatgaccgagacgtgtggaaacccgagccctgccggatctgcgtctgcgacaacggcaaggtgttgtgcgatgacgtgatctgtgacgagaccaagaactgccccggcgccgaagtccccgagggcgagtgctgtcccgtctgccccgacggctcagagtcacccaccgaccaagaaaccaccggcgtcgagggacccaagggagacactggcccccgaggcccaaggggacccgcaggcccccctggccgagatggcatccctggacagcctggacttcccggaccccccggaccccccggacctcccggaccccctggcctcggaggaaactttgctccccagctgtcttatggctatgatgagaaatcaaccggaggaatttccgtgcctggccccatgggtccctctggtcctcgtggtctccctggcccccctggtgcacctggtccccaaggcttccaaggtccccctggtgagcctggcgagcctggagcttcaggtcccatgggtccccgaggtcccccaggtccccctggaaagaatggagatgatggggaagctggaaaacctggtcgtcctggtgagcgtgggcctcctgggcctcagggtgctcgaggattgcccggaacagctggcctccctggaatgaagggacacagaggtttcagtggtttggatggtgccaagggagatgctggtcctgctggtcctaagggtgagcctggcagccctggtgaaaatggagctcctggtcagatgggcccccgtggcctgcctggtgagagaggtcgccctggagcccctggccctgctggtgctcgtggaaatgatggtgctactggtgctgccgggccccctggtcccaccggccccgctggtcctcctggcttccctggtgctgttggtgctaagggtgaagctggtccccaagggccccgaggctctgaaggtccccagggtgtgcgtggtgagcctggcccccctggccctgctggtgctgctggccctgctggaaaccctggtgctgatggacagcctggtgctaaaggtgccaatggtgctcctggtattgctggtgctcctggcttccctggtgcccgaggcccctctggaccccagggccccggcggccctcctggtcccaagggtaacagcggtgaacctggtgctcctggcagcaaaggagacactggtgctaagggagagcctggccctgttggtgttcaaggaccccctggccctgctggagaggaaggaaagcgaggagctcgaggtgaacccggacccactggcctgcccggaccccctggcgagcgtggtggacctggtagccgtggtttccctggcgcagatggtgttgctggtcccaagggtcccgctggtgaacgtggttctcctggccctgctggccccaaaggatctcctggtgaagctggtcgtcccggtgaagctggtctgcctggtgccaagggtctgactggaagccctggcagccctggtcctgatggcaaaactggcccccctggtcccgccggtcaagatggtcgccccggacccccaggcccacctggtgcccgtggtcaggctggtgtgatgggattccctggacctaaaggtgctgctggagagcccggcaaggctggagagcgaggtgttcccggaccccctggcgctgtcggtcctgctggcaaagatggagaggctggagctcagggaccccctggccctgctggtcccgctggcgagagaggtgaacaaggccctgctggctcccccggattccagggtctccctggtcctgctggtcctccaggtgaagcaggcaaacctggtgaacagggtgttcctggagaccttggcgcccctggcccctctggagcaagaggcgagagaggtttccctggcgagcgtggtgtgcaaggtccccctggtcctgctggtccccgaggggccaacggtgctcccggcaacgatggtgctaagggtgatgctggtgcccctggagctcccggtagccagggcgcccctggccttcagggaatgcctggtgaacgtggtgcagctggtcttccagggcctaagggtgacagaggtgatgctggtcccaaaggtgctgatggctctcctggcaaagatggcgtccgtggtctgactggccccattggtcctcctggccctgctggtgcccctggtgacaagggtgaaagtggtcccagcggccctgctggtcccactggagctcgtggtgcccccggagaccgtggtgagcctggtccccccggccctgctggctttgctggcccccctggtgctgacggccaacctggtgctaaaggcgaacctggtgatgctggtgctaaaggcgatgctggtccccctggccctgccggacccgctggaccccctggccccattggtaatgttggtgctcctggagccaaaggtgctcgcggcagcgctggtccccctggtgctactggtttccctggtgctgctggccgagtcggtcctcctggcccctctggaaatgctggaccccctggccctcctggtcctgctggcaaagaaggcggcaaaggtccccgtggtgagactggccctgctggacgtcctggtgaagttggtccccctggtccccctggccctgctggcgagaaaggatcccctggtgctgatggtcctgctggtgctcctggtactcccgggcctcaaggtattgctggacagcgtggtgtggtcggcctgcctggtcagagaggagagagaggcttccctggtcttcctggcccctctggtgaacctggcaaacaaggtccctctggagcaagtggtgaacgtggtccccctggtcccatgggcccccctggattggctggaccccctggtgaatctggacgtgagggggctcctggtgccgaaggttcccctggacgagacggttctcctggcgccaagggtgaccgtggtgagaccggccccgctggaccccctggtgctcctggtgctcctggtgcccctggccccgttggccctgctggcaagagtggtgatcgtggtgagactggtccgtgtgcgactataagcaggtggaggtgactgtgcacaagggtgacgagtgccagctggtgggccctgcacagccgtcccactggaaggtgctcagcagctccggcagcgaggccgccgtgccctccgtgtgcttcctggtgcccccgcccaaccaggaggcccaggaggccgtcaccaggctggaggcccagcaccaggccctggtcacgctgtggcaccagttgcacgtggacatgaagagccttctggcctggcagagccttcgccgcgacgtgcagctcatccgctcctggtccctggccacgttccgcaccctgaagccagaggagcagcgccaagccctgcacagcctggagctgcactaccaggccttcctgcgggacagccaggacgcgggcggcttcggacccgaggaccggctgatggctgagcgcgagtacggctcctgcagccaccactaccagcagctgctgcagagcctggaacagggtgcacaggaagagtctcgctgccagcgctgcatctccgagctcaaagacatccggctgcagctggaggcctgtgagacgcgcaccgtgcaccgcctgcggctgccgctggacaaagagccggcacgggagtgtgcccagcgcatcgccgagcagcagaaggcacaggcagaggtggaggggctgggcaagggggtcgcccggctctctgccgaggccgagaaggtcttggccctaccagagccatcgcctgcggcccccacgctgcgctcggagctggagctgacgctgggcaagctggagcaggtccgcagcctgtctgccatctacctggagaagctcaagaccatcagcctggtgatccgcggcacgcagggggccgaggaggtgctcagggcccacgaggagcagctcaaggaggcccaggccgtgccggccaccctcccggagctcgaggccaccaaggcctctctgaagaagctgcgggcccaggccgaggcacagcagcccacgttcgacgccctgcgggatgagctgcggggggcacaggaggtgggggagcgactgcagcagcggcacggggagcgggacgtggaggtggagcgctggcgggagcgggtcgcccagttgcttgagcgctggcaggctgtgctggcccagaccgacgtgcggcagcgcgagctcgagcaactgggccgccagctgcgttactaccgcgagagtgcagaccccttgggcgcctggctgcaggacgccaggcggcggcaggagcagatccaggccatgccgctggccgacagccaggctgtgcgggagcagctgcggcaggagcaggccctgctggaggagatcgagcgccacggcgagaaggtcgaggagtgccagaggtttgcgaaacagtacatcaacgccatcaaggactatgaactccagctggtgacgtacaaggcgcagcttgagccggtggcctccccggccaagaagcccaaggtccagtcgggatcagagagtgtcatccaggagtacgtggacctgcgtacgcactacagcgagctgaccacactgacgagccagtacatcaagttcatcagcgagactctgcggcgcatggaggaggaggagaggctggctgagcagcagcgggcagaggagcgcgagcggctggccgaggtggaggccgcgctggagaagcagcggcagctggccgaggcgcacgcccaggcaaaggcacaggcggagcgggaggcgaaggagctgcagcagcgcatgcaggaggaggtggtgcggcgggaggaggcggcggtggacgcgcagcagcagaagcgcagcattcaggaggagctgcagcagctgcggcagagctcggaggcggagatccaggccaaggcccggcaggcagaggcggctgagcgcagccggctgcgcatcgaggaggagatccgcgtggtgcgcctgcagttggaggccaccgagcgccagcgtggcggggctgagggggagctgcaggcactgcgtgcacgggcggaggaggctgaggcacaaaagcgacaggcgcaggaggaggccgagcgcttgcggaggcaggtgcaggacgagagccagcgtaagcggcaggcggaggtggagctggcctcgcgcgtgaaggccgaggccgaggcggcgcgcgagaagcagcgggccctgcaggccctggaggagctgcggctgcaggcggaggaggcggagcggcgcctgcggcaggccgaggtggagcgagcgcggcaggtacaggtggccctggagacggcgcagcgcagtgcagaggcggagctgcagagcaaacgcgcctccttcgccgagaagacggcacagctggagcgctccctgcaggaggaacacgtggctgtggcacagctgcgggaggaggctgagcggcgggcacagcagcaggccgaggccgagcgggcgcgcgaggaggcagagcgggagctggagcgctggcagctcaaggccaacgaggcgctacggctgcggctgcaggcggaggaggtggcgcagcagaagagcctggcgcaggccgaggctgagaagcagaaggaggaggcggagcgcgaggcgcggcggcgcggcaaggcggaggagcaggccgtccggcagcgggagctggctgaacaagagctggagaagcagcggcagctggcggaaggcaccgcgcagcagcgcctggccgcggagcaggagttgatccggctgcgggccgagacggagcagggggagcagcagcggcagctgctggaggaggagctggcccggctgcagcgtgaggcggctgcagccacgcagaaacggcaggagctggaagccgagctggccaaggtgcgggccgagatggaggtgctgctggccagcaaggcgagggctgaggaggagtcgcgctccaccagcgagaagtccaagcagaggctggaggccgaggccggccggttccgcgagctggccgaggaggccgcccgcctgcgtgccctggcggaagaggccaagcggcagcggcagctggccgaggaagacgcggcgcggcagcgggccgaggcggagcgggtgcttgcggagaagctggccgccatcggcgaggccacgcggctcaagacggaggcggagatcgcgctcaaggagaaggaggcggagaacgagcgcctgcggcggctggcggaggacgaggccttccagcggcggcggctggaggagcaggccgcgcaacacaaggctgacatcgaggagcgcctggcccagctgcgcaaggcatcggacagcgagctggagcggcagaaggggctggtggaggacacgctgaggcagcggcggcaggtggaggaggagatcctggcgctgaaggcgagcttcgagaaggcggccgctggcaaggcggagctggagctggagctgggacgcatccgcagcaacgcggaggacacgctgcgcagcaaggagcaggccgagctggaggctgcgaggcagcggcagctggcggcggaggaggagcggcggcgccgtgaggctgaggagcgcgtgcagaagagcctggcggccgaggaggaggccgcacggcagcggaaggcggcgctggaggaagtcgagcggctgaaagccaaggtggaggaggcgcggcgcctgcgggagcgagcggagcaggagtcggcgcggcagctgcagctggcccaggaggccgcccagaagcggctgcaggcggaagagaaggcacacgccttcgcggtgcagcagaaggagcaggagctacagcagacgctgcagcaggagcagagcgtgctggaccagctgcgcggcgaggcggaggcggcccggcgggcggctgaggaggcggaggaggcccgggtgcaggcggagcgtgaggcggcgcagtcccggcggcaggtggaagaggccgagcggctgaagcagtcggcagaggagcaggcacaggcccgggctcaggcacaggcggctgcagagaagctgcgcaaggaggccgagcaagaggcggcgcggcgggcacaggcggagcaggcggccctgcggcagaagcaggcagctgacgcggagatggagaagcataagaaattcgccgagcagacgctgcggcagaaggcgcaggtggagcaggagctgacaacactgcggctgcagctggaggagaccgaccaccagaagaacctgctggacgaggagctgcagcggctgaaggcggaggccacggaggccgcacgccagcgcagccaggtggaggaggagctcttctcggtgcgcgtgcagatggaggagctgagcaagctcaaggcacgcatcgaggctgagaaccgcgcactcatcttgcgtgacaaggacaatacgcagcgcttcctgcaggaggaggctgagaagatgaagcaggtggcggaggaggccgcgcggctgagtgtggcggcccaagaggctgcgcgactgcggcagctggcagaggaggacctggcacagcagcgggccttggcagagaagatgctcaaggagaagatgcaggcggtgcaggaggccacgcgactcaaggctgaggcggaactgctgcagcagcagaaggagcttgcgcaggagcaggcgcggcggctgcaggaggacaaggagcagatggcgcagcagctggcggaggagacgcagggcttccagcggacgctggaggccgagcggcagcggcagctggagatgagcgctgaggctgagcgcctcaagctgcgtgtggccgagatgagccgagcccaggcccgcgctgaggaggacgcccagcgcttccggaagcaggcggaggagatcggtgagaagctgcaccgcacggagctcgccacccaggagaaggtgaccctggtgcagacactggagatccagcgacagcagagtgaccatgatgccgagcgcctgcgggaggccatcgctgagctggagcgtgagaaggagaagctccaacaggaggccaaactgctgcagctcaagtctgaggagatgcagacggtgcagcaggagcagctgctgcaggagacgcaggccctgcagcaaagcttcctctctgaaaaggacagcctgctacagcgggagcgcttcatcgagcaggagaaggccaagctggagcagctcttccaggacgaggtggccaaggcacagcagctgcgtgaggagcagcagcggcagcagcagcagatggagcaggaacggcagcggctggtggccagcatggaggaggcgcggcggcggcagcatgaggccgaggagggcgtgcggcgcaagcaggaggagctgcagcagctggagcagcagcggcggcagcaggaggagctgctggctgaggagaaccagaggctgcgtgagcagctgcagctcctggaggagcagcaccgggccgcgctggcgcactcagaggaggtcactgcctcgcaggtggctgccacaaagaccctgcccaatggccgggatgcacttgatggccccgcggcagaggcagagccggagcacagcttcgatggcctgcggcggaaggtgtcagctcagaggctgcaggaggccggcatcctgagtgcggaggagctgcagcggttggcgcagggccacaccacggtggacgagctcgcacggcgggaagacgtgcgccactacctgcagggccgcagcagtatcgcagggctgttgctgaaggccaccaatgagaagctgagtgtttacgccgccctgcagaggcagctgctgagtcccggcacggccctcatcctgctggaggcgcaggcggcctcaggcttcctgctggaccctgtgcggaaccggcggctgaccgtcaacgaggctgtgaaggagggtgtggtgggccccgagctgcaccacaagctgctgtcggccgagcgcgccgtcactggctacaaggacccctacactggccagcagatctctctcttccaagccatgcagaagggcctcatcgtccgggagcacggcatccgcctgctggaggcccagatcgccacgggcggcgttatcgaccccgtgcacagccaccgcgtgcccgtggacgtggcctaccggcgcggctacttcgacgaggagatgaaccgcgtcctggcggaccccagcgacgacaccaagggcttctttgaccccaacacgcacgagaacctcacgtacctgcagctactggagcgctgcgtggaggaccccgagacgggcctgtgccttctgccactcacggataaggctgccaagggcggggagctggtctacactgactccgaggcccgggacgtctttgagaaggccaccgtgtctgcgccgttcggcaagttccagggcaagacggtgaccatttgggagatcatcaactcggaatacttcacggcagagcagcggcgggacctgctgcggcagttccgcacgggccggatcacagtggagaagatcatcaagatcatcatcacggtggtggaggagcaggagcagaagggccggctttgctttgagggcctgcgcagcctggtgccagccgccgagctgctggagagcagggtcatcgaccgcgagctctaccagcagctgcagcgaggtgagcgctctgtgcgagacgtagccgaggtggacactgtgcggcgggctctccggggtgccaacgtcatcgcgggtgtatggctggaggaggcggggcagaagctgagtatctacaatgccctgaagaaagacctgctgccatccgacatggccgtggccctgttggaagcccaggccggcaccgggcacatcatcgaccccgccaccagcgcccggctgaccgtggacgaggcagtgcgtgctggcctggtgggccccgagtttcatgagaagctgctatcagccgagaaggctgtgacagggtacagggacccctacacagggcagagcgtctccctgttccaggccctgaagaagggcctcattccccgggagcagggcctgcgcctgttggacgcccagctgtccacgggcggcatcgtggaccccagcaagagccaccgcgtgcccctggatgtcgcctgcgcccgaggctgcctggatgaggagaccagcagggccctgtcggcaccaagggccgacgccaaggcctacagtgaccccagcacaggggagccggccacctacggcgagctccagcagcggtgccggcccgaccagctgaccgggctgagcctgctgccgctctcagaaaaggctgctcgggcccggcaggaggagctctactcagagctgcaggcccgtgagacctttgaaaagaccccggttgaggtccccgtgggtggcttcaagggcaggacggtgacggtgtgggagctcatcagctctgagtacttcactgcggagcagcggcaggagctgttgcgtcagttccgcacgggcaaggtcaccgtggagaaggtcatcaagattctcattaccatcgtggaggaggtggagaccctgcggcaggagaggctgtccttcagcggcctccgtgcccctgtgccagccagcgagctcctggcttccggggtcctcagcagagcccagtttgagcagctcaaggacggcaagacgacggtcaaggacctttcggagctgggctccgtgcggacgctgctgcagggcagtggctgcctcgccggcatctacctggaggacaccaaggagaaggtgtccatctacgaggccatgcgccggggcctgctgagagccacaacggctgcgctcctgctggaggcgcaggcggccactggcttcctggtggaccccgtgcggaaccagcgcctgtatgtccacgaggccgtgaaggcgggcgtggtgggccccgagcttcacgagcagctgctgtctgccgagaaggccgtcaccggctacagagacccctactcgggcagcaccatctccctcttccaggccatgcagaagggcctggttctccggcagcacggcatccgcctgctggaggcccagatcgccacgggcggcatcatcgaccccgtgcacagccaccgcgtgcctgtggacgtggcctaccagcgcggctacttcagtgaggagatgaaccgcgtcctggcggaccccagcgacgacaccaagggcttctttgaccccaacacgcatgagaacctcacgtacaggcagctgctggagcggtgcgtggaggaccccgagacgggcttgcgccttctgccactgaaaggggcggagaaggctgaggtggtggagaccacgcaggtgtacactgaggaggagacaagaagggcatttgaagagacacagatcgacattcccggcggcggcagccacggcggctccaccatgtccctgtgggaggtgatgcagtcggacctgatccccgaggagcagcgggcccagctgatggctgacttccaggccggccgggtgaccaaggaacgcatgatcatcatcatcatcgagatcattgagaagacagagatcatccgccagcagggtctggcctcctacgactacgtgcgccgccgcctcacggctgaggacctgttcgaggctcggatcatctctctcgagacctacaacctgctccgggagggcaccaggagcctccgtgaggctctcgaggcggagtccgcctggtgctacctctatggcacgggctccgtggctggtgtctacctgcccggttccaggcagacactgagcatctaccaggctctcaagaaagggctgctgagtgccgaggtggcccgcctgctgctggaggcacaggcagccacaggcttcctgctggacccggtgaagggggagcggctgactgtggatgaggctgtgcggaagggcctcgtggggcccgagctgcacgaccgcctgctctcggctgagcgggcggtcaccggctaccgtgacccctacaccgagcagaccatctcgctcttccaggccatgaagaaggagctgatccctactgaggaggccctgcggctgctggatgcccagctggccaccggcggcatcgtggacccccgcctgggcttccaccttcccctggaggtggcttaccagcgtggctacctcaacaaggacacgcacgaccagctgtcagagcccagcgaggtgcgcagctacgtggacccgtccaccgacgagcgcctcagctacacgcagctgctcaggcggtgccgtcgtgacgacggcaccggccagctgctcctgccactgtcggacgcccgcaagctgaccttccgtggcctgcggaagcagatcaccatggaggagctggtgcgctcgcaggtcatggacgaggccacggcgctgcagctgcgggagggcctgacctccatcgaggaggtcaccaagaacttgcagaagttcctggaaggcaccagctgcatcgctggtgtcttcgtggacgccaccaaggaacggctctcggtgtaccaggccatgaagaagggcatcatccgccccggcacagcctttgagctcctggaggcgcaggcggccaccggttacgtcatcgaccccatcaagggactgaagctgacggtggaggaggctgtgcgtatgggcattgtgggccccgagttcaaggacaagctgctgtcggccgagcgcgccgtcactgggtacaaggacccctactctgggaagctcatctccctcttccaggccatgaagaagggcctgatcctgaaggaccatggcatccgcctgctggaggcccagatcgccacgggcggcatcatcgaccctgaggagagccaccggctgcccgtggaggtggcctacaagcgcggcctcttcgatgaggagatgaacgagatcctgaccgacccctcggacgacaccaagggcttctttgaccctaacacggaggagaacctcacctacctgcagctgatggagcgttgtatcactgacccccagacgggcctgtgtctcttgccgctgaaggagaagaagcgggagcggaagacgtcctccaagtcctccgtgcgcaagcgccgagtggtcatcgtggaccccgagacgggcaaggagatgtcagtgtacgaggcctaccgcaagggcctgattgaccaccagacgtacctggagctgtccgagcaggagtgcgagtgggaggagatcaccatctcctcctcggacggcgtggtcaagtccatgatcatcgaccgccgctccgggcgccagtacgacatcgatgatgccatcgccaagaacctcatcgaccgctcggcactggaccagtaccgcgccggcacgctctccatcaccgagttcgccgacatgctctcgggcaacgccggtggtttccgctcccgttcctcctcggtgggatcctcctcctcctaccccatcagccccgccgtctccaggacccagctggcctcctggtcagaccccactgaggagacgggccccgtggctggcatcctggacacggagacgctggagaaggtgtccatcaccgaggccatgcaccggaacctggtggataacatcacggggcagcggctgctggaggcgcaggcctgcaccgggggcatcatcgaccccagcaccggtgagcgcttccctgtcaccgacgccgtcaacaagggcctggtggacaagatcatggtggaccgcatcaacctggcccagaaggccttctgcggcttcgaggacccacgcaccaagaccaagatgtcggccgcccaggccctgaagaagggctggctctactacgaggccggccagcgcttcctggaggtgcagtacctgaccggcggcttgatcgagcccgacacgccgggccgcgtgcccctggacgaggccctgcagcgcggcacggtggacgcccgcaccgcacagaagctgcgtgacgtgggcgcctactccaagtacctcacctgccctaagaccaagctcaagatctcctataaggacgcgctggaccgcagcatggtggaggagggcacggggctgcggctgctggaggctgccgcgcagtccaccaagggctactacagcccctacagcgtcagcggctccggctctaccgctggctcccgcaccggctcgcgcaccggctcccgggccggctcccgccgcggcagctttgacgccaccggctccggcttctccatgaccttctcttcatcctcctactcctcctcgggctacggccgccgctacgcctcggggtcctcggcctccctggggggccctgagtctgccgtggcctgaggctgcctgcgcccaccccgctctgcatgcggcccagcccggctcccaccgaggcgcgggggccgttttcaacgcttaaaggtgtcttcctcccaagtggtgcctaaagtttaaccaaaaagaccagactaatatattaatatatatctgctgtccagacagcctgtatcttgggggacagggctggcccagccctgctggccgcctcaccccctcgggtctcctcactcccttctacctgccactcacacagccaggtgccttggagggtcccaagctgggccccagcccaccctcctgtcttcccagggtagcccgcctgccagtcctagctgcacagggcagctgggcccaaccctgtctgtagagggccctggtgtttctagcactggcctgcacggtgggccttgctggggacggggggccccagtcagcctctctcccagtctacccagagaagccccttccccatgggaagacgaggccctcgggcccagcccccacagtgctgtctgatctgtgctttccagctcaccccccacactcactcctgagacccctggcctccggcgtcagcctccagcctctgttcccctagtaagtgccttccatgtcggcctctaaccccaggccccgaggacccagacccagtggggaggcggacgttccagccggcatggctgggaactgcagacctgtcctcctggtgggtccaggggcccctccagcttgtggagccccacactggggtgccgcctgcccgtctctctcccatggagccccagccccctttgggcccagggacaccagccaggctctgtgctgaccctcctgttgcacccagccctggtctcagcagcgaccacccctgcctccaccctctgagctttgcatgttccactaaccccgggcgggtggcaggtggaggtgtcaggctgctggcgcctctgcaagggcagaacactaacctgaccgtgggcggggccttgcggtatccgcccccaataaaagcaattccaaccttagagtggccgccgggtgctggaggctccgctgcaccccgcgccccgcgcccgccggcatggccggcccgctgcccgacgagcaggacttcatccaggcctacgaggaggtgcgcgagaagtacaaagatgagcgggatcgtgtgcagaagaaaaccttcaccaagtgggtcaacaagcacctcatcaaggcccagaggcacatcagtgacctgtatgaagacctccgcgatggccacaacctcatctccctgctggaggtcctctcgggggacagcctgccccgggagaaggggaggatgcgtttccacaagctgcagaatgtccagattgccctggactacctccggcaccgccaggtgaagctggtgaacatcaggaatgatgacatcgctgacggcaaccccaagctgacccttggcctcatctggacaatcattctgcacttccagatctcagatatccaggtgagtgggcagtcggaggacatgacggccaaggagaagctgctgctgtggtcgcagcgaatggtggaggggtaccagggcctgcgatgcgacaacttcacctccagctggagagacggccgcctcttcaatgccatcatccaccggcacaagcccctgctcatcgacatgaacaaggtgtaccggcagaccaacctggagaacctggaccaggccttctctgtggcggagcgggacctgggagtgacgcggctcctggaccctgaggacgtggatgtccctcagcccgacgagaagtccatcatcacctacgtctcgtcgctgtatgacgccatgccccgcgtgccggacgtgcaggatggggtgagggccaacgagctgcagctgcgctggcaggagtaccgggagctggtgctgctgctgcttcagtggatgcgacaccacacggccgcctttgaggaacgcaggttcccctccagcttcgaggagattgagatcctgtggtctcagttcctgaagtttaaggagatggagctaccagccaaggaggccgacaagaacaggtccaagggcatctaccaatccctggagggagcggtgcaagcaggccagctcaaggtgccccctggctaccacccgctggatgtggagaaggagtggggcaagctgcacgtggccatcctggagcgggagaagcagctccgcagcgagtttgagaggctggagtgtcttcagcgcatcgtgaccaagctgcagatggaggcggggctgtgtgaggagcagctgaaccaggccgacgccctgctgcagtcggatgtccggctgctggctgcaggcaaagtgccacagcgggcgggggaggtggaacgggacttggacaaggcggatagcatgatccggctgctcttcaacgacgtgcagaccctcaaggatggacggcacccgcagggcgagcagatgtaccgcagggtgtaccgtctgcacgagcgcctggtagccatccgcaccgagtacaacctacggctgaaggcaggcgtggcggcccctgcaacccaggtggcccaggtgactctgcagagtgtgcagaggcgccccgagctggaggactccactctgcgctacctgcaggacctgctggcctgggtggaggagaaccagcaccgtgtggatggcgctgagtggggtgtggacctgcccagcgtggaggcgcagctgggcagccaccgaggcctgcaccagtccatcgaagaattccgggccaagatcgagcgggcacggagtgacgagggccagctctcccccgccacccggggtgcctaccgtgactgcctgggtcggctggacctgcagtacgccaagctgctgaactcctccaaggcccgcctcaggtccctggagagcttgcacagctttgtggcagccgccactaaggagctaatgtggctgaatgagaaggaggaggaggaggtgggcttcgactggagcgaccgcaacaccaacatgaccgccaagaaggagagctactcggcgctgatgcgggagctggagctgaaggagaagaagatcaaggagctccaaaatgctggggaccggctgctgcgggaggaccacccggcccggcccacggtggagtccttccaggcggccctgcagacgcagtggagctggatgctacagctgtgctgctgtatcgaggcacacctgaaggagaacgctgcctactttcagttcttctcagatgtgcgggaggccgaggggcagttgcagaagctgcaggaggcactgcgtaggaaatacagttgtgatcgctccgccaccgtcacccggctggaggacctgctgcaggatgcccaggacgagaaggaacagctgaacgagtacaagggccacctctcaggcctggccaagcgggccaaggccgtcgtgcagctgaagccccgccacccagcccaccccatgcggggccgcctgcccctgctggccgtgtgcgactataagcaggtggaggtgactgtgcacaagggtgacgagtgccagctggtgggccctgcacagccgtcccactggaaggtgctcagcagctccggcagcgaggccgccgtgccctccgtgtgcttcctggtgcccccgcccaaccaggaggcccaggaggccgtcaccaggctggaggcccagcaccaggccctggtcacgctgtggcaccagttgcacgtggacatgaagagccttctggcctggcagagccttcgccgcgacgtgcagctcatccgctcctggtccctggccacgttccgcaccctgaagccagaggagcagcgccaagccctgcacagcctggagctgcactaccaggccttcctgcgggacagccaggacgcgggcggcttcggacccgaggaccggctgatggctgagcgcgagtacggctcctgcagccaccactaccagcagctgctgcagagcctggaacagggtgcacaggaagagtctcgctgccagcgctgcatctccgagctcaaagacatccggctgcagctggaggcctgtgagacgcgcaccgtgcaccgcctgcggctgccgctggacaaagagccggcacgggagtgtgcccagcgcatcgccgagcagcagaaggcacaggcagaggtggaggggctgggcaagggggtcgcccggctctctgccgaggccgagaaggtcttggccctaccagagccatcgcctgcggcccccacgctgcgctcggagctggagctgacgctgggcaagctggagcaggtccgcagcctgtctgccatctacctggagaagctcaagaccatcagcctggtgatccgcggcacgcagggggccgaggaggtgctcagggcccacgaggagcagctcaaggaggcccaggccgtgccggccaccctcccggagctcgaggccaccaaggcctctctgaagaagctgcgggcccaggccgaggcacagcagcccacgttcgacgccctgcgggatgagctgcggggggcacaggaggtgggggagcgactgcagcagcggcacggggagcgggacgtggaggtggagcgctggcgggagcgggtcgcccagttgcttgagcgctggcaggctgtgctggcccagaccgacgtgcggcagcgcgagctcgagcaactgggccgccagctgcgttactaccgcgagagtgcagaccccttgggcgcctggctgcaggacgccaggcggcggcaggagcagatccaggccatgccgctggccgacagccaggctgtgcgggagcagctgcggcaggagcaggccctgctggaggagatcgagcgccacggcgagaaggtcgaggagtgccagaggtttgcgaaacagtacatcaacgccatcaaggactatgaactccagctggtgacgtacaaggcgcagcttgagccggtggcctccccggccaagaagcccaaggtccagtcgggatcagagagtgtcatccaggagtacgtggacctgcgtacgcactacagcgagctgaccacactgacgagccagtacatcaagttcatcagcgagactctgcggcgcatggaggaggaggagaggctggctgagcagcagcgggcagaggagcgcgagcggctggccgaggtggaggccgcgctggagaagcagcggcagctggccgaggcgcacgcccaggcaaaggcacaggcggagcgggaggcgaaggagctgcagcagcgcatgcaggaggaggtggtgcggcgggaggaggcggcggtggacgcgcagcagcagaagcgcagcattcaggaggagctgcagcagctgcggcagagctcggaggcggagatccaggccaaggcccggcaggcagaggcggctgagcgcagccggctgcgcatcgaggaggagatccgcgtggtgcgcctgcagttggaggccaccgagcgccagcgtggcggggctgagggggagctgcaggcactgcgtgcacgggcggaggaggctgaggcacaaaagcgacaggcgcaggaggaggccgagcgcttgcggaggcaggtgcaggacgagagccagcgtaagcggcaggcggaggtggagctggcctcgcgcgtgaaggccgaggccgaggcggcgcgcgagaagcagcgggccctgcaggccctggaggagctgcggctgcaggcggaggaggcggagcggcgcctgcggcaggccgaggtggagcgagcgcggcaggtacaggtggccctggagacggcgcagcgcagtgcagaggcggagctgcagagcaaacgcgcctccttcgccgagaagacggcacagctggagcgctccctgcaggaggaacacgtggctgtggcacagctgcgggaggaggctgagcggcgggcacagcagcaggccgaggccgagcgggcgcgcgaggaggcagagcgggagctggagcgctggcagctcaaggccaacgaggcgctacggctgcggctgcaggcggaggaggtggcgcagcagaagagcctggcgcaggccgaggctgagaagcagaaggaggaggcggagcgcgaggcgcggcggcgcggcaaggcggaggagcaggccgtccggcagcgggagctggctgaacaagagctggagaagcagcggcagctggcggaaggcaccgcgcagcagcgcctggccgcggagcaggagttgatccggctgcgggccgagacggagcagggggagcagcagcggcagctgctggaggaggagctggcccggctgcagcgtgaggcggctgcagccacgcagaaacggcaggagctggaagccgagctggccaaggtgcgggccgagatggaggtgctgctggccagcaaggcgagggctgaggaggagtcgcgctccaccagcgagaagtccaagcagaggctggaggccgaggccggccggttccgcgagctggccgaggaggccgcccgcctgcgtgccctggcggaagaggccaagcggcagcggcagctggccgaggaagacgcggcgcggcagcgggccgaggcggagcgggtgcttgcggagaagctggccgccatcggcgaggccacgcggctcaagacggaggcggagatcgcgctcaaggagaaggaggcggagaacgagcgcctgcggcggctggcggaggacgaggccttccagcggcggcggctggaggagcaggccgcgcaacacaaggctgacatcgaggagcgcctggcccagctgcgcaaggcatcggacagcgagctggagcggcagaaggggctggtggaggacacgctgaggcagcggcggcaggtggaggaggagatcctggcgctgaaggcgagcttcgagaaggcggccgctggcaaggcggagctggagctggagctgggacgcatccgcagcaacgcggaggacacgctgcgcagcaaggagcaggccgagctggaggctgcgaggcagcggcagctggcggcggaggaggagcggcggcgccgtgaggctgaggagcgcgtgcagaagagcctggcggccgaggaggaggccgcacggcagcggaaggcggcgctggaggaagtcgagcggctgaaagccaaggtggaggaggcgcggcgcctgcgggagcgagcggagcaggagtcggcgcggcagctgcagctggcccaggaggccgcccagaagcggctgcaggcggaagagaaggcacacgccttcgcggtgcagcagaaggagcaggagctacagcagacgctgcagcaggagcagagcgtgctggaccagctgcgcggcgaggcggaggcggcccggcgggcggctgaggaggcggaggaggcccgggtgcaggcggagcgtgaggcggcgcagtcccggcggcaggtggaagaggccgagcggctgaagcagtcggcagaggagcaggcacaggcccgggctcaggcacaggcggctgcagagaagctgcgcaaggaggccgagcaagaggcggcgcggcgggcacaggcggagcaggcggccctgcggcagaagcaggcagctgacgcggagatggagaagcataagaaattcgccgagcagacgctgcggcagaaggcgcaggtggagcaggagctgacaacactgcggctgcagctggaggagaccgaccaccagaagaacctgctggacgaggagctgcagcggctgaaggcggaggccacggaggccgcacgccagcgcagccaggtggaggaggagctcttctcggtgcgcgtgcagatggaggagctgagcaagctcaaggcacgcatcgaggctgagaaccgcgcactcatcttgcgtgacaaggacaatacgcagcgcttcctgcaggaggaggctgagaagatgaagcaggtggcggaggaggccgcgcggctgagtgtggcggcccaagaggctgcgcgactgcggcagctggcagaggaggacctggcacagcagcgggccttggcagagaagatgctcaaggagaagatgcaggcggtgcaggaggccacgcgactcaaggctgaggcggaactgctgcagcagcagaaggagcttgcgcaggagcaggcgcggcggctgcaggaggacaaggagcagatggcgcagcagctggcggaggagacgcagggcttccagcggacgctggaggccgagcggcagcggcagctggagatgagcgctgaggctgagcgcctcaagctgcgtgtggccgagatgagccgagcccaggcccgcgctgaggaggacgcccagcgcttccggaagcaggcggaggagatcggtgagaagctgcaccgcacggagctcgccacccaggagaaggtgaccctggtgcagacactggagatccagcgacagcagagtgaccatgatgccgagcgcctgcgggaggccatcgctgagctggagcgtgagaaggagaagctccaacaggaggccaaactgctgcagctcaagtctgaggagatgcagacggtgcagcaggagcagctgctgcaggagacgcaggccctgcagcaaagcttcctctctgaaaaggacagcctgctacagcgggagcgcttcatcgagcaggagaaggccaagctggagcagctcttccaggacgaggtggccaaggcacagcagctgcgtgaggagcagcagcggcagcagcagcagatggagcaggaacggcagcggctggtggccagcatggaggaggcgcggcggcggcagcatgaggccgaggagggcgtgcggcgcaagcaggaggagctgcagcagctggagcagcagcggcggcagcaggaggagctgctggctgaggagaaccagaggctgcgtgagcagctgcagctcctggaggagcagcaccgggccgcgctggcgcactcagaggaggtcactgcctcgcaggtggctgccacaaagaccctgcccaatggccgggatgcacttgatggccccgcggcagaggcagagccggagcacagcttcgatggcctgcggcggaaggtgtcagctcagaggctgcaggaggccggcatcctgagtgcggaggagctgcagcggttggcgcagggccacaccacggtggacgagctcgcacggcgggaagacgtgcgccactacctgcagggccgcagcagtatcgcagggctgttgctgaaggccaccaatgagaagctgagtgtttacgccgccctgcagaggcagctgctgagtcccggcacggccctcatcctgctggaggcgcaggcggcctcaggcttcctgctggaccctgtgcggaaccggcggctgaccgtcaacgaggctgtgaaggagggtgtggtgggccccgagctgcaccacaagctgctgtcggccgagcgcgccgtcactggctacaaggacccctacactggccagcagatctctctcttccaagccatgcagaagggcctcatcgtccgggagcacggcatccgcctgctggaggcccagatcgccacgggcggcgttatcgaccccgtgcacagccaccgcgtgcccgtggacgtggcctaccggcgcggctacttcgacgaggagatgaaccgcgtcctggcggaccccagcgacgacaccaagggcttctttgaccccaacacgcacgagaacctcacgtacctgcagctactggagcgctgcgtggaggaccccgagacgggcctgtgccttctgccactcacggataaggctgccaagggcggggagctggtctacactgactccgaggcccgggacgtctttgagaaggccaccgtgtctgcgccgttcggcaagttccagggcaagacggtgaccatttgggagatcatcaactcggaatacttcacggcagagcagcggcgggacctgctgcggcagttccgcacgggccggatcacagtggagaagatcatcaagatcatcatcacggtggtggaggagcaggagcagaagggccggctttgctttgagggcctgcgcagcctggtgccagccgccgagctgctggagagcagggtcatcgaccgcgagctctaccagcagctgcagcgaggtgagcgctctgtgcgagacgtagccgaggtggacactgtgcggcgggctctccggggtgccaacgtcatcgcgggtgtatggctggaggaggcggggcagaagctgagtatctacaatgccctgaagaaagacctgctgccatccgacatggccgtggccctgttggaagcccaggccggcaccgggcacatcatcgaccccgccaccagcgcccggctgaccgtggacgaggcagtgcgtgctggcctggtgggccccgagtttcatgagaagctgctatcagccgagaaggctgtgacagggtacagggacccctacacagggcagagcgtctccctgttccaggccctgaagaagggcctcattccccgggagcagggcctgcgcctgttggacgcccagctgtccacgggcggcatcgtggaccccagcaagagccaccgcgtgcccctggatgtcgcctgcgcccgaggctgcctggatgaggagaccagcagggccctgtcggcaccaagggccgacgccaaggcctacagtgaccccagcacaggggagccggccacctacggcgagctccagcagcggtgccggcccgaccagctgaccgggctgagcctgctgccgctctcagaaaaggctgctcgggcccggcaggaggagctctactcagagctgcaggcccgtgagacctttgaaaagaccccggttgaggtccccgtgggtggcttcaagggcaggacggtgacggtgtgggagctcatcagctctgagtacttcactgcggagcagcggcaggagctgttgcgtcagttccgcacgggcaaggtcaccgtggagaaggtcatcaagattctcattaccatcgtggaggaggtggagaccctgcggcaggagaggctgtccttcagcggcctccgtgcccctgtgccagccagcgagctcctggcttccggggtcctcagcagagcccagtttgagcagctcaaggacggcaagacgacggtcaaggacctttcggagctgggctccgtgcggacgctgctgcagggcagtggctgcctcgccggcatctacctggaggacaccaaggagaaggtgtccatctacgaggccatgcgccggggcctgctgagagccacaacggctgcgctcctgctggaggcgcaggcggccactggcttcctggtggaccccgtgcggaaccagcgcctgtatgtccacgaggccgtgaaggcgggcgtggtgggccccgagcttcacgagcagctgctgtctgccgagaaggccgtcaccggctacagagacccctactcgggcagcaccatctccctcttccaggccatgcagaagggcctggttctccggcagcacggcatccgcctgctggaggcccagatcgccacgggcggcatcatcgaccccgtgcacagccaccgcgtgcctgtggacgtggcctaccagcgcggctacttcagtgaggagatgaaccgcgtcctggcggaccccagcgacgacaccaagggcttctttgaccccaacacgcatgagaacctcacgtacaggcagctgctggagcggtgcgtggaggaccccgagacgggcttgcgccttctgccactgaaaggggcggagaaggctgaggtggtggagaccacgcaggtgtacactgaggaggagacaagaagggcatttgaagagacacagatcgacattcccggcggcggcagccacggcggctccaccatgtccctgtgggaggtgatgcagtcggacctgatccccgaggagcagcgggcccagctgatggctgacttccaggccggccgggtgaccaaggaacgcatgatcatcatcatcatcgagatcattgagaagacagagatcatccgccagcagggtctggcctcctacgactacgtgcgccgccgcctcacggctgaggacctgttcgaggctcggatcatctctctcgagacctacaacctgctccgggagggcaccaggagcctccgtgaggctctcgaggcggagtccgcctggtgctacctctatggcacgggctccgtggctggtgtctacctgcccggttccaggcagacactgagcatctaccaggctctcaagaaagggctgctgagtgccgaggtggcccgcctgctgctggaggcacaggcagccacaggcttcctgctggacccggtgaagggggagcggctgactgtggatgaggctgtgcggaagggcctcgtggggcccgagctgcacgaccgcctgctctcggctgagcgggcggtcaccggctaccgtgacccctacaccgagcagaccatctcgctcttccaggccatgaagaaggagctgatccctactgaggaggccctgcggctgctggatgcccagctggccaccggcggcatcgtggacccccgcctgggcttccaccttcccctggaggtggcttaccagcgtggctacctcaacaaggacacgcacgaccagctgtcagagcccagcgaggtgcgcagctacgtggacccgtccaccgacgagcgcctcagctacacgcagctgctcaggcggtgccgtcgtgacgacggcaccggccagctgctcctgccactgtcggacgcccgcaagctgaccttccgtggcctgcggaagcagatcaccatggaggagctggtgcgctcgcaggtcatggacgaggccacggcgctgcagctgcgggagggcctgacctccatcgaggaggtcaccaagaacttgcagaagttcctggaaggcaccagctgcatcgctggtgtcttcgtggacgccaccaaggaacggctctcggtgtaccaggccatgaagaagggcatcatccgccccggcacagcctttgagctcctggaggcgcaggcggccaccggttacgtcatcgaccccatcaagggactgaagctgacggtggaggaggctgtgcgtatgggcattgtgggccccgagttcaaggacaagctgctgtcggccgagcgcgccgtcactgggtacaaggacccctactctgggaagctcatctccctcttccaggccatgaagaagggcctgatcctgaaggaccatggcatccgcctgctggaggcccagatcgccacgggcggcatcatcgaccctgaggagagccaccggctgcccgtggaggtggcctacaagcgcggcctcttcgatgaggagatgaacgagatcctgaccgacccctcggacgacaccaagggcttctttgaccctaacacggaggagaacctcacctacctgcagctgatggagcgttgtatcactgacccccagacgggcctgtgtctcttgccgctgaaggagaagaagcgggagcggaagacgtcctccaagtcctccgtgcgcaagcgccgagtggtcatcgtggaccccgagacgggcaaggagatgtcagtgtacgaggcctaccgcaagggcctgattgaccaccagacgtacctggagctgtccgagcaggagtgcgagtgggaggagatcaccatctcctcctcggacggcgtggtcaagtccatgatcatcgaccgccgctccgggcgccagtacgacatcgatgatgccatcgccaagaacctcatcgaccgctcggcactggaccagtaccgcgccggcacgctctccatcaccgagttcgccgacatgctctcgggcaacgccggtggtttccgctcccgttcctcctcggtgggatcctcctcctcctaccccatcagccccgccgtctccaggacccagctggcctcctggtcagaccccactgaggagacgggccccgtggctggcatcctggacacggagacgctggagaaggtgtccatcaccgaggccatgcaccggaacctggtggataacatcacggggcagcggctgctggaggcgcaggcctgcaccgggggcatcatcgaccccagcaccggtgagcgcttccctgtcaccgacgccgtcaacaagggcctggtggacaagatcatggtggaccgcatcaacctggcccagaaggccttctgcggcttcgaggacccacgcaccaagaccaagatgtcggccgcccaggccctgaagaagggctggctctactacgaggccggccagcgcttcctggaggtgcagtacctgaccggcggcttgatcgagcccgacacgccgggccgcgtgcccctggacgaggccctgcagcgcggcacggtggacgcccgcaccgcacagaagctgcgtgacgtgggcgcctactccaagtacctcacctgccctaagaccaagctcaagatctcctataaggacgcgctggaccgcagcatggtggaggagggcacggggctgcggctgctggaggctgccgcgcagtccaccaagggctactacagcccctacagcgtcagcggctccggctctaccgctggctcccgcaccggctcgcgcaccggctcccgggccggctcccgccgcggcagctttgacgccaccggctccggcttctccatgaccttctcttcatcctcctactcctcctcgggctacggccgccgctacgcctcggggtcctcggcctccctggggggccctgagtctgccgtggcctgaggctgcctgcgcccaccccgctctgcatgcggcccagcccggctcccaccgaggcgcgggggccgttttcaacgcttaaaggtgtcttcctcccaagtggtgcctaaagtttaaccaaaaagaccagactaatatattaatatatatctgctgtccagacagcctgtatcttgggggacagggctggcccagccctgctggccgcctcaccccctcgggtctcctcactcccttctacctgccactcacacagccaggtgccttggagggtcccaagctgggccccagcccaccctcctgtcttcccagggtagcccgcctgccagtcctagctgcacagggcagctgggcccaaccctgtctgtagagggccctggtgtttctagcactggcctgcacggtgggccttgctggggacggggggccccagtcagcctctctcccagtctacccagagaagccccttccccatgggaagacgaggccctcgggcccagcccccacagtgctgtctgatctgtgctttccagctcaccccccacactcactcctgagacccctggcctccggcgtcagcctccagcctctgttcccctagtaagtgccttccatgtcggcctctaaccccaggccccgaggacccagacccagtggggaggcggacgttccagccggcatggctgggaactgcagacctgtcctcctggtgggtccaggggcccctccagcttgtggagccccacactggggtgccgcctgcccgtctctctcccatggagccccagccccctttgggcccagggacaccagccaggctctgtgctgaccctcctgttgcacccagccctggtctcagcagcgaccacccctgcctccaccctctgagctttgcatgttccactaaccccgggcgggtggcaggtggaggtgtcaggctgctggcgcctctgcaagggcagaacactaacctgaccgtgggcggggccttgcggtatccgcccccaataaaagcaattccaaccttagagtggccgccgggtgctggaggctccgctgcaccccgcgccccgcgcccgccggcatggccggcccgctgcccgacgagcaggacttcatccaggcctacgaggaggtgcgcgagaagtacaaagatgagcgggatcgtgtgcagaagaaaaccttcaccaagtgggtcaacaagcacctcatcaaggcccagaggcacatcagtgacctgtatgaagacctccgcgatggccacaacctcatctccctgctggaggtcctctcgggggacagcctgccccgggagaaggggaggatgcgtttccacaagctgcagaatgtccagattgccctggactacctccggcaccgccaggtgaagctggtgaacatcaggaatgatgacatcgctgacggcaaccccaagctgacccttggcctcatctggacaatcattctgcacttccagatctcagatatccaggtgagtgggcagtcggaggacatgacggccaaggagaagctgctgctgtggtcgcagcgaatggtggaggggtaccagggcctgcgatgcgacaacttcacctccagctggagagacggccgcctcttcaatgccatcatccaccggcacaagcccctgctcatcgacatgaacaaggtgtaccggcagaccaacctggagaacctggaccaggccttctctgtggcggagcgggacctgggagtgacgcggctcctggaccctgaggacgtggatgtccctcagcccgacgagaagtccatcatcacctacgtctcgtcgctgtatgacgccatgccccgcgtgccggacgtgcaggatggggtgagggccaacgagctgcagctgcgctggcaggagtaccgggagctggtgctgctgctgcttcagtggatgcgacaccacacggccgcctttgaggaacgcaggttcccctccagcttcgaggagattgagatcctgtggtctcagttcctgaagtttaaggagatggagctaccagccaaggaggccgacaagaacaggtccaagggcatctaccaatccctggagggagcggtgcaagcaggccagctcaaggtgccccctggctaccacccgctggatgtggagaaggagtggggcaagctgcacgtggccatcctggagcgggagaagcagctccgcagcgagtttgagaggctggagtgtcttcagcgcatcgtgaccaagctgcagatggaggcggggctgtgtgaggagcagctgaaccaggccgacgccctgctgcagtcggatgtccggctgctggctgcaggcaaagtgccacagcgggcgggggaggtggaacgggacttggacaaggcggatagcatgatccggctgctcttcaacgacgtgcagaccctcaaggatggacggcacccgcagggcgagcagatgtaccgcagggtgtaccgtctgcacgagcgcctggtagccatccgcaccgagtacaacctacggctgaaggcaggcgtggcggcccctgcaacccaggtggcccaggtgactctgcagagtgtgcagaggcgccccgagctggaggactccactctgcgctacctgcaggacctgctggcctgggtggaggagaaccagcaccgtgtggatggcgctgagtggggtgtggacctgcccagcgtggaggcgcagctgggcagccaccgaggcctgcaccagtccatcgaagaattccgggccaagatcgagcgggcacggagtgacgagggccagctctcccccgccacccggggtgcctaccgtgactgcctgggtcggctggacctgcagtacgccaagctgctgaactcctccaaggcccgcctcaggtccctggagagcttgcacagctttgtggcagccgccactaaggagctaatgtggctgaatgagaaggaggaggaggaggtgggcttcgactggagcgaccgcaacaccaacatgaccgccaagaaggagagctactcggcgctgatgcgggagctggagctgaaggagaagaagatcaaggagctccaaaatgctggggaccggctgctgcgggaggaccacccggcccggcccacggtggagtccttccaggcggccctgcagacgcagtggagctggatgctacagctgtgctgctgtatcgaggcacacctgaaggagaacgctgcctactttcagttcttctcagatgtgcgggaggccgaggggcagttgcagaagctgcaggaggcactgcgtaggaaatacagttgtgatcgctccgccaccgtcacccggctggaggacctgctgcaggatgcccaggacgagaaggaacagctgaacgagtacaagggccacctctcaggcctggccaagcgggccaaggccgtcgtgcagctgaagccccgccacccagcccaccccatgcggggccgcctgcccctgctggccgtgtgcgactataagcaggtggaggtgactgtgcacaagggtgacgagtgccagctggtgggccctgcacagccgtcccactggaaggtgctcagcagctccggcagcgaggccgccgtgccctccgtgtgcttcctggtgcccccgcccaaccaggaggcccaggaggccgtcaccaggctggagg

SEQ ID NO: 644 - DNA, 32765 bp, Homo sapiens
  misc_feature (212)..(212): second gene starts at position 212
atgttcagctttgtggacctccggctcctgctcctcttagcggccaccgccctcctgacgcacggccaagaggaaggccaagtcgagggccaagacgaagacatcccaccaatcacctgcgtacagaacggcctcaggtaccatgaccgagacgtgtggaaacccgagccctgccggatctgcgtctgcgacaacggcaaggtgttgtgcgatgacgtgatctgtgacgagaccaagaactgccccggcgccgaagtccccgagggcgagtgctgtcccgtctgccccgacggctcagagtcacccaccgaccaagaaaccaccggcgtcgagggacccaagggagacactggcccccgaggcccaaggggacccgcaggcccccctggccgagatggcatccctggacagcctggacttcccggaccccccggaccccccggacctcccggaccccctggcctcggaggaaactttgctccccagctgtcttatggctatgatgagaaatcaaccggaggaatttccgtgcctggccccatgggtccctctggtcctcgtggtctccctggcccccctggtgcacctggtccccaaggcttccaaggtccccctggtgagcctggcgagcctggagcttcaggtcccatgggtccccgaggtcccccaggtccccctggaaagaatggagatgatggggaagctggaaaacctggtcgtcctggtgagcgtgggcctcctgggcctcagggtgctcgaggattgcccggaacagctggcctccctggaatgaagggacacagaggtttcagtggtttggatggtgccaagggagatgctggtcctgctggtcctaagggtgagcctggcagccctggtgaaaatggagctcctggtcagatgggcccccgtggcctgcctggtgagagaggtcgccctggagcccctggccctgctggtgctcgtggaaatgatggtgctactggtgctgccgggccccctggtcccaccggccccgctggtcctcctggcttccctggtgctgttggtgctaagggtgaagctggtccccaagggccccgaggctctgaaggtccccagggtgtgcgtggtgagcctggcccccctggccctgctggtgctgctggccctgctggaaaccctggtgctgatggacagcctggtgctaaaggtgccaatggtgctcctggtattgctggtgctcctggcttccctggtgcccgaggcccctctggaccccagggccccggcggccctcctggtcccaagggtaacagcggtgaacctggtgctcctggcagcaaaggagacactggtgctaagggagagcctggccctgttggtgttcaaggaccccctggccctgctggagaggaaggaaagcgaggagctcgaggtgaacccggacccactggcctgcccggaccccctggcgagcgtggtggacctggtagccgtggtttccctggcgcagatggtgttgctggtcccaagggtcccgctggtgaacgtggttctcctggccctgctggccccaaaggatctcctggtgaagctggtcgtcccggtgaagctggtctgcctggtgccaagggtctgactggaagccctggcagccctggtcctgatggcaaaactggcccccctggtcccgccggtcaagatggtcgccccggacccccaggcccacctggtgcccgtggtcaggctggtgtgatgggattccctggacctaaaggtgctgctggagagcccggcaaggctggagagcgaggtgttcccggaccccctggcgctgtcggtcctgctggcaaagatggagaggctggagctcagggaccccctggccctgctggtcccgctggcgagagaggtgaacaaggccctgctggctcccccggattccagggtctccctggtcctgctggtcctccaggtgaagcaggcaaacctggtgaacagggtgttcctggagaccttggcgcccctggcccctctggagcaagaggcgagagaggtttccctggcgagcgtggtgtgcaaggtccccctggtcctgctggtccccgaggggccaacggtgctcccggcaacgatggtgctaagggtgatgctggtgcccctggagctcccggtagccagggcgcccctggccttcagggaatgcctggtgaacgtggtgcagctggtcttccagggcctaagggtgacagaggtgatgctggtcccaaaggtgctgatggctctcctggcaaagatggcgtccgtggtctgactggccccattggtcctcctggccctgctggtgcccctggtgacaagggtgaaagtggtcccagcggccctgctggtcccactggagctcgtggtgcccccggagaccgtggtgagcctggtccccccggccctgctggctttgctggcccccctggtgctgacggccaacctggtgctaaaggcgaacctggtgatgctggtgctaaaggcgatgctggtccccctggccctgccggacccgctggaccccctggccccattggtaatgttggtgctcctggagccaaaggtgctcgcggcagcgctggtccccctggtgctactggtttccctggtgctgctggccgagtcggtcctcctggcccctctggaaatgctggaccccctggccctcctggtcctgctggcaaagaaggcggcaaaggtccccgtggtgagactggccctgctggacgtcctggtgaagttggtccccctggtccccctggccctgctggcgagaaaggatcccctggtgctgatggtcctgctggtgctcctggtactcccgggcctcaaggtattgctggacagcgtggtgtggtcggcctgcctggtcagagaggagagagaggcttccctggtcttcctggcccctctggtgaacctggcaaacaaggtccctctggagcaagtggtgaacgtggtccccctggtcccatgggcccccctggattggctggaccccctggtgaatctggacgtgagggggctcctggtgccgaaggttcccctggacgagacggttctcctggcgccaagggtgaccgtggtgagaccggccccgctggaccccctggtgctcctggtgctcctggtgcccctggccccgttggccctgctggcaagagtggtgatcgtggtgagactggtccgtgtgcgactataagcaggtggaggtgactgtgcacaagggtgacgagtgccagctggtgggccctgcacagccgtcccactggaaggtgctcagcagctccggcagcgaggccgccgtgccctccgtgtgcttcctggtgcccccgcccaaccaggaggcccaggaggccgtcaccaggctggaggcccagcaccaggccctggtcacgctgtggcaccagttgcacgtggacatgaagagccttctggcctggcagagccttcgccgcgacgtgcagctcatccgctcctggtccctggccacgttccgcaccctgaagccagaggagcagcgccaagccctgcacagcctggagctgcactaccaggccttcctgcgggacagccaggacgcgggcggcttcggacccgaggaccggctgatggctgagcgcgagtacggctcctgcagccaccactaccagcagctgctgcagagcctggaacagggtgcacaggaagagtctcgctgccagcgctgcatctccgagctcaaagacatccggctgcagctggaggcctgtgagacgcgcaccgtgcaccgcctgcggctgccgctggacaaagagccggcacgggagtgtgcccagcgcatcgccgagcagcagaaggcacaggcagaggtggaggggctgggcaagggggtcgcccggctctctgccgaggccgagaaggtcttggccctaccagagccatcgcctgcggcccccacgctgcgctcggagctggagctgacgctgggcaagctggagcaggtccgcagcctgtctgccatctacctggagaagctcaagaccatcagcctggtgatccgcggcacgcagggggccgaggaggtgctcagggcccacgaggagcagctcaaggaggcccaggccgtgccggccaccctcccggagctcgaggccaccaaggcctctctgaagaagctgcgggcccaggccgaggcacagcagcccacgttcgacgccctgcgggatgagctgcggggggcacaggaggtgggggagcgactgcagcagcggcacggggagcgggacgtggaggtggagcgctggcgggagcgggtcgcccagttgcttgagcgctggcaggctgtgctggcccagaccgacgtgcggcagcgcgagctcgagcaactgggccgccagctgcgttactaccgcgagagtgcagaccccttgggcgcctggctgcaggacgccaggcggcggcaggagcagatccaggccatgccgctggccgacagccaggctgtgcgggagcagctgcggcaggagcaggccctgctggaggagatcgagcgccacggcgagaaggtcgaggagtgccagaggtttgcgaaacagtacatcaacgccatcaaggactatgaactccagctggtgacgtacaaggcgcagcttgagccggtggcctccccggccaagaagcccaaggtccagtcgggatcagagagtgtcatccaggagtacgtggacctgcgtacgcactacagcgagctgaccacactgacgagccagtacatcaagttcatcagcgagactctgcggcgcatggaggaggaggagaggctggctgagcagcagcgggcagaggagcgcgagcggctggccgaggtggaggccgcgctggagaagcagcggcagctggccgaggcgcacgcccaggcaaaggcacaggcggagcgggaggcgaaggagctgcagcagcgcatgcaggaggaggtggtgcggcgggaggaggcggcggtggacgcgcagcagcagaagcgcagcattcaggaggagctgcagcagctgcggcagagctcggaggcggagatccaggccaaggcccggcaggcagaggcggctgagcgcagccggctgcgcatcgaggaggagatccgcgtggtgcgcctgcagttggaggccaccgagcgccagcgtggcggggctgagggggagctgcaggcactgcgtgcacgggcggaggaggctgaggcacaaaagcgacaggcgcaggaggaggccgagcgcttgcggaggcaggtgcaggacgagagccagcgtaagcggcaggcggaggtggagctggcctcgcgcgtgaaggccgaggccgaggcggcgcgcgagaagcagcgggccctgcaggccctggaggagctgcggctgcaggcggaggaggcggagcggcgcctgcggcaggccgaggtggagcgagcgcggcaggtacaggtggccctggagacggcgcagcgcagtgcagaggcggagctgcagagcaaacgcgcctccttcgccgagaagacggcacagctggagcgctccctgcaggaggaacacgtggctgtggcacagctgcgggaggaggctgagcggcgggcacagcagcaggccgaggccgagcgggcgcgcgaggaggcagagcgggagctggagcgctggcagctcaaggccaacgaggcgctacggctgcggctgcaggcggaggaggtggcgcagcagaagagcctggcgcaggccgaggctgagaagcagaaggaggaggcggagcgcgaggcgcggcggcgcggcaaggcggaggagcaggccgtccggcagcgggagctggctgaacaagagctggagaagcagcggcagctggcggaaggcaccgcgcagcagcgcctggccgcggagcaggagttgatccggctgcgggccgagacggagcagggggagcagcagcggcagctgctggaggaggagctggcccggctgcagcgtgaggcggctgcagccacgcagaaacggcaggagctggaagccgagctggccaaggtgcgggccgagatggaggtgctgctggccagcaaggcgagggctgaggaggagtcgcgctccaccagcgagaagtccaagcagaggctggaggccgaggccggccggttccgcgagctggccgaggaggccgcccgcctgcgtgccctggcggaagaggccaagcggcagcggcagctggccgaggaagacgcggcgcggcagcgggccgaggcggagcgggtgcttgcggagaagctggccgccatcggcgaggccacgcggctcaagacggaggcggagatcgcgctcaaggagaaggaggcggagaacgagcgcctgcggcggctggcggaggacgaggccttccagcggcggcggctggaggagcaggccgcgcaacacaaggctgacatcgaggagcgcctggcccagctgcgcaaggcatcggacagcgagctggagcggcagaaggggctggtggaggacacgctgaggcagcggcggcaggtggaggaggagatcctggcgctgaaggcgagcttcgagaaggcggccgctggcaaggcggagctggagctggagctgggacgcatccgcagcaacgcggaggacacgctgcgcagcaaggagcaggccgagctggaggctgcgaggcagcggcagctggcggcggaggaggagcggcggcgccgtgaggctgaggagcgcgtgcagaagagcctggcggccgaggaggaggccgcacggcagcggaaggcggcgctggaggaagtcgagcggctgaaagccaaggtggaggaggcgcggcgcctgcgggagcgagcggagcaggagtcggcgcggcagctgcagctggcccaggaggccgcccagaagcggctgcaggcggaagagaaggcacacgccttcgcggtgcagcagaaggagcaggagctacagcagacgctgcagcaggagcagagcgtgctggaccagctgcgcggcgaggcggaggcggcccggcgggcggctgaggaggcggaggaggcccgggtgcaggcggagcgtgaggcggcgcagtcccggcggcaggtggaagaggccgagcggctgaagcagtcggcagaggagcaggcacaggcccgggctcaggcacaggcggctgcagagaagctgcgcaaggaggccgagcaagaggcggcgcggcgggcacaggcggagcaggcggccctgcggcagaagcaggcagctgacgcggagatggagaagcataagaaattcgccgagcagacgctgcggcagaaggcgcaggtggagcaggagctgacaacactgcggctgcagctggaggagaccgaccaccagaagaacctgctggacgaggagctgcagcggctgaaggcggaggccacggaggccgcacgccagcgcagccaggtggaggaggagctcttctcggtgcgcgtgcagatggaggagctgagcaagctcaaggcacgcatcgaggctgagaaccgcgcactcatcttgcgtgacaaggacaatacgcagcgcttcctgcaggaggaggctgagaagatgaagcaggtggcggaggaggccgcgcggctgagtgtggcggcccaagaggctgcgcgactgcggcagctggcagaggaggacctggcacagcagcgggccttggcagagaagatgctcaaggagaagatgcaggcggtgcaggaggccacgcgactcaaggctgaggcggaactgctgcagcagcagaaggagcttgcgcaggagcaggcgcggcggctgcaggaggacaaggagcagatggcgcagcagctggcggaggagacgcagggcttccagcggacgctggaggccgagcggcagcggcagctggagatgagcgctgaggctgagcgcctcaagctgcgtgtggccgagatgagccgagcccaggcccgcgctgaggaggacgcccagcgcttccggaagcaggcggaggagatcggtgagaagctgcaccgcacggagctcgccacccaggagaaggtgaccctggtgcagacactggagatccagcgacagcagagtgaccatgatgccgagcgcctgcgggaggccatcgctgagctggagcgtgagaaggagaagctccaacaggaggccaaactgctgcagctcaagtctgaggagatgcagacggtgcagcaggagcagctgctgcaggagacgcaggccctgcagcaaagcttcctctctgaaaaggacagcctgctacagcgggagcgcttcatcgagcaggagaaggccaagctggagcagctcttccaggacgaggtggccaaggcacagcagctgcgtgaggagcagcagcggcagcagcagcagatggagcaggaacggcagcggctggtggccagcatggaggaggcgcggcggcggcagcatgaggccgaggagggcgtgcggcgcaagcaggaggagctgcagcagctggagcagcagcggcggcagcaggaggagctgctggctgaggagaaccagaggctgcgtgagcagctgcagctcctggaggagcagcaccgggccgcgctggcgcactcagaggaggtcactgcctcgcaggtggctgccacaaagaccctgcccaatggccgggatgcacttgatggccccgcggcagaggcagagccggagcacagcttcgatggcctgcggcggaaggtgtcagctcagaggctgcaggaggccggcatcctgagtgcggaggagctgcagcggttggcgcagggccacaccacggtggacgagctcgcacggcgggaagacgtgcgccactacctgcagggccgcagcagtatcgcagggctgttgctgaaggccaccaatgagaagctgagtgtttacgccgccctgcagaggcagctgctgagtcccggcacggccctcatcctgctggaggcgcaggcggcctcaggcttcctgctggaccctgtgcggaaccggcggctgaccgtcaacgaggctgtgaaggagggtgtggtgggccccgagctgcaccacaagctgctgtcggccgagcgcgccgtcactggctacaaggacccctacactggccagcagatctctctcttccaagccatgcagaagggcctcatcgtccgggagcacggcatccgcctgctggaggcccagatcgccacgggcggcgttatcgaccccgtgcacagccaccgcgtgcccgtggacgtggcctaccggcgcggctacttcgacgaggagatgaaccgcgtcctggcggaccccagcgacgacaccaagggcttctttgaccccaacacgcacgagaacctcacgtacctgcagctactggagcgctgcgtggaggaccccgagacgggcctgtgccttctgccactcacggataaggctgccaagggcggggagctggtctacactgactccgaggcccgggacgtctttgagaaggccaccgtgtctgcgccgttcggcaagttccagggcaagacggtgaccatttgggagatcatcaactcggaatacttcacggcagagcagcggcgggacctgctgcggcagttccgcacgggccggatcacagtggagaagatcatcaagatcatcatcacggtggtggaggagcaggagcagaagggccggctttgctttgagggcctgcgcagcctggtgccagccgccgagctgctggagagcagggtcatcgaccgcgagctctaccagcagctgcagcgaggtgagcgctctgtgcgagacgtagccgaggtggacactgtgcggcgggctctccggggtgccaacgtcatcgcgggtgtatggctggaggaggcggggcagaagctgagtatctacaatgccctgaagaaagacctgctgccatccgacatggccgtggccctgttggaagcccaggccggcaccgggcacatcatcgaccccgccaccagcgcccggctgaccgtggacgaggcagtgcgtgctggcctggtgggccccgagtttcatgagaagctgctatcagccgagaaggctgtgacagggtacagggacccctacacagggcagagcgtctccctgttccaggccctgaagaagggcctcattccccgggagcagggcctgcgcctgttggacgcccagctgtccacgggcggcatcgtggaccccagcaagagccaccgcgtgcccctggatgtcgcctgcgcccgaggctgcctggatgaggagaccagcagggccctgtcggcaccaagggccgacgccaaggcctacagtgaccccagcacaggggagccggccacctacggcgagctccagcagcggtgccggcccgaccagctgaccgggctgagcctgctgccgctctcagaaaaggctgctcgggcccggcaggaggagctctactcagagctgcaggcccgtgagacctttgaaaagaccccggttgaggtccccgtgggtggcttcaagggcaggacggtgacggtgtgggagctcatcagctctgagtacttcactgcggagcagcggcaggagctgttgcgtcagttccgcacgggcaaggtcaccgtggagaaggtcatcaagattctcattaccatcgtggaggaggtggagaccctgcggcaggagaggctgtccttcagcggcctccgtgcccctgtgccagccagcgagctcctggcttccggggtcctcagcagagcccagtttgagcagctcaaggacggcaagacgacggtcaaggacctttcggagctgggctccgtgcggacgctgctgcagggcagtggctgcctcgccggcatctacctggaggacaccaaggagaaggtgtccatctacgaggccatgcgccggggcctgctgagagccacaacggctgcgctcctgctggaggcgcaggcggccactggcttcctggtggaccccgtgcggaaccagcgcctgtatgtccacgaggccgtgaaggcgggcgtggtgggccccgagcttcacgagcagctgctgtctgccgagaaggccgtcaccggctacagagacccctactcgggcagcaccatctccctcttccaggccatgcagaagggcctggttctccggcagcacggcatccgcctgctggaggcccagatcgccacgggcggcatcatcgaccccgtgcacagccaccgcgtgcctgtggacgtggcctaccagcgcggctacttcagtgaggagatgaaccgcgtcctggcggaccccagcgacgacaccaagggcttctttgaccccaacacgcatgagaacctcacgtacaggcagctgctggagcggtgcgtggaggaccccgagacgggcttgcgccttctgccactgaaaggggcggagaaggctgaggtggtggagaccacgcaggtgtacactgaggaggagacaagaagggcatttgaagagacacagatcgacattcccggcggcggcagccacggcggctccaccatgtccctgtgggaggtgatgcagtcggacctgatccccgaggagcagcgggcccagctgatggctgacttccaggccggccgggtgaccaaggaacgcatgatcatcatcatcatcgagatcattgagaagacagagatcatccgccagcagggtctggcctcctacgactacgtgcgccgccgcctcacggctgaggacctgttcgaggctcggatcatctctctcgagacctacaacctgctccgggagggcaccaggagcctccgtgaggctctcgaggcggagtccgcctggtgctacctctatggcacgggctccgtggctggtgtctacctgcccggttccaggcagacactgagcatctaccaggctctcaagaaagggctgctgagtgccgaggtggcccgcctgctgctggaggcacaggcagccacaggcttcctgctggacccggtgaagggggagcggctgactgtggatgaggctgtgcggaagggcctcgtggggcccgagctgcacgaccgcctgctctcggctgagcgggcggtcaccggctaccgtgacccctacaccgagcagaccatctcgctcttccaggccatgaagaaggagctgatccctactgaggaggccctgcggctgctggatgcccagctggccaccggcggcatcgtggacccccgcctgggcttccaccttcccctggaggtggcttaccagcgtggctacctcaacaaggacacgcacgaccagctgtcagagcccagcgaggtgcgcagctacgtggacccgtccaccgacgagcgcctcagctacacgcagctgctcaggcggtgccgtcgtgacgacggcaccggccagctgctcctgccactgtcggacgcccgcaagctgaccttccgtggcctgcggaagcagatcaccatggaggagctggtgcgctcgcaggtcatggacgaggccacggcgctgcagctgcgggagggcctgacctccatcgaggaggtcaccaagaacttgcagaagttcctggaaggcaccagctgcatcgctggtgtcttcgtggacgccaccaaggaacggctctcggtgtaccaggccatgaagaagggcatcatccgccccggcacagcctttgagctcctggaggcgcaggcggccaccggttacgtcatcgaccccatcaagggactgaagctgacggtggaggaggctgtgcgtatgggcattgtgggccccgagttcaaggacaagctgctgtcggccgagcgcgccgtcactgggtacaaggacccctactctgggaagctcatctccctcttccaggccatgaagaagggcctgatcctgaaggaccatggcatccgcctgctggaggcccagatcgccacgggcggcatcatcgaccctgaggagagccaccggctgcccgtggaggtggcctacaagcgcggcctcttcgatgaggagatgaacgagatcctgaccgacccctcggacgacaccaagggcttctttgaccctaacacggaggagaacctcacctacctgcagctgatggagcgttgtatcactgacccccagacgggcctgtgtctcttgccgctgaaggagaagaagcgggagcggaagacgtcctccaagtcctccgtgcgcaagcgccgagtggtcatcgtggaccccgagacgggcaaggagatgtcagtgtacgaggcctaccgcaagggcctgattgaccaccagacgtacctggagctgtccgagcaggagtgcgagtgggaggagatcaccatctcctcctcggacggcgtggtcaagtccatgatcatcgaccgccgctccgggcgccagtacgacatcgatgatgccatcgccaagaacctcatcgaccgctcggcactggaccagtaccgcgccggcacgctctccatcaccgagttcgccgacatgctctcgggcaacgccggtggtttccgctcccgttcctcctcggtgggatcctcctcctcctaccccatcagccccgccgtctccaggacccagctggcctcctggtcagaccccactgaggagacgggccccgtggctggcatcctggacacggagacgctggagaaggtgtccatcaccgaggccatgcaccggaacctggtggataacatcacggggcagcggctgctggaggcgcaggcctgcaccgggggcatcatcgaccccagcaccggtgagcgcttccctgtcaccgacgccgtcaacaagggcctggtggacaagatcatggtggaccgcatcaacctggcccagaaggccttctgcggcttcgaggacccacgcaccaagaccaagatgtcggccgcccaggccctgaagaagggctggctctactacgaggccggccagcgcttcctggaggtgcagtacctgaccggcggcttgatcgagcccgacacgccgggccgcgtgcccctggacgaggccctgcagcgcggcacggtggacgcccgcaccgcacagaagctgcgtgacgtgggcgcctactccaagtacctcacctgccctaagaccaagctcaagatctcctataaggacgcgctggaccgcagcatggtggaggagggcacggggctgcggctgctggaggctgccgcgcagtccaccaagggctactacagcccctacagcgtcagcggctccggctctaccgctggctcccgcaccggctcgcgcaccggctcccgggccggctcccgccgcggcagctttgacgccaccggctccggcttctccatgaccttctcttcatcctcctactcctcctcgggctacggccgccgctacgcctcggggtcctcggcctccctggggggccctgagtctgccgtggcctgaggctgcctgcgcccaccccgctctgcatgcggcccagcccggctcccaccgaggcgcgggggccgttttcaacgcttaaaggtgtcttcctcccaagtggtgcctaaagtttaaccaaaaagaccagactaatatattaatatatatctgctgtccagacagcctgtatcttgggggacagggctggcccagccctgctggccgcctcaccccctcgggtctcctcactcccttctacctgccactcacacagccaggtgccttggagggtcccaagctgggccccagcccaccctcctgtcttcccagggtagcccgcctgccagtcctagctgcacagggcagctgggcccaaccctgtctgtagagggccctggtgtttctagcactggcctgcacggtgggccttgctggggacggggggccccagtcagcctctctcccagtctacccagagaagccccttccccatgggaagacgaggccctcgggcccagcccccacagtgctgtctgatctgtgctttccagctcaccccccacactcactcctgagacccctggcctccggcgtcagcctccagcctctgttcccctagtaagtgccttccatgtcggcctctaaccccaggccccgaggacccagacccagtggggaggcggacgttccagccggcatggctgggaactgcagacctgtcctcctggtgggtccaggggcccctccagcttgtggagccccacactggggtgccgcctgcccgtctctctcccatggagccccagccccctttgggcccagggacaccagccaggctctgtgctgaccctcctgttgcacccagccctggtctcagcagcgaccacccctgcctccaccctctgagctttgcatgttccactaaccccgggcgggtggcaggtggaggtgtcaggctgctggcgcctctgcaagggcagaacactaacctgaccgtgggcggggccttgcggtatccgcccccaataaaagcaattccaaccttattgatcagctgaagccccgcccctggccggcaagccctgccccggacctccgggctcctcccccggctgcggcgctggcctgggcagtgcggtgcggggctggactctgcctggtggtggcacagccgccctcagccccggcgcagacatggacccctcgcgagccatccagaacgagatcagctccctcaaagatgagcgggatcgtgtgcagaagaaaaccttcaccaagtgggtcaacaagcacctcatcaaggcccagaggcacatcagtgacctgtatgaagacctccgcgatggccacaacctcatctccctgctggaggtcctctcgggggacagcctgccccgggagaaggggaggatgcgtttccacaagctgcagaatgtccagattgccctggactacctccggcaccgccaggtgaagctggtgaacatcaggaatgatgacatcgctgacggcaaccccaagctgacccttggcctcatctggacaatcattctgcacttccagatctcagatatccaggtgagtgggcagtcggaggacatgacggccaaggagaagctgctgctgtggtcgcagcgaatggtggaggggtaccagggcctgcgatgcgacaacttcacctccagctggagagacggccgcctcttcaatgccatcatccaccggcacaagcccctgctcatcgacatgaacaaggtgtaccggcagaccaacctggagaacctggaccaggccttctctgtggcggagcgggacctgggagtgacgcggctcctggaccctgaggacgtggatgtccctcagcccgacgagaagtccatcatcacctacgtctcgtcgctgtatgacgccatgccccgcgtgccggacgtgcaggatggggtgagggccaacgagctgcagctgcgctggcaggagtaccgggagctggtgctgctgctgcttcagtggatgcgacaccacacggccgcctttgaggaacgcaggttcccctccagcttcgaggagattgagatcctgtggtctcagttcctgaagtttaaggagatggagctaccagccaaggaggccgacaagaacaggtccaagggcatctaccaatccctggagggagcggtgcaagcaggccagctcaaggtgccccctggctaccacccgctggatgtggagaaggagtggggcaagctgcacgtggccatcctggagcgggagaagcagctccgcagcgagtttgagaggctggagtgtcttcagcgcatcgtgaccaagctgcagatggaggcggggctgtgtgaggagcagctgaaccaggccgacgccctgctgcagtcggatgtccggctgctggctgcaggcaaagtgccacagcgggcgggggaggtggaacgggacttggacaaggcggatagcatgatccggctgctcttcaacgacgtgcagaccctcaaggatggacggcacccgcagggcgagcagatgtaccgcagggtgtaccgtctgcacgagcgcctggtagccatccgcaccgagtacaacctacggctgaaggcaggcgtggcggcccctgcaacccaggtggcccaggtgactctgcagagtgtgcagaggcgccccgagctggaggactccactctgcgctacctgcaggacctgctggcctgggtggaggagaaccagcaccgtgtggatggcgctgagtggggtgtggacctgcccagcgtggaggcgcagctgggcagccaccgaggcctgcaccagtccatcgaagaattccgggccaagatcgagcgggcacggagtgacgagggccagctctcccccgccacccggggtgcctaccgtgactgcctgggtcggctggacctgcagtacgccaagctgctgaactcctccaaggcccgcctcaggtccctggagagcttgcacagctttgtggcagccgccactaaggagctaatgtggctgaatgagaaggaggaggaggaggtgggcttcgactggagcgaccgcaacaccaacatgaccgccaagaaggagagctactcggcgctgatgcgggagctggagctgaaggagaagaagatcaaggagctccaaaatgctggggaccggctgctgcgggaggaccacccggcccggcccacggtggagtccttccaggcggccctgcagacgcagtggagctggatgctacagctgtgctgctgtatcgaggcacacctgaaggagaacgctgcctactttcagttcttctcagatgtgcgggaggccgaggggcagttgcagaagctgcaggaggcactgcgtaggaaatacagttgtgatcgctccgccaccgtcacccggctggaggacctgctgcaggatgcccaggacgagaaggaacagctgaacgagtacaagggccacctctcaggcctggccaagcgggccaaggccgtcgtgcagctgaagccccgccacccagcccaccccatgcggggccgcctgcccctgctggccgtgtgcgactataagcaggtggaggtgactgtgcacaagggtgacgagtgccagctggtgggccctgcacagccgtcccactggaaggtgctcagcagctccggcagcgaggccgccgtgccctccgtgtgcttcctggtgcccccgcccaaccaggaggcccaggaggccgtcaccaggctggaggcccagcaccaggccctggtcacgctgtggcaccagttgcacgtggacatgaagagccttctggcctggcagagccttcgccgcgacgtgcagctcatccgctcctggtccctggccacgttccgcaccctgaagccagaggagcagcgccaagccctgcacagcctggagctgcactaccaggccttcctgcgggacagccaggacgcgggcggcttcggacccgaggaccggctgatggctgagcgcgagtacggctcctgcagccaccactaccagcagctgctgcagagcctggaacagggtgcacaggaagagtctcgctgccagcgctgcatctccgagctcaaagacatccggctgcagctggaggcctgtgagacgcgcaccgtgcaccgcctgcggctgccgctggacaaagagccggcacgggagtgtgcccagcgcatcgccgagcagcagaaggcacaggcagaggtggaggggctgggcaagggggtcgcccggctctctgccgaggccgagaaggtcttggccctaccagagccatcgcctgcggcccccacgctgcgctcggagctggagctgacgctgggcaagctggagcaggtccgcagcctgtctgccatctacctggagaagctcaagaccatcagcctggtgatccgcggcacgcagggggccgaggaggtgctcagggcccacgaggagcagctcaaggaggcccaggccgtgccggccaccctcccggagctcgaggccaccaaggcctctctgaagaagctgcgggcccaggccgaggcacagcagcccacgttcgacgccctgcgggatgagctgcggggggcacaggaggtgggggagcgactgcagcagcggcacggggagcgggacgtggaggtggagcgctggcgggagcgggtcgcccagttgcttgagcgctggcaggctgtgctggcccagaccgacgtgcggcagcgcgagctcgagcaactgggccgccagctgcgttactaccgcgagagtgcagaccccttgggcgcctggctgcaggacgccaggcggcggcaggagcagatccaggccatgccgctggccgacagccaggctgtgcgggagcagctgcggcaggagcaggccctgctggaggagatcgagcgccacggcgagaaggtcgaggagtgccagaggtttgcgaaacagtacatcaacgccatcaaggactatgaactccagctggtgacgtacaaggcgcagcttgagccggtggcctccccggccaagaagcccaaggtccagtcgggatcagagagtgtcatccaggagtacgtggacctgcgtacgcactacagcgagctgaccacactgacgagccagtacatcaagttcatcagcgagactctgcggcgcatggaggaggaggagaggctggctgagcagcagcgggcagaggagcgcgagcggctggccgaggtggaggccgcgctggagaagcagcggcagctggccgaggcgcacgcccaggcaaaggcacaggcggagcgggaggcgaaggagctgcagcagcgcatgcaggaggaggtggtgcggcgggaggaggcggcggtggacgcgcagcagcagaagcgcagcattcaggaggagctgcagcagctgcggcagagctcggaggcggagatccaggccaaggcccggcaggcagaggcggctgagcgcagccggctgcgcatcgaggaggagatccgcgtggtgcgcctgcagttggaggccaccgagcgccagcgtggcggggctgagggggagctgcaggcactgcgtgcacgggcggaggaggctgaggcacaaaagcgacaggcgcaggaggaggccgagcgcttgcggaggcaggtgcaggacgagagccagcgtaagcggcaggcggaggtggagctggcctcgcgcgtgaaggccgaggccgaggcggcgcgcgagaagcagcgggccctgcaggccctggaggagctgcggctgcaggcggaggaggcggagcggcgcctgcggcaggccgaggtggagcgagcgcggcaggtacaggtggccctggagacggcgcagcgcagtgcagaggcggagctgcagagcaaacgcgcctccttcgccgagaagacggcacagctggagcgctccctgcaggaggaacacgtggctgtggcacagctgcgggaggaggctgagcggcgggcacagcagcaggccgaggccgagcgggcgcgcgaggaggcagagcgggagctggagcgctggcagctcaaggccaacgaggcgctacggctgcggctgcaggcggaggaggtggcgcagcagaagagcctggcgcaggccgaggctgagaagcagaaggaggaggcggagcgcgaggcgcggcggcgcggcaaggcggaggagcaggccgtccggcagcgggagctggctgaacaagagctggagaagcagcggcagctggcggaaggcaccgcgcagcagcgcctggccgcggagcaggagttgatccggctgcgggccgagacggagcagggggagcagcagcggcagctgctggaggaggagctggcccggctgcagcgtgaggcggctgcagccacgcagaaacggcaggagctggaagccgagctggccaaggtgcgggccgagatggaggtgctgctggccagcaaggcgagggctgaggaggagtcgcgctccaccagcgagaagtccaagcagaggctggaggccgaggccggccggttccgcgagctggccgaggaggccgcccgcctgcgtgccctggcggaagaggccaagcggcagcggcagctggccgaggaagacgcggcgcggcagcgggccgaggcggagcgggtgcttgcggagaagctggccgccatcggcgaggccacgcggctcaagacggaggcggagatcgcgctcaaggagaaggaggcggagaacgagcgcctgcggcggctggcggaggacgaggccttccagcggcggcggctggaggagcaggccgcgcaacacaaggctgacatcgaggagcgcctggcccagctgcgcaaggcatcggacagcgagctggagcggcagaaggggctggtggaggacacgctgaggcagcggcggcaggtggaggaggagatcctggcgctgaaggcgagcttcgagaaggcggccgctggcaaggcggagctggagctggagctgggacgcatccgcagcaacgcggaggacacgctgcgcagcaaggagcaggccgagctggaggctgcgaggcagcggcagctggcggcggaggaggagcggcggcgccgtgaggctgaggagcgcgtgcagaagagcctggcggccgaggaggaggccgcacggcagcggaaggcggcgctggaggaagtcgagcggctgaaagccaaggtggaggaggcgcggcgcctgcgggagcgagcggagcaggagtcggcgcggcagctgcagctggcccaggaggccgcccagaagcggctgcaggcggaagagaaggcacacgccttcgcggtgcagcagaaggagcaggagctacagcagacgctgcagcaggagcagagcgtgctggaccagctgcgcggcgaggcggaggcggcccggcgggcggctgaggaggcggaggaggcccgggtgcaggcggagcgtgaggcggcgcagtcccggcggcaggtggaagaggccgagcggctgaagcagtcggcagaggagcaggcacaggcccgggctcaggcacaggcggctgcagagaagctgcgcaaggaggccgagcaagaggcggcgcggcgggcacaggcggagcaggcggccctgcggcagaagcaggcagctgacgcggagatggagaagcataagaaattcgccgagcagacgctgcggcagaaggcgcaggtggagcaggagctgacaacactgcggctgcagctggaggagaccgaccaccagaagaacctgctggacgaggagctgcagcggctgaaggcggaggccacggaggccgcacgccagcgcagccaggtggaggaggagctcttctcggtgcgcgtgcagatggaggagctgagcaagctcaaggcacgcatcgaggctgagaaccgcgcactcatcttgcgtgacaaggacaatacgcagcgcttcctgcaggaggaggctgagaagatgaagcaggtggcggaggaggccgcgcggctgagtgtggcggcccaagaggctgcgcgactgcggcagctggcagaggaggacctggcacagcagcgggccttggcagagaagatgctcaaggagaagatgcaggcggtgcaggaggccacgcgactcaaggctgaggcggaactgctgcagcagcagaaggagcttgcgcaggagcaggcgcggcggctgcaggaggacaaggagcagatggcgcagcagctggcggaggagacgcagggcttccagcggacgctggaggccgagcggcagcggcagctggagatgagcgctgaggctgagcgcctcaagctgcgtgtggccgagatgagccgagcccaggcccgcgctgaggaggacgcccagcgcttccggaagcaggcggaggagatcggtgagaagctgcaccgcacggagctcgccacccaggagaaggtgaccctggtgcagacactggagatccagcgacagcagagtgaccatgatgccgagcgcctgcgggaggccatcgctgagctggagcgtgagaaggagaagctccaacaggaggccaaactgctgcagctcaagtctgaggagatgcagacggtgcagcaggagcagctgctgcaggagacgcaggccctgcagcaaagcttcctctctgaaaaggacagcctgctacagcgggagcgcttcatcgagcaggagaaggccaagctggagcagctcttccaggacgaggtggccaaggcacagcagctgcgtgaggagcagcagcggcagcagcagcagatggagcaggaacggcagcggctggtggccagcatggaggaggcgcggcggcggcagcatgaggccgaggagggcgtgcggcgcaagcaggaggagctgcagcagctggagcagcagcggcggcagcaggaggagctgctggctgaggagaaccagaggctgcgtgagcagctgcagctcctggaggagcagcaccgggccgcgctggcgcactcagaggaggtcactgcctcgcaggtggctgccacaaagaccctgcccaatggccgggatgcacttgatggccccgcggcagaggcagagccggagcacagcttcgatggcctgcggcggaaggtgtcagctcagaggctgcaggaggccggcatcctgagtgcggaggagctgcagcggttggcgcagggccacaccacggtggacgagctcgcacggcgggaagacgtgcgccactacctgcagggccgcagcagtatcgcagggctgttgctgaaggccaccaatgagaagctgagtgtttacgccgccctgcagaggcagctgctgagtcccggcacggccctcatcctgctggaggcgcaggcggcctcaggcttcctgctggaccctgtgcggaaccggcggctgaccgtcaacgaggctgtgaaggagggtgtggtgggccccgagctgcaccacaagctgctgtcggccgagcgcgccgtcactggctacaaggacccctacactggccagcagatctctctcttccaagccatgcagaagggcctcatcgtccgggagcacggcatccgcctgctggaggcccagatcgccacgggcggcgttatcgaccccgtgcacagccaccgcgtgcccgtggacgtggcctaccggcgcggctacttcgacgaggagatgaaccgcgtcctggcggaccccagcgacgacaccaagggcttctttgaccccaacacgcacgagaacctcacgtacctgcagctactggagcgctgcgtggaggaccccgagacgggcctgtgccttctgccactcacggataaggctgccaagggcggggagctggtctacactgactccgaggcccgggacgtctttgagaaggccaccgtgtctgcgccgttcggcaagttccagggcaagacggtgaccatttgggagatcatcaactcggaatacttcacggcagagcagcggcgggacctgctgcggcagttccgcacgggccggatcacagtggagaagatcatcaagatcatcatcacggtggtggaggagcaggagcagaagggccggctttgctttgagggcctgcgcagcctggtgccagccgccgagctgctggagagcagggtcatcgaccgcgagctctaccagcagctgcagcgaggtgagcgctctgtgcgagacgtagccgaggtggacactgtgcggcgggctctccggggtgccaacgtcatcgcgggtgtatggctggaggaggcggggcagaagctgagtatctacaatgccctgaagaaagacctgctgccatccgacatggccgtggccctgttggaagcccaggccggcaccgggcacatcatcgaccccgccaccagcgcccggctgaccgtggacgaggcagtgcgtgctggcctggtgggccccgagtttcatgagaagctgctatcagccgagaaggctgtgacagggtacagggacccctacacagggcagagcgtctccctgttccaggccctgaagaagggcctcattccccgggagcagggcctgcgcctgttggacgcccagctgtccacgggcggcatcgtggaccccagcaagagccaccgcgtgcccctggatgtcgcctgcgcccgaggctgcctggatgaggagaccagcagggccctgtcggcaccaagggccgacgccaaggcctacagtgaccccagcacaggggagccggccacctacggcgagctccagcagcggtgccggcccgaccagctgaccgggctgagcctgctgccgctctcagaaaaggctgctcgggcccggcaggaggagctctactcagagctgcaggcccgtgagacctttgaaaagaccccggttgaggtccccgtgggtggcttcaagggcaggacggtgacggtgtgggagctcatcagctctgagtacttcactgcggagcagcggcaggagctgttgcgtcagttccgcacgggcaaggtcaccgtggagaaggtcatcaagattctcattaccatcgtggaggaggtggagaccctgcggcaggagaggctgtccttcagcggcctccgtgcccctgtgccagccagcgagctcctggcttccggggtcctcagcagagcccagtttgagcagctcaaggacggcaagacgacggtcaaggacctttcggagctgggctccgtgcggacgctgctgcagggcagtggctgcctcgccggcatctacctggaggacaccaaggagaaggtgtccatctacgaggccatgcgccggggcctgctgagagccacaacggctgcgctcctgctggaggcgcaggcggccactggcttcctggtggaccccgtgcggaaccagcgcctgtatgtccacgaggccgtgaaggcgggcgtggtgggccccgagcttcacgagcagctgctgtctgccgagaaggccgtcaccggctacagagacccctactcgggcagcaccatctccctcttccaggccatgcagaagggcctggttctccggcagcacggcatccgcctgctggaggcccagatcgccacgggcggcatcatcgaccccgtgcacagccaccgcgtgcctgtggacgtggcctaccagcgcggctacttcagtgaggagatgaaccgcgtcctggcggaccccagcgacgacaccaagggcttctttgaccccaacacgcatgagaacctcacgtacaggcagctgctggagcggtgcgtggaggaccccgagacgggcttgcgccttctgccactgaaaggggcggagaaggctgaggtggtggagaccacgcaggtgtacactgaggaggagacaagaagggcatttgaagagacacagatcgacattcccggcggcggcagccacggcggctccaccatgtccctgtgggaggtgatgcagtcggacctgatccccgaggagcagcgggcccagctgatggctgacttccaggccggccgggtgaccaaggaacgcatgatcatcatcatcatcgagatcattgagaagacagagatcatccgccagcagggtctggcctcctacgactacgtgcgccgccgcctcacggctgaggacctgttcgaggctcggatcatctctctcgagacctacaacctgctccgggagggcaccaggagcctccgtgaggctctcgaggcggagtccgcctggtgctacctctatggcacgggctccgtggctggtgtctacctgcccggttccaggcagacactgagcatctaccaggctctcaagaaagggctgctgagtgccgaggtggcccgcctgctgctggaggcacaggcagccacaggcttcctgctggacccggtgaagggggagcggctgactgtggatgaggctgtgcggaagggcctcgtggggcccgagctgcacgaccgcctgctctcggctgagcgggcggtcaccggctaccgtgacccctacaccgagcagaccatctcgctcttccaggccatgaagaaggagctgatccctactgaggaggccctgcggctgctggatgcccagctggccaccggcggcatcgtggacccccgcctgggcttccaccttcccctggaggtggcttaccagcgtggctacctcaacaaggacacgcacgaccagctgtcagagcccagcgaggtgcgcagctacgtggacccgtccaccgacgagcgcctcagctacacgcagctgctcaggcggtgccgtcgtgacgacggcaccggccagctgctcctgccactgtcggacgcccgcaagctgaccttccgtggcctgcggaagcagatcaccatggaggagctggtgcgctcgcaggtcatggacgaggccacggcgctgcagctgcgggagggcctgacctccatcgaggaggtcaccaagaacttgcagaagttcctggaaggcaccagctgcatcgctggtgtcttcgtggacgccaccaaggaacggctctcggtgtaccaggccatgaagaagggcatcatccgccccggcacagcctttgagctcctggaggcgcaggcggccaccggttacgtcatcgaccccatcaagggactgaagctgacggtggaggaggctgtgcgtatgggcattgtgggccccgagttcaaggacaagctgctgtcggccgagcgcgccgtcactgggtacaaggacccctactctgggaagctcatctccctcttccaggccatgaagaagggcctgatcctgaaggaccatggcatccgcctgctggaggcccagatcgccacgggcggcatcatcgaccctgaggagagccaccggctgcccgtggaggtggcctacaagcgcggcctcttcgatgaggagatgaacgagatcctgaccgacccctcggacgacaccaagggcttctttgaccctaacacggaggagaacctcacctacctgcagctgatggagcgttgtatcactgacccccagacgggcctgtgtctcttgccgctgaaggagaagaagcgggagcggaagacgtcctccaagtcctccgtgcgcaagcgccgagtggtcatcgtggaccccgagacgggcaaggagatgtcagtgtacgaggcctaccgcaagggcctgattgaccaccagacgtacctggagctgtccgagcaggagtgcgagtgggaggagatcaccatctcctcctcggacggcgtggtcaagtccatgatcatcgaccgccgctccgggcgccagtacgacatcgatgatgccatcgccaagaacctcatcgaccgctcggcactggaccagtaccgcgccggcacgctctccatcaccgagttcgccgacatgctctcgggcaacgccggtggtttccgctcccgttcctcctcggtgggatcctcctcctcctaccccatcagccccgccgtctccaggacccagctggcctcctggtcagaccccactgaggagacgggccccgtggctggcatcctggacacggagacgctggagaaggtgtccatcaccgaggccatgcaccggaacctggtggataacatcacggggcagcggctgctggaggcgcaggcctgcaccgggggcatcatcgaccccagcaccggtgagcgcttccctgtcaccgacgccgtcaacaagggcctggtggacaagatcatggtggaccgcatcaacctggcccagaaggccttctgcggcttcgaggacccacgcaccaagaccaagatgtcggccgcccaggccctgaagaagggctggctctactacgaggccggccagcgcttcctggaggtgcagtacctgaccggcggcttgatcgagcccgacacgccgggccgcgtgcccctggacgaggccctgcagcgcggcacggtggacgcccgcaccgcacagaagctgcgtgacgtgggcgcctactccaagtacctcacctgccctaagaccaagctcaagatctcctataaggacgcgctggaccgcagcatggtggaggagggcacggggctgcggctgctggaggctgccgcgcagtccaccaagggctactacagcccctacagcgtcagcggctccggctctaccgctggctcccgcaccggctcgcgcaccggctcccgggccggctcccgccgcggcagctttgacgccaccggctccggcttctccatgaccttctcttcatcctcctactcctcctcgggctacggccgccgctacgcctcggggtcctcggcctccctggggggccctgagtctgccgtggcctgaggctgcctgcgcccaccccgctctgcatgcggcccagcccggctcccaccgaggcgcgggggccgttttcaacgcttaaaggtgtcttcctcccaagtggtgcctaaagtttaaccaaaaagaccagactaatatattaatatatatctgctgtccagacagcctgtatcttgggggacagggctggcccagccctgctggccgcctcaccccctcgggtctcctcactcccttctacctgccactcacacagccaggtgccttggagggtcccaagctgggccccagcccaccctcctgtcttcccagggtagcccgcctgccagtcctagctgcacagggcagctgggcccaaccctgtctgtagagggccctggtgtttctagcactggcctgcacggtgggccttgctggggacggggggccccagtcagcctctctcccagtctacccagagaagccccttccccatgggaagacgaggccctcgggcccagcccccacagtgctgtctgatctgtgctttccagctcaccccccacactcactcctgagacccctggcctccggcgtcagcctccagcctctgttcccctagtaagtgccttccatgtcggcctctaaccccaggccccgaggacccagacccagtggggaggcggacgttccagccggcatggctgggaactgcagacctgtcctcctggtgggtccaggggcccctccagcttgtggagccccacactggggtgccgcctgcccgtctctctcccatggagccccagccccctttgggcccagggacaccagccaggctctgtgctgaccctcctgttgcacccagccctggtctcagcagcgaccacccctgcctccaccctctgagctttgcatgttccactaaccccgggcgggtggcaggtggaggtgtcaggctgctggcgcctctgcaagggcagaacactaacctgaccgtgggcggggccttgcggtatccgcccccaataaaagcaattccaaccttattgatcagctgaagccccgcccctggccggcaagccctgccccggacctccgggctcctcccccggctgcggcgctggcctgggcagtgcggtgcggggctggactctgcctggtggtggcacagccgccctcagccccggcgcagacatggacccctcgcgagccatccagaacgagatcagctccctcaaagatgagcgggatcgtgtgcagaagaaaaccttcaccaagtgggtcaacaagcacctcatcaaggcccagaggcacatcagtgacctgtatgaagacctccgcgatggccacaacctcatctccctgctggaggtcctctcgggggacagcctgccccgggagaaggggaggatgcgtttccacaagctgcagaatgtccagattgccctggactacctccggcaccgccaggtgaagctggtgaacatcaggaatgatgacatcgctgacggcaaccccaagctgacccttggcctcatctggacaatcattctgcacttccagatctcagatatccaggtgagtgggcagtcggaggacatgacggccaaggagaagctgctgctgtggtcgcagcgaatggtggaggggtaccagggcctgcgatgcgacaacttcacctccagctggagagacggccgcctcttcaatgccatcatccaccggcacaagcccctgctcatcgacatgaacaaggtgtaccggcagaccaacctggagaacctggaccaggccttctctgtggcggagcgggacctgggagtgacgcggctcctggaccctgaggacgtggatgtccctcagcccgacgagaagtccatcatcacctacgtctcgtcgctgtatgacgccatgccccgcgtgccggacgtgcaggatggggtgagggccaacgagctgcagctgcgctggcaggagtaccgggagctggtgctgctgctgcttcagtggatgcgacaccacacggccgcctttgaggaacgcaggttcccctccagcttcgaggagattgagatcctgtggtctcagttcctgaagtttaaggagatggagctaccagccaaggaggccgacaagaacaggtccaagggcatctaccaatccctggagggagcggtgcaagcaggccagctcaaggtgccccctggctaccacccgctggatgtggagaaggagtggggcaagctgcacgtggccatcctggagcgggagaagcagctccgcagcgagtttgagaggctggagtgtcttcagcgcatcgtgaccaagctgcagatggaggcggggctgtgtgaggagcagctgaaccaggccgacgccctgctgcagtcggatgtccggctgctggctgcaggcaaagtgccacagcgggcgggggaggtggaacgggacttggacaaggcggatagcatgatccggctgctcttcaacgacgtgcagaccctcaaggatggacggcacccgcagggcgagcagatgtaccgcagggtgtaccgtctgcacgagcgcctggtagccatccgcaccgagtacaacctacggctgaaggcaggcgtggcggcccctgcaacccaggtggcccaggtgactctgcagagtgtgcagaggcgccccgagctggaggactccactctgcgctacctgcaggacctgctggcctgggtggaggagaaccagcaccgtgtggatggcgctgagtggggtgtggacctgcccagcgtggaggcgcagctgggcagccaccgaggcctgcaccagtccatcgaagaattccgggccaagatcgagcgggcacggagtgacgagggccagctctcccccgccacccggggtgcctaccgtgactgcctgggtcggctggacctgcagtacgccaagctgctgaactcctccaaggcccgcctcaggtccctggagagcttgcacagctttgtggcagccgccactaaggagctaatgtggctgaatgagaaggaggaggaggaggtgggcttcgactggagcgaccgcaacaccaacatgaccgccaagaaggagagctactcggcgctgatgcgggagctggagctgaaggagaagaagatcaaggagctccaaaatgctggggaccggctgctgcgggaggaccacccggcccggcccacggtggagtccttccaggcggccctgcagacgcagtggagctggatgctacagctgtgctgctgtatcgaggcacacctgaaggagaacgctgcctactttcagttcttctcagatgtgcgggaggccgaggggcagttgcagaagctgcaggaggcactgcgtaggaaatacagttgtgatcgctccgccaccgtcacccggctggaggacctgctgcaggatgcccaggacgagaaggaacagctgaacgagtacaagggccacctctcaggcctggccaagcgggccaaggccgtcgtgcagctgaagccccgccacccagcccaccccatgcggggccgcctgcccctgctggccgtgtgcgactataagcaggtggaggtgactgtgcacaagggtgacgagtgc

SEQ ID NO: 645 - DNA, 32765 bp, Homo sapiens
  misc_feature (212)..(212): second gene starts at position 212
atgttcagctttgtggacctccggctcctgctcctcttagcggccaccgccctcctgacgcacggccaagaggaaggccaagtcgagggccaagacgaagacatcccaccaatcacctgcgtacagaacggcctcaggtaccatgaccgagacgtgtggaaacccgagccctgccggatctgcgtctgcgacaacggcaaggtgttgtgcgatgacgtgatctgtgacgagaccaagaactgccccggcgccgaagtccccgagggcgagtgctgtcccgtctgccccgacggctcagagtcacccaccgaccaagaaaccaccggcgtcgagggacccaagggagacactggcccccgaggcccaaggggacccgcaggcccccctggccgagatggcatccctggacagcctggacttcccggaccccccggaccccccggacctcccggaccccctggcctcggaggaaactttgctccccagctgtcttatggctatgatgagaaatcaaccggaggaatttccgtgcctggccccatgggtccctctggtcctcgtggtctccctggcccccctggtgcacctggtccccaaggcttccaaggtccccctggtgagcctggcgagcctggagcttcaggtcccatgggtccccgaggtcccccaggtccccctggaaagaatggagatgatggggaagctggaaaacctggtcgtcctggtgagcgtgggcctcctgggcctcagggtgctcgaggattgcccggaacagctggcctccctggaatgaagggacacagaggtttcagtggtttggatggtgccaagggagatgctggtcctgctggtcctaagggtgagcctggcagccctggtgaaaatggagctcctggtcagatgggcccccgtggcctgcctggtgagagaggtcgccctggagcccctggccctgctggtgctcgtggaaatgatggtgctactggtgctgccgggccccctggtcccaccggccccgctggtcctcctggcttccctggtgctgttggtgctaagggtgaagctggtccccaagggccccgaggctctgaaggtccccagggtgtgcgtggtgagcctggcccccctggccctgctggtgctgctggccctgctggaaaccctggtgctgatggacagcctggtgctaaaggtgccaatggtgctcctggtattgctggtgctcctggcttccctggtgcccgaggcccctctggaccccagggccccggcggccctcctggtcccaagggtaacagcggtgaacctggtgctcctggcagcaaaggagacactggtgctaagggagagcctggccctgttggtgttcaaggaccccctggccctgctggagaggaaggaaagcgaggagctcgaggtgaacccggacccactggcctgcccggaccccctggcgagcgtggtggacctggtagccgtggtttccctggcgcagatggtgttgctggtcccaagggtcccgctggtgaacgtggttctcctggccctgctggccccaaaggatctcctggtgaagctggtcgtcccggtgaagctggtctgcctggtgccaagggtctgactggaagccctggcagccctggtcctgatggcaaaactggcccccctggtcccgccggtcaagatggtcgccccggacccccaggcccacctggtgcccgtggtcaggctggtgtgatgggattccctggacctaaaggtgctgctggagagcccggcaaggctggagagcgaggtgttcccggaccccctggcgctgtcggtcctgctggcaaagatggagaggctggagctcagggaccccctggccctgctggtcccgctggcgagagaggtgaacaaggccctgctggctcccccggattccagggtctccctggtcctgctggtcctccaggtgaagcaggcaaacctggtgaacagggtgttcctggagaccttggcgcccctggcccctctggagcaagaggcgagagaggtttccctggcgagcgtggtgtgcaaggtccccctggtcctgctggtccccgaggggccaacggtgctcccggcaacgatggtgctaagggtgatgctggtgcccctggagctcccggtagccagggcgcccctggccttcagggaatgcctggtgaacgtggtgcagctggtcttccagggcctaagggtgacagaggtgatgctggtcccaaaggtgctgatggctctcctggcaaagatggcgtccgtggtctgactggccccattggtcctcctggccctgctggtgcccctggtgacaagggtgaaagtggtcccagcggccctgctggtcccactggagctcgtggtgcccccggagaccgtggtgagcctggtccccccggccctgctggctttgctggcccccctggtgctgacggccaacctggtgctaaaggcgaacctggtgatgctggtgctaaaggcgatgctggtccccctggccctgccggacccgctggaccccctggccccattggtaatgttggtgctcctggagccaaaggtgctcgcggcagcgctggtccccctggtgctactggtttccctggtgctgctggccgagtcggtcctcctggcccctctggaaatgctggaccccctggccctcctggtcctgctggcaaagaaggcggcaaaggtccccgtggtgagactggccctgctggacgtcctggtgaagttggtccccctggtccccctggccctgctggcgagaaaggatcccctggtgctgatggtcctgctggtgctcctggtactcccgggcctcaaggtattgctggacagcgtggtgtggtcggcctgcctggtcagagaggagagagaggcttccctggtcttcctggcccctctggtgaacctggcaaacaaggtccctctggagcaagtggtgaacgtggtccccctggtcccatgggcccccctggattggctggaccccctggtgaatctggacgtgagggggctcctggtgccgaaggttcccctggacgagacggttctcctggcgccaagggtgaccgtggtgagaccggccccgctggaccccctggtgctcctggtgctcctggtgcccctggccccgttggccctgctggcaagagtggtgatcgtggtgagactggtccgtgtgcgactataagcaggtggaggtgactgtgcacaagggtgacgagtgccagctggtgggccctgcacagccgtcccactggaaggtgctcagcagctccggcagcgaggccgccgtgccctccgtgtgcttcctggtgcccccgcccaaccaggaggcccaggaggccgtcaccaggctggaggcccagcaccaggccctggtcacgctgtggcaccagttgcacgtggacatgaagagccttctggcctggcagagccttcgccgcgacgtgcagctcatccgctcctggtccctggccacgttccgcaccctgaagccagaggagcagcgccaagccctgcacagcctggagctgcactaccaggccttcctgcgggacagccaggacgcgggcggcttcggacccgaggaccggctgatggctgagcgcgagtacggctcctgcagccaccactaccagcagctgctgcagagcctggaacagggtgcacaggaagagtctcgctgccagcgctgcatctccgagctcaaagacatccggctgcagctggaggcctgtgagacgcgcaccgtgcaccgcctgcggctgccgctggacaaagagccggcacgggagtgtgcccagcgcatcgccgagcagcagaaggcacaggcagaggtggaggggctgggcaagggggtcgcccggctctctgccgaggccgagaaggtcttggccctaccagagccatcgcctgcggcccccacgctgcgctcggagctggagctgacgctgggcaagctggagcaggtccgcagcctgtctgccatctacctggagaagctcaagaccatcagcctggtgatccgcggcacgcagggggccgaggaggtgctcagggcccacgaggagcagctcaaggaggcccaggccgtgccggccaccctcccggagctcgaggccaccaaggcctctctgaagaagctgcgggcccaggccgaggcacagcagcccacgttcgacgccctgcgggatgagctgcggggggcacaggaggtgggggagcgactgcagcagcggcacggggagcgggacgtggaggtggagcgctggcgggagcgggtcgcccagttgcttgagcgctggcaggctgtgctggcccagaccgacgtgcggcagcgcgagctcgagcaactgggccgccagctgcgttactaccgcgagagtgcagaccccttgggcgcctggctgcaggacgccaggcggcggcaggagcagatccaggccatgccgctggccgacagccaggctgtgcgggagcagctgcggcaggagcaggccctgctggaggagatcgagcgccacggcgagaaggtcgaggagtgccagaggtttgcgaaacagtacatcaacgccatcaaggactatgaactccagctggtgacgtacaaggcgcagcttgagccggtggcctccccggccaagaagcccaaggtccagtcgggatcagagagtgtcatccaggagtacgtggacctgcgtacgcactacagcgagctgaccacactgacgagccagtacatcaagttcatcagcgagactctgcggcgcatggaggaggaggagaggctggctgagcagcagcgggcagaggagcgcgagcggctggccgaggtggaggccgcgctggagaagcagcggcagctggccgaggcgcacgcccaggcaaaggcacaggcggagcgggaggcgaaggagctgcagcagcgcatgcaggaggaggtggtgcggcgggaggaggcggcggtggacgcgcagcagcagaagcgcagcattcaggaggagctgcagcagctgcggcagagctcggaggcggagatccaggccaaggcccggcaggcagaggcggctgagcgcagccggctgcgcatcgaggaggagatccgcgtggtgcgcctgcagttggaggccaccgagcgccagcgtggcggggctgagggggagctgcaggcactgcgtgcacgggcggaggaggctgaggcacaaaagcgacaggcgcaggaggaggccgagcgcttgcggaggcaggtgcaggacgagagccagcgtaagcggcaggcggaggtggagctggcctcgcgcgtgaaggccgaggccgaggcggcgcgcgagaagcagcgggccctgcaggccctggaggagctgcggctgcaggcggaggaggcggagcggcgcctgcggcaggccgaggtggagcgagcgcggcaggtacaggtggccctggagacggcgcagcgcagtgcagaggcggagctgcagagcaaacgcgcctccttcgccgagaagacggcacagctggagcgctccctgcaggaggaacacgtggctgtggcacagctgcgggaggaggctgagcggcgggcacagcagcaggccgaggccgagcgggcgcgcgaggaggcagagcgggagctggagcgctggcagctcaaggccaacgaggcgctacggctgcggctgcaggcggaggaggtggcgcagcagaagagcctggcgcaggccgaggctgagaagcagaaggaggaggcggagcgcgaggcgcggcggcgcggcaaggcggaggagcaggccgtccggcagcgggagctggctgaacaagagctggagaagcagcggcagctggcggaaggcaccgcgcagcagcgcctggccgcggagcaggagttgatccggctgcgggccgagacggagcagggggagcagcagcggcagctgctggaggaggagctggcccggctgcagcgtgaggcggctgcagccacgcagaaacggcaggagctggaagccgagctggccaaggtgcgggccgagatggaggtgctgctggccagcaaggcgagggctgaggaggagtcgcgctccaccagcgagaagtccaagcagaggctggaggccgaggccggccggttccgcgagctggccgaggaggccgcccgcctgcgtgccctggcggaagaggccaagcggcagcggcagctggccgaggaagacgcggcgcggcagcgggccgaggcggagcgggtgcttgcggagaagctggccgccatcggcgaggccacgcggctcaagacggaggcggagatcgcgctcaaggagaaggaggcggagaacgagcgcctgcggcggctggcggaggacgaggccttccagcggcggcggctggaggagcaggccgcgcaacacaaggctgacatcgaggagcgcctggcccagctgcgcaaggcatcggacagcgagctggagcggcagaaggggctggtggaggacacgctgaggcagcggcggcaggtggaggaggagatcctggcgctgaaggcgagcttcgagaaggcggccgctggcaaggcggagctggagctggagctgggacgcatccgcagcaacgcggaggacacgctgcgcagcaaggagcaggccgagctggaggctgcgaggcagcggcagctggcggcggaggaggagcggcggcgccgtgaggctgaggagcgcgtgcagaagagcctggcggccgaggaggaggccgcacggcagcggaaggcggcgctggaggaagtcgagcggctgaaagccaaggtggaggaggcgcggcgcctgcgggagcgagcggagcaggagtcggcgcggcagctgcagctggcccaggaggccgcccagaagcggctgcaggcggaagagaaggcacacgccttcgcggtgcagcagaaggagcaggagctacagcagacgctgcagcaggagcagagcgtgctggaccagctgcgcggcgaggcggaggcggcccggcgggcggctgaggaggcggaggaggcccgggtgcaggcggagcgtgaggcggcgcagtcccggcggcaggtggaagaggccgagcggctgaagcagtcggcagaggagcaggcacaggcccgggctcaggcacaggcggctgcagagaagctgcgcaaggaggccgagcaagaggcggcgcggcgggcacaggcggagcaggcggccctgcggcagaagcaggcagctgacgcggagatggagaagcataagaaattcgccgagcagacgctgcggcagaaggcgcaggtggagcaggagctgacaacactgcggctgcagctggaggagaccgaccaccagaagaacctgctggacgaggagctgcagcggctgaaggcggaggccacggaggccgcacgccagcgcagccaggtggaggaggagctcttctcggtgcgcgtgcagatggaggagctgagcaagctcaaggcacgcatcgaggctgagaaccgcgcactcatcttgcgtgacaaggacaatacgcagcgcttcctgcaggaggaggctgagaagatgaagcaggtggcggaggaggccgcgcggctgagtgtggcggcccaagaggctgcgcgactgcggcagctggcagaggaggacctggcacagcagcgggccttggcagagaagatgctcaaggagaagatgcaggcggtgcaggaggccacgcgactcaaggctgaggcggaactgctgcagcagcagaaggagcttgcgcaggagcaggcgcggcggctgcaggaggacaaggagcagatggcgcagcagctggcggaggagacgcagggcttccagcggacgctggaggccgagcggcagcggcagctggagatgagcgctgaggctgagcgcctcaagctgcgtgtggccgagatgagccgagcccaggcccgcgctgaggaggacgcccagcgcttccggaagcaggcggaggagatcggtgagaagctgcaccgcacggagctcgccacccaggagaaggtgaccctggtgcagacactggagatccagcgacagcagagtgaccatgatgccgagcgcctgcgggaggccatcgctgagctggagcgtgagaaggagaagctccaacaggaggccaaactgctgcagctcaagtctgaggagatgcagacggtgcagcaggagcagctgctgcaggagacgcaggccctgcagcaaagcttcctctctgaaaaggacagcctgctacagcgggagcgcttcatcgagcaggagaaggccaagctggagcagctcttccaggacgaggtggccaaggcacagcagctgcgtgaggagcagcagcggcagcagcagcagatggagcaggaacggcagcggctggtggccagcatggaggaggcgcggcggcggcagcatgaggccgaggagggcgtgcggcgcaagcaggaggagctgcagcagctggagcagcagcggcggcagcaggaggagctgctggctgaggagaaccagaggctgcgtgagcagctgcagctcctggaggagcagcaccgggccgcgctggcgcactcagaggaggtcactgcctcgcaggtggctgccacaaagaccctgcccaatggccgggatgcacttgatggccccgcggcagaggcagagccggagcacagcttcgatggcctgcggcggaaggtgtcagctcagaggctgcaggaggccggcatcctgagtgcggaggagctgcagcggttggcgcagggccacaccacggtggacgagctcgcacggcgggaagacgtgcgccactacctgcagggccgcagcagtatcgcagggctgttgctgaaggccaccaatgagaagctgagtgtttacgccgccctgcagaggcagctgctgagtcccggcacggccctcatcctgctggaggcgcaggcggcctcaggcttcctgctggaccctgtgcggaaccggcggctgaccgtcaacgaggctgtgaaggagggtgtggtgggccccgagctgcaccacaagctgctgtcggccgagcgcgccgtcactggctacaaggacccctacactggccagcagatctctctcttccaagccatgcagaagggcctcatcgtccgggagcacggcatccgcctgctggaggcccagatcgccacgggcggcgttatcgaccccgtgcacagccaccgcgtgcccgtggacgtggcctaccggcgcggctacttcgacgaggagatgaaccgcgtcctggcggaccccagcgacgacaccaagggcttctttgaccccaacacgcacgagaacctcacgtacctgcagctactggagcgctgcgtggaggaccccgagacgggcctgtgccttctgccactcacggataaggctgccaagggcggggagctggtctacactgactccgaggcccgggacgtctttgagaaggccaccgtgtctgcgccgttcggcaagttccagggcaagacggtgaccatttgggagatcatcaactcggaatacttcacggcagagcagcggcgggacctgctgcggcagttccgcacgggccggatcacagtggagaagatcatcaagatcatcatcacggtggtggaggagcaggagcagaagggccggctttgctttgagggcctgcgcagcctggtgccagccgccgagctgctggagagcagggtcatcgaccgcgagctctaccagcagctgcagcgaggtgagcgctctgtgcgagacgtagccgaggtggacactgtgcggcgggctctccggggtgccaacgtcatcgcgggtgtatggctggaggaggcggggcagaagctgagtatctacaatgccctgaagaaagacctgctgccatccgacatggccgtggccctgttggaagcccaggccggcaccgggcacatcatcgaccccgccaccagcgcccggctgaccgtggacgaggcagtgcgtgctggcctggtgggccccgagtttcatgagaagctgctatcagccgagaaggctgtgacagggtacagggacccctacacagggcagagcgtctccctgttccaggccctgaagaagggcctcattccccgggagcagggcctgcgcctgttggacgcccagctgtccacgggcggcatcgtggaccccagcaagagccaccgcgtgcccctggatgtcgcctgcgcccgaggctgcctggatgaggagaccagcagggccctgtcggcaccaagggccgacgccaaggcctacagtgaccccagcacaggggagccggccacctacggcgagctccagcagcggtgccggcccgaccagctgaccgggctgagcctgctgccgctctcagaaaaggctgctcgggcccggcaggaggagctctactcagagctgcaggcccgtgagacctttgaaaagaccccggttgaggtccccgtgggtggcttcaagggcaggacggtgacggtgtgggagctcatcagctctgagtacttcactgcggagcagcggcaggagctgttgcgtcagttccgcacgggcaaggtcaccgtggagaaggtcatcaagattctcattaccatcgtggaggaggtggagaccctgcggcaggagaggctgtccttcagcggcctccgtgcccctgtgccagccagcgagctcctggcttccggggtcctcagcagagcccagtttgagcagctcaaggacggcaagacgacggtcaaggacctttcggagctgggctccgtgcggacgctgctgcagggcagtggctgcctcgccggcatctacctggaggacaccaaggagaaggtgtccatctacgaggccatgcgccggggcctgctgagagccacaacggctgcgctcctgctggaggcgcaggcggccactggcttcctggtggaccccgtgcggaaccagcgcctgtatgtccacgaggccgtgaaggcgggcgtggtgggccccgagcttcacgagcagctgctgtctgccgagaaggccgtcaccggctacagagacccctactcgggcagcaccatctccctcttccaggccatgcagaagggcctggttctccggcagcacggcatccgcctgctggaggcccagatcgccacgggcggcatcatcgaccccgtgcacagccaccgcgtgcctgtggacgtggcctaccagcgcggctacttcagtgaggagatgaaccgcgtcctggcggaccccagcgacgacaccaagggcttctttgaccccaacacgcatgagaacctcacgtacaggcagctgctggagcggtgcgtggaggaccccgagacgggcttgcgccttctgccactgaaaggggcggagaaggctgaggtggtggagaccacgcaggtgtacactgaggaggagacaagaagggcatttgaagagacacagatcgacattcccggcggcggcagccacggcggctccaccatgtccctgtgggaggtgatgcagtcggacctgatccccgaggagcagcgggcccagctgatggctgacttccaggccggccgggtgaccaaggaacgcatgatcatcatcatcatcgagatcattgagaagacagagatcatccgccagcagggtctggcctcctacgactacgtgcgccgccgcctcacggctgaggacctgttcgaggctcggatcatctctctcgagacctacaacctgctccgggagggcaccaggagcctccgtgaggctctcgaggcggagtccgcctggtgctacctctatggcacgggctccgtggctggtgtctacctgcccggttccaggcagacactgagcatctaccaggctctcaagaaagggctgctgagtgccgaggtggcccgcctgctgctggaggcacaggcagccacaggcttcctgctggacccggtgaagggggagcggctgactgtggatgaggctgtgcggaagggcctcgtggggcccgagctgcacgaccgcctgctctcggctgagcgggcggtcaccggctaccgtgacccctacaccgagcagaccatctcgctcttccaggccatgaagaaggagctgatccctactgaggaggccctgcggctgctggatgcccagctggccaccggcggcatcgtggacccccgcctgggcttccaccttcccctggaggtggcttaccagcgtggctacctcaacaaggacacgcacgaccagctgtcagagcccagcgaggtgcgcagctacgtggacccgtccaccgacgagcgcctcagctacacgcagctgctcaggcggtgccgtcgtgacgacggcaccggccagctgctcctgccactgtcggacgcccgcaagctgaccttccgtggcctgcggaagcagatcaccatggaggagctggtgcgctcgcaggtcatggacgaggccacggcgctgcagctgcgggagggcctgacctccatcgaggaggtcaccaagaacttgcagaagttcctggaaggcaccagctgcatcgctggtgtcttcgtggacgccaccaaggaacggctctcggtgtaccaggccatgaagaagggcatcatccgccccggcacagcctttgagctcctggaggcgcaggcggccaccggttacgtcatcgaccccatcaagggactgaagctgacggtggaggaggctgtgcgtatgggcattgtgggccccgagttcaaggacaagctgctgtcggccgagcgcgccgtcactgggtacaaggacccctactctgggaagctcatctccctcttccaggccatgaagaagggcctgatcctgaaggaccatggcatccgcctgctggaggcccagatcgccacgggcggcatcatcgaccctgaggagagccaccggctgcccgtggaggtggcctacaagcgcggcctcttcgatgaggagatgaacgagatcctgaccgacccctcggacgacaccaagggcttctttgaccctaacacggaggagaacctcacctacctgcagctgatggagcgttgtatcactgacccccagacgggcctgtgtctcttgccgctgaaggagaagaagcgggagcggaagacgtcctccaagtcctccgtgcgcaagcgccgagtggtcatcgtggaccccgagacgggcaaggagatgtcagtgtacgaggcctaccgcaagggcctgattgaccaccagacgtacctggagctgtccgagcaggagtgcgagtgggaggagatcaccatctcctcctcggacggcgtggtcaagtccatgatcatcgaccgccgctccgggcgccagtacgacatcgatgatgccatcgccaagaacctcatcgaccgctcggcactggaccagtaccgcgccggcacgctctccatcaccgagttcgccgacatgctctcgggcaacgccggtggtttccgctcccgttcctcctcggtgggatcctcctcctcctaccccatcagccccgccgtctccaggacccagctggcctcctggtcagaccccactgaggagacgggccccgtggctggcatcctggacacggagacgctggagaaggtgtccatcaccgaggccatgcaccggaacctggtggataacatcacggggcagcggctgctggaggcgcaggcctgcaccgggggcatcatcgaccccagcaccggtgagcgcttccctgtcaccgacgccgtcaacaagggcctggtggacaagatcatggtggaccgcatcaacctggcccagaaggccttctgcggcttcgaggacccacgcaccaagaccaagatgtcggccgcccaggccctgaagaagggctggctctactacgaggccggccagcgcttcctggaggtgcagtacctgaccggcggcttgatcgagcccgacacgccgggccgcgtgcccctggacgaggccctgcagcgcggcacggtggacgcccgcaccgcacagaagctgcgtgacgtgggcgcctactccaagtacctcacctgccctaagaccaagctcaagatctcctataaggacgcgctggaccgcagcatggtggaggagggcacggggctgcggctgctggaggctgccgcgcagtccaccaagggctactacagcccctacagcgtcagcggctccggctctaccgctggctcccgcaccggctcgcgcaccggctcccgggccggctcccgccgcggcagctttgacgccaccggctccggcttctccatgaccttctcttcatcctcctactcctcctcgggctacggccgccgctacgcctcggggtcctcggcctccctggggggccctgagtctgccgtggcctgaggctgcctgcgcccaccccgctctgcatgcggcccagcccggctcccaccgaggcgcgggggccgttttcaacgcttaaaggtgtcttcctcccaagtggtgcctaaagtttaaccaaaaagaccagactaatatattaatatatatctgctgtccagacagcctgtatcttgggggacagggctggcccagccctgctggccgcctcaccccctcgggtctcctcactcccttctacctgccactcacacagccaggtgccttggagggtcccaagctgggccccagcccaccctcctgtcttcccagggtagcccgcctgccagtcctagctgcacagggcagctgggcccaaccctgtctgtagagggccctggtgtttctagcactggcctgcacggtgggccttgctggggacggggggccccagtcagcctctctcccagtctacccagagaagccccttccccatgggaagacgaggccctcgggcccagcccccacagtgctgtctgatctgtgctttccagctcaccccccacactcactcctgagacccctggcctccggcgtcagcctccagcctctgttcccctagtaagtgccttccatgtcggcctctaaccccaggccccgaggacccagacccagtggggaggcggacgttccagccggcatggctgggaactgcagacctgtcctcctggtgggtccaggggcccctccagcttgtggagccccacactggggtgccgcctgcccgtctctctcccatggagccccagccccctttgggcccagggacaccagccaggctctgtgctgaccctcctgttgcacccagccctggtctcagcagcgaccacccctgcctccaccctctgagctttgcatgttccactaaccccgggcgggtggcaggtggaggtgtcaggctgctggcgcctctgcaagggcagaacactaacctgaccgtgggcggggccttgcggtatccgcccccaataaaagcaattccaaccttgtggccggcatgtcgggggcggggggcgcctttgcctcgccgagggaggtcttgctggagcggccgtgctggctggacgggggctgcgagccggcccgcaggggctacctctaccagcagctgtgctgcgtagatgagcgggatcgtgtgcagaagaaaaccttcaccaagtgggtcaacaagcacctcatcaaggcccagaggcacatcagtgacctgtatgaagacctccgcgatggccacaacctcatctccctgctggaggtcctctcgggggacagcctgccccgggagaaggggaggatgcgtttccacaagctgcagaatgtccagattgccctggactacctccggcaccgccaggtgaagctggtgaacatcaggaatgatgacatcgctgacggcaaccccaagctgacccttggcctcatctggacaatcattctgcacttccagatctcagatatccaggtgagtgggcagtcggaggacatgacggccaaggagaagctgctgctgtggtcgcagcgaatggtggaggggtaccagggcctgcgatgcgacaacttcacctccagctggagagacggccgcctcttcaatgccatcatccaccggcacaagcccctgctcatcgacatgaacaaggtgtaccggcagaccaacctggagaacctggaccaggccttctctgtggcggagcgggacctgggagtgacgcggctcctggaccctgaggacgtggatgtccctcagcccgacgagaagtccatcatcacctacgtctcgtcgctgtatgacgccatgccccgcgtgccggacgtgcaggatggggtgagggccaacgagctgcagctgcgctggcaggagtaccgggagctggtgctgctgctgcttcagtggatgcgacaccacacggccgcctttgaggaacgcaggttcccctccagcttcgaggagattgagatcctgtggtctcagttcctgaagtttaaggagatggagctaccagccaaggaggccgacaagaacaggtccaagggcatctaccaatccctggagggagcggtgcaagcaggccagctcaaggtgccccctggctaccacccgctggatgtggagaaggagtggggcaagctgcacgtggccatcctggagcgggagaagcagctccgcagcgagtttgagaggctggagtgtcttcagcgcatcgtgaccaagctgcagatggaggcggggctgtgtgaggagcagctgaaccaggccgacgccctgctgcagtcggatgtccggctgctggctgcaggcaaagtgccacagcgggcgggggaggtggaacgggacttggacaaggcggatagcatgatccggctgctcttcaacgacgtgcagaccctcaaggatggacggcacccgcagggcgagcagatgtaccgcagggtgtaccgtctgcacgagcgcctggtagccatccgcaccgagtacaacctacggctgaaggcaggcgtggcggcccctgcaacccaggtggcccaggtgactctgcagagtgtgcagaggcgccccgagctggaggactccactctgcgctacctgcaggacctgctggcctgggtggaggagaaccagcaccgtgtggatggcgctgagtggggtgtggacctgcccagcgtggaggcgcagctgggcagccaccgaggcctgcaccagtccatcgaagaattccgggccaagatcgagcgggcacggagtgacgagggccagctctcccccgccacccggggtgcctaccgtgactgcctgggtcggctggacctgcagtacgccaagctgctgaactcctccaaggcccgcctcaggtccctggagagcttgcacagctttgtggcagccgccactaaggagctaatgtggctgaatgagaaggaggaggaggaggtgggcttcgactggagcgaccgcaacaccaacatgaccgccaagaaggagagctactcggcgctgatgcgggagctggagctgaaggagaagaagatcaaggagctccaaaatgctggggaccggctgctgcgggaggaccacccggcccggcccacggtggagtccttccaggcggccctgcagacgcagtggagctggatgctacagctgtgctgctgtatcgaggcacacctgaaggagaacgctgcctactttcagttcttctcagatgtgcgggaggccgaggggcagttgcagaagctgcaggaggcactgcgtaggaaatacagttgtgatcgctccgccaccgtcacccggctggaggacctgctgcaggatgcccaggacgagaaggaacagctgaacgagtacaagggccacctctcaggcctggccaagcgggccaaggccgtcgtgcagctgaagccccgccacccagcccaccccatgcggggccgcctgcccctgctggccgtgtgcgactataagcaggtggaggtgactgtgcacaagggtgacgagtgccagctggtgggccctgcacagccgtcccactggaaggtgctcagcagctccggcagcgaggccgccgtgccctccgtgtgcttcctggtgcccccgcccaaccaggaggcccaggaggccgtcaccaggctggaggcccagcaccaggccctggtcacgctgtggcaccagttgcacgtggacatgaagagccttctggcctggcagagccttcgccgcgacgtgcagctcatccgctcctggtccctggccacgttccgcaccctgaagccagaggagcagcgccaagccctgcacagcctggagctgcactaccaggccttcctgcgggacagccaggacgcgggcggcttcggacccgaggaccggctgatggctgagcgcgagtacggctcctgcagccaccactaccagcagctgctgcagagcctggaacagggtgcacaggaagagtctcgctgccagcgctgcatctccgagctcaaagacatccggctgcagctggaggcctgtgagacgcgcaccgtgcaccgcctgcggctgccgctggacaaagagccggcacgggagtgtgcccagcgcatcgccgagcagcagaaggcacaggcagaggtggaggggctgggcaagggggtcgcccggctctctgccgaggccgagaaggtcttggccctaccagagccatcgcctgcggcccccacgctgcgctcggagctggagctgacgctgggcaagctggagcaggtccgcagcctgtctgccatctacctggagaagctcaagaccatcagcctggtgatccgcggcacgcagggggccgaggaggtgctcagggcccacgaggagcagctcaaggaggcccaggccgtgccggccaccctcccggagctcgaggccaccaaggcctctctgaagaagctgcgggcccaggccgaggcacagcagcccacgttcgacgccctgcgggatgagctgcggggggcacaggaggtgggggagcgactgcagcagcggcacggggagcgggacgtggaggtggagcgctggcgggagcgggtcgcccagttgcttgagcgctggcaggctgtgctggcccagaccgacgtgcggcagcgcgagctcgagcaactgggccgccagctgcgttactaccgcgagagtgcagaccccttgggcgcctggctgcaggacgccaggcggcggcaggagcagatccaggccatgccgctggccgacagccaggctgtgcgggagcagctgcggcaggagcaggccctgctggaggagatcgagcgccacggcgagaaggtcgaggagtgccagaggtttgcgaaacagtacatcaacgccatcaaggactatgaactccagctggtgacgtacaaggcgcagcttgagccggtggcctccccggccaagaagcccaaggtccagtcgggatcagagagtgtcatccaggagtacgtggacctgcgtacgcactacagcgagctgaccacactgacgagccagtacatcaagttcatcagcgagactctgcggcgcatggaggaggaggagaggctggctgagcagcagcgggcagaggagcgcgagcggctggccgaggtggaggccgcgctggagaagcagcggcagctggccgaggcgcacgcccaggcaaaggcacaggcggagcgggaggcgaaggagctgcagcagcgcatgcaggaggaggtggtgcggcgggaggaggcggcggtggacgcgcagcagcagaagcgcagcattcaggaggagctgcagcagctgcggcagagctcggaggcggagatccaggccaaggcccggcaggcagaggcggctgagcgcagccggctgcgcatcgaggaggagatccgcgtggtgcgcctgcagttggaggccaccgagcgccagcgtggcggggctgagggggagctgcaggcactgcgtgcacgggcggaggaggctgaggcacaaaagcgacaggcgcaggaggaggccgagcgcttgcggaggcaggtgcaggacgagagccagcgtaagcggcaggcggaggtggagctggcctcgcgcgtgaaggccgaggccgaggcggcgcgcgagaagcagcgggccctgcaggccctggaggagctgcggctgcaggcggaggaggcggagcggcgcctgcggcaggccgaggtggagcgagcgcggcaggtacaggtggccctggagacggcgcagcgcagtgcagaggcggagctgcagagcaaacgcgcctccttcgccgagaagacggcacagctggagcgctccctgcaggaggaacacgtggctgtggcacagctgcgggaggaggctgagcggcgggcacagcagcaggccgaggccgagcgggcgcgcgaggaggcagagcgggagctggagcgctggcagctcaaggccaacgaggcgctacggctgcggctgcaggcggaggaggtggcgcagcagaagagcctggcgcaggccgaggctgagaagcagaaggaggaggcggagcgcgaggcgcggcggcgcggcaaggcggaggagcaggccgtccggcagcgggagctggctgaacaagagctggagaagcagcggcagctggcggaaggcaccgcgcagcagcgcctggccgcggagcaggagttgatccggctgcgggccgagacggagcagggggagcagcagcggcagctgctggaggaggagctggcccggctgcagcgtgaggcggctgcagccacgcagaaacggcaggagctggaagccgagctggccaaggtgcgggccgagatggaggtgctgctggccagcaaggcgagggctgaggaggagtcgcgctccaccagcgagaagtccaagcagaggctggaggccgaggccggccggttccgcgagctggccgaggaggccgcccgcctgcgtgccctggcggaagaggccaagcggcagcggcagctggccgaggaagacgcggcgcggcagcgggccgaggcggagcgggtgcttgcggagaagctggccgccatcggcgaggccacgcggctcaagacggaggcggagatcgcgctcaaggagaaggaggcggagaacgagcgcctgcggcggctggcggaggacgaggccttccagcggcggcggctggaggagcaggccgcgcaacacaaggctgacatcgaggagcgcctggcccagctgcgcaaggcatcggacagcgagctggagcggcagaaggggctggtggaggacacgctgaggcagcggcggcaggtggaggaggagatcctggcgctgaaggcgagcttcgagaaggcggccgctggcaaggcggagctggagctggagctgggacgcatccgcagcaacgcggaggacacgctgcgcagcaaggagcaggccgagctggaggctgcgaggcagcggcagctggcggcggaggaggagcggcggcgccgtgaggctgaggagcgcgtgcagaagagcctggcggccgaggaggaggccgcacggcagcggaaggcggcgctggaggaagtcgagcggctgaaagccaaggtggaggaggcgcggcgcctgcgggagcgagcggagcaggagtcggcgcggcagctgcagctggcccaggaggccgcccagaagcggctgcaggcggaagagaaggcacacgccttcgcggtgcagcagaaggagcaggagctacagcagacgctgcagcaggagcagagcgtgctggaccagctgcgcggcgaggcggaggcggcccggcgggcggctgaggaggcggaggaggcccgggtgcaggcggagcgtgaggcggcgcagtcccggcggcaggtggaagaggccgagcggctgaagcagtcggcagaggagcaggcacaggcccgggctcaggcacaggcggctgcagagaagctgcgcaaggaggccgagcaagaggcggcgcggcgggcacaggcggagcaggcggccctgcggcagaagcaggcagctgacgcggagatggagaagcataagaaattcgccgagcagacgctgcggcagaaggcgcaggtggagcaggagctgacaacactgcggctgcagctggaggagaccgaccaccagaagaacctgctggacgaggagctgcagcggctgaaggcggaggccacggaggccgcacgccagcgcagccaggtggaggaggagctcttctcggtgcgcgtgcagatggaggagctgagcaagctcaaggcacgcatcgaggctgagaaccgcgcactcatcttgcgtgacaaggacaatacgcagcgcttcctgcaggaggaggctgagaagatgaagcaggtggcggaggaggccgcgcggctgagtgtggcggcccaagaggctgcgcgactgcggcagctggcagaggaggacctggcacagcagcgggccttggcagagaagatgctcaaggagaagatgcaggcggtgcaggaggccacgcgactcaaggctgaggcggaactgctgcagcagcagaaggagcttgcgcaggagcaggcgcggcggctgcaggaggacaaggagcagatggcgcagcagctggcggaggagacgcagggcttccagcggacgctggaggccgagcggcagcggcagctggagatgagcgctgaggctgagcgcctcaagctgcgtgtggccgagatgagccgagcccaggcccgcgctgaggaggacgcccagcgcttccggaagcaggcggaggagatcggtgagaagctgcaccgcacggagctcgccacccaggagaaggtgaccctggtgcagacactggagatccagcgacagcagagtgaccatgatgccgagcgcctgcgggaggccatcgctgagctggagcgtgagaaggagaagctccaacaggaggccaaactgctgcagctcaagtctgaggagatgcagacggtgcagcaggagcagctgctgcaggagacgcaggccctgcagcaaagcttcctctctgaaaaggacagcctgctacagcgggagcgcttcatcgagcaggagaaggccaagctggagcagctcttccaggacgaggtggccaaggcacagcagctgcgtgaggagcagcagcggcagcagcagcagatggagcaggaacggcagcggctggtggccagcatggaggaggcgcggcggcggcagcatgaggccgaggagggcgtgcggcgcaagcaggaggagctgcagcagctggagcagcagcggcggcagcaggaggagctgctggctgaggagaaccagaggctgcgtgagcagctgcagctcctggaggagcagcaccgggccgcgctggcgcactcagaggaggtcactgcctcgcaggtggctgccacaaagaccctgcccaatggccgggatgcacttgatggccccgcggcagaggcagagccggagcacagcttcgatggcctgcggcggaaggtgtcagctcagaggctgcaggaggccggcatcctgagtgcggaggagctgcagcggttggcgcagggccacaccacggtggacgagctcgcacggcgggaagacgtgcgccactacctgcagggccgcagcagtatcgcagggctgttgctgaaggccaccaatgagaagctgagtgtttacgccgccctgcagaggcagctgctgagtcccggcacggccctcatcctgctggaggcgcaggcggcctcaggcttcctgctggaccctgtgcggaaccggcggctgaccgtcaacgaggctgtgaaggagggtgtggtgggccccgagctgcaccacaagctgctgtcggccgagcgcgccgtcactggctacaaggacccctacactggccagcagatctctctcttccaagccatgcagaagggcctcatcgtccgggagcacggcatccgcctgctggaggcccagatcgccacgggcggcgttatcgaccccgtgcacagccaccgcgtgcccgtggacgtggcctaccggcgcggctacttcgacgaggagatgaaccgcgtcctggcggaccccagcgacgacaccaagggcttctttgaccccaacacgcacgagaacctcacgtacctgcagctactggagcgctgcgtggaggaccccgagacgggcctgtgccttctgccactcacggataaggctgccaagggcggggagctggtctacactgactccgaggcccgggacgtctttgagaaggccaccgtgtctgcgccgttcggcaagttccagggcaagacggtgaccatttgggagatcatcaactcggaatacttcacggcagagcagcggcgggacctgctgcggcagttccgcacgggccggatcacagtggagaagatcatcaagatcatcatcacggtggtggaggagcaggagcagaagggccggctttgctttgagggcctgcgcagcctggtgccagccgccgagctgctggagagcagggtcatcgaccgcgagctctaccagcagctgcagcgaggtgagcgctctgtgcgagacgtagccgaggtggacactgtgcggcgggctctccggggtgccaacgtcatcgcgggtgtatggctggaggaggcggggcagaagctgagtatctacaatgccctgaagaaagacctgctgccatccgacatggccgtggccctgttggaagcccaggccggcaccgggcacatcatcgaccccgccaccagcgcccggctgaccgtggacgaggcagtgcgtgctggcctggtgggccccgagtttcatgagaagctgctatcagccgagaaggctgtgacagggtacagggacccctacacagggcagagcgtctccctgttccaggccctgaagaagggcctcattccccgggagcagggcctgcgcctgttggacgcccagctgtccacgggcggcatcgtggaccccagcaagagccaccgcgtgcccctggatgtcgcctgcgcccgaggctgcctggatgaggagaccagcagggccctgtcggcaccaagggccgacgccaaggcctacagtgaccccagcacaggggagccggccacctacggcgagctccagcagcggtgccggcccgaccagctgaccgggctgagcctgctgccgctctcagaaaaggctgctcgggcccggcaggaggagctctactcagagctgcaggcccgtgagacctttgaaaagaccccggttgaggtccccgtgggtggcttcaagggcaggacggtgacggtgtgggagctcatcagctctgagtacttcactgcggagcagcggcaggagctgttgcgtcagttccgcacgggcaaggtcaccgtggagaaggtcatcaagattctcattaccatcgtggaggaggtggagaccctgcggcaggagaggctgtccttcagcggcctccgtgcccctgtgccagccagcgagctcctggcttccggggtcctcagcagagcccagtttgagcagctcaaggacggcaagacgacggtcaaggacctttcggagctgggctccgtgcggacgctgctgcagggcagtggctgcctcgccggcatctacctggaggacaccaaggagaaggtgtccatctacgaggccatgcgccggggcctgctgagagccacaacggctgcgctcctgctggaggcgcaggcggccactggcttcctggtggaccccgtgcggaaccagcgcctgtatgtccacgaggccgtgaaggcgggcgtggtgggccccgagcttcacgagcagctgctgtctgccgagaaggccgtcaccggctacagagacccctactcgggcagcaccatctccctcttccaggccatgcagaagggcctggttctccggcagcacggcatccgcctgctggaggcccagatcgccacgggcggcatcatcgaccccgtgcacagccaccgcgtgcctgtggacgtggcctaccagcgcggctacttcagtgaggagatgaaccgcgtcctggcggaccccagcgacgacaccaagggcttctttgaccccaacacgcatgagaacctcacgtacaggcagctgctggagcggtgcgtggaggaccccgagacgggcttgcgccttctgccactgaaaggggcggagaaggctgaggtggtggagaccacgcaggtgtacactgaggaggagacaagaagggcatttgaagagacacagatcgacattcccggcggcggcagccacggcggctccaccatgtccctgtgggaggtgatgcagtcggacctgatccccgaggagcagcgggcccagctgatggctgacttccaggccggccgggtgaccaaggaacgcatgatcatcatcatcatcgagatcattgagaagacagagatcatccgccagcagggtctggcctcctacgactacgtgcgccgccgcctcacggctgaggacctgttcgaggctcggatcatctctctcgagacctacaacctgctccgggagggcaccaggagcctccgtgaggctctcgaggcggagtccgcctggtgctacctctatggcacgggctccgtggctggtgtctacctgcccggttccaggcagacactgagcatctaccaggctctcaagaaagggctgctgagtgccgaggtggcccgcctgctgctggaggcacaggcagccacaggcttcctgctggacccggtgaagggggagcggctgactgtggatgaggctgtgcggaagggcctcgtggggcccgagctgcacgaccgcctgctctcggctgagcgggcggtcaccggctaccgtgacccctacaccgagcagaccatctcgctcttccaggccatgaagaaggagctgatccctactgaggaggccctgcggctgctggatgcccagctggccaccggcggcatcgtggacccccgcctgggcttccaccttcccctggaggtggcttaccagcgtggctacctcaacaaggacacgcacgaccagctgtcagagcccagcgaggtgcgcagctacgtggacccgtccaccgacgagcgcctcagctacacgcagctgctcaggcggtgccgtcgtgacgacggcaccggccagctgctcctgccactgtcggacgcccgcaagctgaccttccgtggcctgcggaagcagatcaccatggaggagctggtgcgctcgcaggtcatggacgaggccacggcgctgcagctgcgggagggcctgacctccatcgaggaggtcaccaagaacttgcagaagttcctggaaggcaccagctgcatcgctggtgtcttcgtggacgccaccaaggaacggctctcggtgtaccaggccatgaagaagggcatcatccgccccggcacagcctttgagctcctggaggcgcaggcggccaccggttacgtcatcgaccccatcaagggactgaagctgacggtggaggaggctgtgcgtatgggcattgtgggccccgagttcaaggacaagctgctgtcggccgagcgcgccgtcactgggtacaaggacccctactctgggaagctcatctccctcttccaggccatgaagaagggcctgatcctgaaggaccatggcatccgcctgctggaggcccagatcgccacgggcggcatcatcgaccctgaggagagccaccggctgcccgtggaggtggcctacaagcgcggcctcttcgatgaggagatgaacgagatcctgaccgacccctcggacgacaccaagggcttctttgaccctaacacggaggagaacctcacctacctgcagctgatggagcgttgtatcactgacccccagacgggcctgtgtctcttgccgctgaaggagaagaagcgggagcggaagacgtcctccaagtcctccgtgcgcaagcgccgagtggtcatcgtggaccccgagacgggcaaggagatgtcagtgtacgaggcctaccgcaagggcctgattgaccaccagacgtacctggagctgtccgagcaggagtgcgagtgggaggagatcaccatctcctcctcggacggcgtggtcaagtccatgatcatcgaccgccgctccgggcgccagtacgacatcgatgatgccatcgccaagaacctcatcgaccgctcggcactggaccagtaccgcgccggcacgctctccatcaccgagttcgccgacatgctctcgggcaacgccggtggtttccgctcccgttcctcctcggtgggatcctcctcctcctaccccatcagccccgccgtctccaggacccagctggcctcctggtcagaccccactgaggagacgggccccgtggctggcatcctggacacggagacgctggagaaggtgtccatcaccgaggccatgcaccggaacctggtggataacatcacggggcagcggctgctggaggcgcaggcctgcaccgggggcatcatcgaccccagcaccggtgagcgcttccctgtcaccgacgccgtcaacaagggcctggtggacaagatcatggtggaccgcatcaacctggcccagaaggccttctgcggcttcgaggacccacgcaccaagaccaagatgtcggccgcccaggccctgaagaagggctggctctactacgaggccggccagcgcttcctggaggtgcagtacctgaccggcggcttgatcgagcccgacacgccgggccgcgtgcccctggacgaggccctgcagcgcggcacggtggacgcccgcaccgcacagaagctgcgtgacgtgggcgcctactccaagtacctcacctgccctaagaccaagctcaagatctcctataaggacgcgctggaccgcagcatggtggaggagggcacggggctgcggctgctggaggctgccgcgcagtccaccaagggctactacagcccctacagcgtcagcggctccggctctaccgctggctcccgcaccggctcgcgcaccggctcccgggccggctcccgccgcggcagctttgacgccaccggctccggcttctccatgaccttctcttcatcctcctactcctcctcgggctacggccgccgctacgcctcggggtcctcggcctccctggggggccctgagtctgccgtggcctgaggctgcctgcgcccaccccgctctgcatgcggcccagcccggctcccaccgaggcgcgggggccgttttcaacgcttaaaggtgtcttcctcccaagtggtgcctaaagtttaaccaaaaagaccagactaatatattaatatatatctgctgtccagacagcctgtatcttgggggacagggctggcccagccctgctggccgcctcaccccctcgggtctcctcactcccttctacctgccactcacacagccaggtgccttggagggtcccaagctgggccccagcccaccctcctgtcttcccagggtagcccgcctgccagtcctagctgcacagggcagctgggcccaaccctgtctgtagagggccctggtgtttctagcactggcctgcacggtgggccttgctggggacggggggccccagtcagcctctctcccagtctacccagagaagccccttccccatgggaagacgaggccctcgggcccagcccccacagtgctgtctgatctgtgctttccagctcaccccccacactcactcctgagacccctggcctccggcgtcagcctccagcctctgttcccctagtaagtgccttccatgtcggcctctaaccccaggccccgaggacccagacccagtggggaggcggacgttccagccggcatggctgggaactgcagacctgtcctcctggtgggtccaggggcccctccagcttgtggagccccacactggggtgccgcctgcccgtctctctcccatggagccccagccccctttgggcccagggacaccagccaggctctgtgctgaccctcctgttgcacccagccctggtctcagcagcgaccacccctgcctccaccctctgagctttgcatgttccactaaccccgggcgggtggcaggtggaggtgtcaggctgctggcgcctctgcaagggcagaacactaacctgaccgtgggcggggccttgcggtatccgcccccaataaaagcaattccaaccttgtggccggcatgtcgggggcggggggcgcctttgcctcgccgagggaggtcttgctggagcggccgtgctggctggacgggggctgcgagccggcccgcaggggctacctctaccagcagctgtgctgcgtagatgagcgggatcgtgtgcagaagaaaaccttcaccaagtgggtcaacaagcacctcatcaaggcccagaggcacatcagtgacctgtatgaagacctccgcgatggccacaacctcatctccctgctggaggtcctctcgggggacagcctgccccgggagaaggggaggatgcgtttccacaagctgcagaatgtccagattgccctggactacctccggcaccgccaggtgaagctggtgaacatcaggaatgatgacatcgctgacggcaaccccaagctgacccttggcctcatctggacaatcattctgcacttccagatctcagatatccaggtgagtgggcagtcggaggacatgacggccaaggagaagctgctgctgtggtcgcagcgaatggtggaggggtaccagggcctgcgatgcgacaacttcacctccagctggagagacggccgcctcttcaatgccatcatccaccggcacaagcccctgctcatcgacatgaacaaggtgtaccggcagaccaacctggagaacctggaccaggccttctctgtggcggagcgggacctgggagtgacgcggctcctggaccctgaggacgtggatgtccctcagcccgacgagaagtccatcatcacctacgtctcgtcgctgtatgacgccatgccccgcgtgccggacgtgcaggatggggtgagggccaacgagctgcagctgcgctggcaggagtaccgggagctggtgctgctgctgcttcagtggatgcgacaccacacggccgcctttgaggaacgcaggttcccctccagcttcgaggagattgagatcctgtggtctcagttcctgaagtttaaggagatggagctaccagccaaggaggccgacaagaacaggtccaagggcatctaccaatccctggagggagcggtgcaagcaggccagctcaaggtgccccctggctaccacccgctggatgtggagaaggagtggggcaagctgcacgtggccatcctggagcgggagaagcagctccgcagcgagtttgagaggctggagtgtcttcagcgcatcgtgaccaagctgcagatggaggcggggctgtgtgaggagcagctgaaccaggccgacgccctgctgcagtcggatgtccggctgctggctgcaggcaaagtgccacagcgggcgggggaggtggaacgggacttggacaaggcggatagcatgatccggctgctcttcaacgacgtgcagaccctcaaggatggacggcacccgcagggcgagcagatgtaccgcagggtgtaccgtctgcacgagcgcctggtagccatccgcaccgagtacaacctacggctgaaggcaggcgtggcggcccctgcaacccaggtggcccaggtgactctgcagagtgtgcagaggcgccccgagctggaggactccactctgcgctacctgcaggacctgctggcctgggtggaggagaaccagcaccgtgtggatggcgctgagtggggtgtggacctgcccagcgtggaggcgcagctgggcagccaccgaggcctgcaccagtccatcgaagaattccgggccaagatcgagcgggcacggagtgacgagggccagctctcccccgccacccggggtgcctaccgtgactgcctgggtcggctggacctgcagtacgccaagctgctgaactcctccaaggcccgcctcaggtccctggagagcttgcacagctttgtggcagccgccactaaggagctaatgtggctgaatgagaaggaggaggaggaggtgggcttcgactggagcgaccgcaacaccaacatgaccgccaagaaggagagctactcggcgctgatgcgggagctggagctgaaggagaagaagatcaaggagctccaaaatgctggggaccggctgctgcgggaggaccacccggcccggcccacggtggagtccttccaggcggccctgcagacgcagtggagctggatgctacagctgtgctgctgtatcgaggcacacctgaaggagaacgctgcctactttcagttcttctcagatgtgcgggaggccgaggggcagttgcagaagctgcaggaggcactgcgtaggaaatacagttgtgatcgctccgccaccgtcacccggctggaggacctgctgcaggatgcccaggacgagaaggaacagctgaacgagtacaagggccacctctcaggcctggccaagcgggccaaggccgtcgtgcagctgaagccccgccacccagcccaccccatgcggggccgcctgcccctgctggccgtgtgcgactataagcaggtggaggtgactgtgcacaagggtgacgagtgccagctggtgggccctgcacagccgtcccactggaaggtgctcagcagctccggcagcgaggccgccgtgccctccgtgtgcttcctggtgcccccgcccaaccaggaggcccaggaggccgtca

SEQ ID NO: 646 - DNA, 32765 bp, Homo sapiens
  misc_feature (212)..(212): second gene starts at position 212
atgttcagctttgtggacctccggctcctgctcctcttagcggccaccgccctcctgacgcacggccaagaggaaggccaagtcgagggccaagacgaagacatcccaccaatcacctgcgtacagaacggcctcaggtaccatgaccgagacgtgtggaaacccgagccctgccggatctgcgtctgcgacaacggcaaggtgttgtgcgatgacgtgatctgtgacgagaccaagaactgccccggcgccgaagtccccgagggcgagtgctgtcccgtctgccccgacggctcagagtcacccaccgaccaagaaaccaccggcgtcgagggacccaagggagacactggcccccgaggcccaaggggacccgcaggcccccctggccgagatggcatccctggacagcctggacttcccggaccccccggaccccccggacctcccggaccccctggcctcggaggaaactttgctccccagctgtcttatggctatgatgagaaatcaaccggaggaatttccgtgcctggccccatgggtccctctggtcctcgtggtctccctggcccccctggtgcacctggtccccaaggcttccaaggtccccctggtgagcctggcgagcctggagcttcaggtcccatgggtccccgaggtcccccaggtccccctggaaagaatggagatgatggggaagctggaaaacctggtcgtcctggtgagcgtgggcctcctgggcctcagggtgctcgaggattgcccggaacagctggcctccctggaatgaagggacacagaggtttcagtggtttggatggtgccaagggagatgctggtcctgctggtcctaagggtgagcctggcagccctggtgaaaatggagctcctggtcagatgggcccccgtggcctgcctggtgagagaggtcgccctggagcccctggccctgctggtgctcgtggaaatgatggtgctactggtgctgccgggccccctggtcccaccggccccgctggtcctcctggcttccctggtgctgttggtgctaagggtgaagctggtccccaagggccccgaggctctgaaggtccccagggtgtgcgtggtgagcctggcccccctggccctgctggtgctgctggccctgctggaaaccctggtgctgatggacagcctggtgctaaaggtgccaatggtgctcctggtattgctggtgctcctggcttccctggtgcccgaggcccctctggaccccagggccccggcggccctcctggtcccaagggtaacagcggtgaacctggtgctcctggcagcaaaggagacactggtgctaagggagagcctggccctgttggtgttcaaggaccccctggccctgctggagaggaaggaaagcgaggagctcgaggtgaacccggacccactggcctgcccggaccccctggcgagcgtggtggacctggtagccgtggtttccctggcgcagatggtgttgctggtcccaagggtcccgctggtgaacgtggttctcctggccctgctggccccaaaggatctcctggtgaagctggtcgtcccggtgaagctggtctgcctggtgccaagggtctgactggaagccctggcagccctggtcctgatggcaaaactggcccccctggtcccgccggtcaagatggtcgccccggacccccaggcccacctggtgcccgtggtcaggctggtgtgatgggattccctggacctaaaggtgctgctggagagcccggcaaggctggagagcgaggtgttcccggaccccctggcgctgtcggtcctgctggcaaagatggagaggctggagctcagggaccccctggccctgctggtcccgctggcgagagaggtgaacaaggccctgctggctcccccggattccagggtctccctggtcctgctggtcctccaggtgaagcaggcaaacctggtgaacagggtgttcctggagaccttggcgcccctggcccctctggagcaagaggcgagagaggtttccctggcgagcgtggtgtgcaaggtccccctggtcctgctggtccccgaggggccaacggtgctcccggcaacgatggtgctaagggtgatgctggtgcccctggagctcccggtagccagggcgcccctggccttcagggaatgcctggtgaacgtggtgcagctggtcttccagggcctaagggtgacagaggtgatgctggtcccaaaggtgctgatggctctcctggcaaagatggcgtccgtggtctgactggccccattggtcctcctggccctgctggtgcccctggtgacaagggtgaaagtggtcccagcggccctgctggtcccactggagctcgtggtgcccccggagaccgtggtgagcctggtccccccggccctgctggctttgctggcccccctggtgctgacggccaacctggtgctaaaggcgaacctggtgatgctggtgctaaaggcgatgctggtccccctggccctgccggacccgctggaccccctggccccattggtaatgttggtgctcctggagccaaaggtgctcgcggcagcgctggtccccctggtgctactggtttccctggtgctgctggccgagtcggtcctcctggcccctctggaaatgctggaccccctggccctcctggtcctgctggcaaagaaggcggcaaaggtccccgtggtgagactggccctgctggacgtcctggtgaagttggtccccctggtccccctggccctgctggcgagaaaggatcccctggtgctgatggtcctgctggtgctcctggtactcccgggcctcaaggtattgctggacagcgtggtgtggtcggcctgcctggtcagagaggagagagaggcttccctggtcttcctggcccctctggtgaacctggcaaacaaggtccctctggagcaagtggtgaacgtggtccccctggtcccatgggcccccctggattggctggaccccctggtgaatctggacgtgagggggctcctggtgccgaaggttcccctggacgagacggttctcctggcgccaagggtgaccgtggtgagaccggccccgctggaccccctggtgctcctggtgctcctggtgcccctggccccgttggccctgctggcaagagtggtgatcgtggtgagactggtccgtgtgcgactataagcaggtggaggtgactgtgcacaagggtgacgagtgccagctggtgggccctgcacagccgtcccactggaaggtgctcagcagctccggcagcgaggccgccgtgccctccgtgtgcttcctggtgcccccgcccaaccaggaggcccaggaggccgtcaccaggctggaggcccagcaccaggccctggtcacgctgtggcaccagttgcacgtggacatgaagagccttctggcctggcagagccttcgccgcgacgtgcagctcatccgctcctggtccctggccacgttccgcaccctgaagccagaggagcagcgccaagccctgcacagcctggagctgcactaccaggccttcctgcgggacagccaggacgcgggcggcttcggacccgaggaccggctgatggctgagcgcgagtacggctcctgcagccaccactaccagcagctgctgcagagcctggaacagggtgcacaggaagagtctcgctgccagcgctgcatctccgagctcaaagacatccggctgcagctggaggcctgtgagacgcgcaccgtgcaccgcctgcggctgccgctggacaaagagccggcacgggagtgtgcccagcgcatcgccgagcagcagaaggcacaggcagaggtggaggggctgggcaagggggtcgcccggctctctgccgaggccgagaaggtcttggccctaccagagccatcgcctgcggcccccacgctgcgctcggagctggagctgacgctgggcaagctggagcaggtccgcagcctgtctgccatctacctggagaagctcaagaccatcagcctggtgatccgcggcacgcagggggccgaggaggtgctcagggcccacgaggagcagctcaaggaggcccaggccgtgccggccaccctcccggagctcgaggccaccaaggcctctctgaagaagctgcgggcccaggccgaggcacagcagcccacgttcgacgccctgcgggatgagctgcggggggcacaggaggtgggggagcgactgcagcagcggcacggggagcgggacgtggaggtggagcgctggcgggagcgggtcgcccagttgcttgagcgctggcaggctgtgctggcccagaccgacgtgcggcagcgcgagctcgagcaactgggccgccagctgcgttactaccgcgagagtgcagaccccttgggcgcctggctgcaggacgccaggcggcggcaggagcagatccaggccatgccgctggccgacagccaggctgtgcgggagcagctgcggcaggagcaggccctgctggaggagatcgagcgccacggcgagaaggtcgaggagtgccagaggtttgcgaaacagtacatcaacgccatcaaggactatgaactccagctggtgacgtacaaggcgcagcttgagccggtggcctccccggccaagaagcccaaggtccagtcgggatcagagagtgtcatccaggagtacgtggacctgcgtacgcactacagcgagctgaccacactgacgagccagtacatcaagttcatcagcgagactctgcggcgcatggaggaggaggagaggctggctgagcagcagcgggcagaggagcgcgagcggctggccgaggtggaggccgcgctggagaagcagcggcagctggccgaggcgcacgcccaggcaaaggcacaggcggagcgggaggcgaaggagctgcagcagcgcatgcaggaggaggtggtgcggcgggaggaggcggcggtggacgcgcagcagcagaagcgcagcattcaggaggagctgcagcagctgcggcagagctcggaggcggagatccaggccaaggcccggcaggcagaggcggctgagcgcagccggctgcgcatcgaggaggagatccgcgtggtgcgcctgcagttggaggccaccgagcgccagcgtggcggggctgagggggagctgcaggcactgcgtgcacgggcggaggaggctgaggcacaaaagcgacaggcgcaggaggaggccgagcgcttgcggaggcaggtgcaggacgagagccagcgtaagcggcaggcggaggtggagctggcctcgcgcgtgaaggccgaggccgaggcggcgcgcgagaagcagcgggccctgcaggccctggaggagctgcggctgcaggcggaggaggcggagcggcgcctgcggcaggccgaggtggagcgagcgcggcaggtacaggtggccctggagacggcgcagcgcagtgcagaggcggagctgcagagcaaacgcgcctccttcgccgagaagacggcacagctggagcgctccctgcaggaggaacacgtggctgtggcacagctgcgggaggaggctgagcggcgggcacagcagcaggccgaggccgagcgggcgcgcgaggaggcagagcgggagctggagcgctggcagctcaaggccaacgaggcgctacggctgcggctgcaggcggaggaggtggcgcagcagaagagcctggcgcaggccgaggctgagaagcagaaggaggaggcggagcgcgaggcgcggcggcgcggcaaggcggaggagcaggccgtccggcagcgggagctggctgaacaagagctggagaagcagcggcagctggcggaaggcaccgcgcagcagcgcctggccgcggagcaggagttgatccggctgcgggccgagacggagcagggggagcagcagcggcagctgctggaggaggagctggcccggctgcagcgtgaggcggctgcagccacgcagaaacggcaggagctggaagccgagctggccaaggtgcgggccgagatggaggtgctgctggccagcaaggcgagggctgaggaggagtcgcgctccaccagcgagaagtccaagcagaggctggaggccgaggccggccggttccgcgagctggccgaggaggccgcccgcctgcgtgccctggcggaagaggccaagcggcagcggcagctggccgaggaagacgcggcgcggcagcgggccgaggcggagcgggtgcttgcggagaagctggccgccatcggcgaggccacgcggctcaagacggaggcggagatcgcgctcaaggagaaggaggcggagaacgagcgcctgcggcggctggcggaggacgaggccttccagcggcggcggctggaggagcaggccgcgcaacacaaggctgacatcgaggagcgcctggcccagctgcgcaaggcatcggacagcgagctggagcggcagaaggggctggtggaggacacgctgaggcagcggcggcaggtggaggaggagatcctggcgctgaaggcgagcttcgagaaggcggccgctggcaaggcggagctggagctggagctgggacgcatccgcagcaacgcggaggacacgctgcgcagcaaggagcaggccgagctggaggctgcgaggcagcggcagctggcggcggaggaggagcggcggcgccgtgaggctgaggagcgcgtgcagaagagcctggcggccgaggaggaggccgcacggcagcggaaggcggcgctggaggaagtcgagcggctgaaagccaaggtggaggaggcgcggcgcctgcgggagcgagcggagcaggagtcggcgcggcagctgcagctggcccaggaggccgcccagaagcggctgcaggcggaagagaaggcacacgccttcgcggtgcagcagaaggagcaggagctacagcagacgctgcagcaggagcagagcgtgctggaccagctgcgcggcgaggcggaggcggcccggcgggcggctgaggaggcggaggaggcccgggtgcaggcggagcgtgaggcggcgcagtcccggcggcaggtggaagaggccgagcggctgaagcagtcggcagaggagcaggcacaggcccgggctcaggcacaggcggctgcagagaagctgcgcaaggaggccgagcaagaggcggcgcggcgggcacaggcggagcaggcggccctgcggcagaagcaggcagctgacgcggagatggagaagcataagaaattcgccgagcagacgctgcggcagaaggcgcaggtggagcaggagctgacaacactgcggctgcagctggaggagaccgaccaccagaagaacctgctggacgaggagctgcagcggctgaaggcggaggccacggaggccgcacgccagcgcagccaggtggaggaggagctcttctcggtgcgcgtgcagatggaggagctgagcaagctcaaggcacgcatcgaggctgagaaccgcgcactcatcttgcgtgacaaggacaatacgcagcgcttcctgcaggaggaggctgagaagatgaagcaggtggcggaggaggccgcgcggctgagtgtggcggcccaagaggctgcgcgactgcggcagctggcagaggaggacctggcacagcagcgggccttggcagagaagatgctcaaggagaagatgcaggcggtgcaggaggccacgcgactcaaggctgaggcggaactgctgcagcagcagaaggagcttgcgcaggagcaggcgcggcggctgcaggaggacaaggagcagatggcgcagcagctggcggaggagacgcagggcttccagcggacgctggaggccgagcggcagcggcagctggagatgagcgctgaggctgagcgcctcaagctgcgtgtggccgagatgagccgagcccaggcccgcgctgaggaggacgcccagcgcttccggaagcaggcggaggagatcggtgagaagctgcaccgcacggagctcgccacccaggagaaggtgaccctggtgcagacactggagatccagcgacagcagagtgaccatgatgccgagcgcctgcgggaggccatcgctgagctggagcgtgagaaggagaagctccaacaggaggccaaactgctgcagctcaagtctgaggagatgcagacggtgcagcaggagcagctgctgcaggagacgcaggccctgcagcaaagcttcctctctgaaaaggacagcctgctacagcgggagcgcttcatcgagcaggagaaggccaagctggagcagctcttccaggacgaggtggccaaggcacagcagctgcgtgaggagcagcagcggcagcagcagcagatggagcaggaacggcagcggctggtggccagcatggaggaggcgcggcggcggcagcatgaggccgaggagggcgtgcggcgcaagcaggaggagctgcagcagctggagcagcagcggcggcagcaggaggagctgctggctgaggagaaccagaggctgcgtgagcagctgcagctcctggaggagcagcaccgggccgcgctggcgcactcagaggaggtcactgcctcgcaggtggctgccacaaagaccctgcccaatggccgggatgcacttgatggccccgcggcagaggcagagccggagcacagcttcgatggcctgcggcggaaggtgtcagctcagaggctgcaggaggccggcatcctgagtgcggaggagctgcagcggttggcgcagggccacaccacggtggacgagctcgcacggcgggaagacgtgcgccactacctgcagggccgcagcagtatcgcagggctgttgctgaaggccaccaatgagaagctgagtgtttacgccgccctgcagaggcagctgctgagtcccggcacggccctcatcctgctggaggcgcaggcggcctcaggcttcctgctggaccctgtgcggaaccggcggctgaccgtcaacgaggctgtgaaggagggtgtggtgggccccgagctgcaccacaagctgctgtcggccgagcgcgccgtcactggctacaaggacccctacactggccagcagatctctctcttccaagccatgcagaagggcctcatcgtccgggagcacggcatccgcctgctggaggcccagatcgccacgggcggcgttatcgaccccgtgcacagccaccgcgtgcccgtggacgtggcctaccggcgcggctacttcgacgaggagatgaaccgcgtcctggcggaccccagcgacgacaccaagggcttctttgaccccaacacgcacgagaacctcacgtacctgcagctactggagcgctgcgtggaggaccccgagacgggcctgtgccttctgccactcacggataaggctgccaagggcggggagctggtctacactgactccgaggcccgggacgtctttgagaaggccaccgtgtctgcgccgttcggcaagttccagggcaagacggtgaccatttgggagatcatcaactcggaatacttcacggcagagcagcggcgggacctgctgcggcagttccgcacgggccggatcacagtggagaagatcatcaagatcatcatcacggtggtggaggagcaggagcagaagggccggctttgctttgagggcctgcgcagcctggtgccagccgccgagctgctggagagcagggtcatcgaccgcgagctctaccagcagctgcagcgaggtgagcgctctgtgcgagacgtagccgaggtggacactgtgcggcgggctctccggggtgccaacgtcatcgcgggtgtatggctggaggaggcggggcagaagctgagtatctacaatgccctgaagaaagacctgctgccatccgacatggccgtggccctgttggaagcccaggccggcaccgggcacatcatcgaccccgccaccagcgcccggctgaccgtggacgaggcagtgcgtgctggcctggtgggccccgagtttcatgagaagctgctatcagccgagaaggctgtgacagggtacagggacccctacacagggcagagcgtctccctgttccaggccctgaagaagggcctcattccccgggagcagggcctgcgcctgttggacgcccagctgtccacgggcggcatcgtggaccccagcaagagccaccgcgtgcccctggatgtcgcctgcgcccgaggctgcctggatgaggagaccagcagggccctgtcggcaccaagggccgacgccaaggcctacagtgaccccagcacaggggagccggccacctacggcgagctccagcagcggtgccggcccgaccagctgaccgggctgagcctgctgccgctctcagaaaaggctgctcgggcccggcaggaggagctctactcagagctgcaggcccgtgagacctttgaaaagaccccggttgaggtccccgtgggtggcttcaagggcaggacggtgacggtgtgggagctcatcagctctgagtacttcactgcggagcagcggcaggagctgttgcgtcagttccgcacgggcaaggtcaccgtggagaaggtcatcaagattctcattaccatcgtggaggaggtggagaccctgcggcaggagaggctgtccttcagcggcctccgtgcccctgtgccagccagcgagctcctggcttccggggtcctcagcagagcccagtttgagcagctcaaggacggcaagacgacggtcaaggacctttcggagctgggctccgtgcggacgctgctgcagggcagtggctgcctcgccggcatctacctggaggacaccaaggagaaggtgtccatctacgaggccatgcgccggggcctgctgagagccacaacggctgcgctcctgctggaggcgcaggcggccactggcttcctggtggaccccgtgcggaaccagcgcctgtatgtccacgaggccgtgaaggcgggcgtggtgggccccgagcttcacgagcagctgctgtctgccgagaaggccgtcaccggctacagagacccctactcgggcagcaccatctccctcttccaggccatgcagaagggcctggttctccggcagcacggcatccgcctgctggaggcccagatcgccacgggcggcatcatcgaccccgtgcacagccaccgcgtgcctgtggacgtggcctaccagcgcggctacttcagtgaggagatgaaccgcgtcctggcggaccccagcgacgacaccaagggcttctttgaccccaacacgcatgagaacctcacgtacaggcagctgctggagcggtgcgtggaggaccccgagacgggcttgcgccttctgccactgaaaggggcggagaaggctgaggtggtggagaccacgcaggtgtacactgaggaggagacaagaagggcatttgaagagacacagatcgacattcccggcggcggcagccacggcggctccaccatgtccctgtgggaggtgatgcagtcggacctgatccccgaggagcagcgggcccagctgatggctgacttccaggccggccgggtgaccaaggaacgcatgatcatcatcatcatcgagatcattgagaagacagagatcatccgccagcagggtctggcctcctacgactacgtgcgccgccgcctcacggctgaggacctgttcgaggctcggatcatctctctcgagacctacaacctgctccgggagggcaccaggagcctccgtgaggctctcgaggcggagtccgcctggtgctacctctatggcacgggctccgtggctggtgtctacctgcccggttccaggcagacactgagcatctaccaggctctcaagaaagggctgctgagtgccgaggtggcccgcctgctgctggaggcacaggcagccacaggcttcctgctggacccggtgaagggggagcggctgactgtggatgaggctgtgcggaagggcctcgtggggcccgagctgcacgaccgcctgctctcggctgagcgggcggtcaccggctaccgtgacccctacaccgagcagaccatctcgctcttccaggccatgaagaaggagctgatccctactgaggaggccctgcggctgctggatgcccagctggccaccggcggcatcgtggacccccgcctgggcttccaccttcccctggaggtggcttaccagcgtggctacctcaacaaggacacgcacgaccagctgtcagagcccagcgaggtgcgcagctacgtggacccgtccaccgacgagcgcctcagctacacgcagctgctcaggcggtgccgtcgtgacgacggcaccggccagctgctcctgccactgtcggacgcccgcaagctgaccttccgtggcctgcggaagcagatcaccatggaggagctggtgcgctcgcaggtcatggacgaggccacggcgctgcagctgcgggagggcctgacctccatcgaggaggtcaccaagaacttgcagaagttcctggaaggcaccagctgcatcgctggtgtcttcgtggacgccaccaaggaacggctctcggtgtaccaggccatgaagaagggcatcatccgccccggcacagcctttgagctcctggaggcgcaggcggccaccggttacgtcatcgaccccatcaagggactgaagctgacggtggaggaggctgtgcgtatgggcattgtgggccccgagttcaaggacaagctgctgtcggccgagcgcgccgtcactgggtacaaggacccctactctgggaagctcatctccctcttccaggccatgaagaagggcctgatcctgaaggaccatggcatccgcctgctggaggcccagatcgccacgggcggcatcatcgaccctgaggagagccaccggctgcccgtggaggtggcctacaagcgcggcctcttcgatgaggagatgaacgagatcctgaccgacccctcggacgacaccaagggcttctttgaccctaacacggaggagaacctcacctacctgcagctgatggagcgttgtatcactgacccccagacgggcctgtgtctcttgccgctgaaggagaagaagcgggagcggaagacgtcctccaagtcctccgtgcgcaagcgccgagtggtcatcgtggaccccgagacgggcaaggagatgtcagtgtacgaggcctaccgcaagggcctgattgaccaccagacgtacctggagctgtccgagcaggagtgcgagtgggaggagatcaccatctcctcctcggacggcgtggtcaagtccatgatcatcgaccgccgctccgggcgccagtacgacatcgatgatgccatcgccaagaacctcatcgaccgctcggcactggaccagtaccgcgccggcacgctctccatcaccgagttcgccgacatgctctcgggcaacgccggtggtttccgctcccgttcctcctcggtgggatcctcctcctcctaccccatcagccccgccgtctccaggacccagctggcctcctggtcagaccccactgaggagacgggccccgtggctggcatcctggacacggagacgctggagaaggtgtccatcaccgaggccatgcaccggaacctggtggataacatcacggggcagcggctgctggaggcgcaggcctgcaccgggggcatcatcgaccccagcaccggtgagcgcttccctgtcaccgacgccgtcaacaagggcctggtggacaagatcatggtggaccgcatcaacctggcccagaaggccttctgcggcttcgaggacccacgcaccaagaccaagatgtcggccgcccaggccctgaagaagggctggctctactacgaggccggccagcgcttcctggaggtgcagtacctgaccggcggcttgatcgagcccgacacgccgggccgcgtgcccctggacgaggccctgcagcgcggcacggtggacgcccgcaccgcacagaagctgcgtgacgtgggcgcctactccaagtacctcacctgccctaagaccaagctcaagatctcctataaggacgcgctggaccgcagcatggtggaggagggcacggggctgcggctgctggaggctgccgcgcagtccaccaagggctactacagcccctacagcgtcagcggctccggctctaccgctggctcccgcaccggctcgcgcaccggctcccgggccggctcccgccgcggcagctttgacgccaccggctccggcttctccatgaccttctcttcatcctcctactcctcctcgggctacggccgccgctacgcctcggggtcctcggcctccctggggggccctgagtctgccgtggcctgaggctgcctgcgcccaccccgctctgcatgcggcccagcccggctcccaccgaggcgcgggggccgttttcaacgcttaaaggtgtcttcctcccaagtggtgcctaaagtttaaccaaaaagaccagactaatatattaatatatatctgctgtccagacagcctgtatcttgggggacagggctggcccagccctgctggccgcctcaccccctcgggtctcctcactcccttctacctgccactcacacagccaggtgccttggagggtcccaagctgggccccagcccaccctcctgtcttcccagggtagcccgcctgccagtcctagctgcacagggcagctgggcccaaccctgtctgtagagggccctggtgtttctagcactggcctgcacggtgggccttgctggggacggggggccccagtcagcctctctcccagtctacccagagaagccccttccccatgggaagacgaggccctcgggcccagcccccacagtgctgtctgatctgtgctttccagctcaccccccacactcactcctgagacccctggcctccggcgtcagcctccagcctctgttcccctagtaagtgccttccatgtcggcctctaaccccaggccccgaggacccagacccagtggggaggcggacgttccagccggcatggctgggaactgcagacctgtcctcctggtgggtccaggggcccctccagcttgtggagccccacactggggtgccgcctgcccgtctctctcccatggagccccagccccctttgggcccagggacaccagccaggctctgtgctgaccctcctgttgcacccagccctggtctcagcagcgaccacccctgcctccaccctctgagctttgcatgttccactaaccccgggcgggtggcaggtggaggtgtcaggctgctggcgcctctgcaagggcagaacactaacctgaccgtgggcggggccttgcggtatccgcccccaataaaagcaattccaacctttgagctgagcctgtgccgagtgagcgtctcgtggggccgccagccttcagctgcctgtgtgccacacggggctgcccagagcaccgtgcctgaggccgagggtccgggcgacgaaggtgtgggggcagcatgtctcagcaccagctccgcgtgccgcagcccgagggcctgggccgaaagagaaccagctcggaggacaacctgtacctggctgtgctcagggcctctgagggcaagaaagatgagcgggatcgtgtgcagaagaaaaccttcaccaagtgggtcaacaagcacctcatcaaggcccagaggcacatcagtgacctgtatgaagacctccgcgatggccacaacctcatctccctgctggaggtcctctcgggggacagcctgccccgggagaaggggaggatgcgtttccacaagctgcagaatgtccagattgccctggactacctccggcaccgccaggtgaagctggtgaacatcaggaatgatgacatcgctgacggcaaccccaagctgacccttggcctcatctggacaatcattctgcacttccagatctcagatatccaggtgagtgggcagtcggaggacatgacggccaaggagaagctgctgctgtggtcgcagcgaatggtggaggggtaccagggcctgcgatgcgacaacttcacctccagctggagagacggccgcctcttcaatgccatcatccaccggcacaagcccctgctcatcgacatgaacaaggtgtaccggcagaccaacctggagaacctggaccaggccttctctgtggcggagcgggacctgggagtgacgcggctcctggaccctgaggacgtggatgtccctcagcccgacgagaagtccatcatcacctacgtctcgtcgctgtatgacgccatgccccgcgtgccggacgtgcaggatggggtgagggccaacgagctgcagctgcgctggcaggagtaccgggagctggtgctgctgctgcttcagtggatgcgacaccacacggccgcctttgaggaacgcaggttcccctccagcttcgaggagattgagatcctgtggtctcagttcctgaagtttaaggagatggagctaccagccaaggaggccgacaagaacaggtccaagggcatctaccaatccctggagggagcggtgcaagcaggccagctcaaggtgccccctggctaccacccgctggatgtggagaaggagtggggcaagctgcacgtggccatcctggagcgggagaagcagctccgcagcgagtttgagaggctggagtgtcttcagcgcatcgtgaccaagctgcagatggaggcggggctgtgtgaggagcagctgaaccaggccgacgccctgctgcagtcggatgtccggctgctggctgcaggcaaagtgccacagcgggcgggggaggtggaacgggacttggacaaggcggatagcatgatccggctgctcttcaacgacgtgcagaccctcaaggatggacggcacccgcagggcgagcagatgtaccgcagggtgtaccgtctgcacgagcgcctggtagccatccgcaccgagtacaacctacggctgaaggcaggcgtggcggcccctgcaacccaggtggcccaggtgactctgcagagtgtgcagaggcgccccgagctggaggactccactctgcgctacctgcaggacctgctggcctgggtggaggagaaccagcaccgtgtggatggcgctgagtggggtgtggacctgcccagcgtggaggcgcagctgggcagccaccgaggcctgcaccagtccatcgaagaattccgggccaagatcgagcgggcacggagtgacgagggccagctctcccccgccacccggggtgcctaccgtgactgcctgggtcggctggacctgcagtacgccaagctgctgaactcctccaaggcccgcctcaggtccctggagagcttgcacagctttgtggcagccgccactaaggagctaatgtggctgaatgagaaggaggaggaggaggtgggcttcgactggagcgaccgcaacaccaacatgaccgccaagaaggagagctactcggcgctgatgcgggagctggagctgaaggagaagaagatcaaggagctccaaaatgctggggaccggctgctgcgggaggaccacccggcccggcccacggtggagtccttccaggcggccctgcagacgcagtggagctggatgctacagctgtgctgctgtatcgaggcacacctgaaggagaacgctgcctactttcagttcttctcagatgtgcgggaggccgaggggcagttgcagaagctgcaggaggcactgcgtaggaaatacagttgtgatcgctccgccaccgtcacccggctggaggacctgctgcaggatgcccaggacgagaaggaacagctgaacgagtacaagggccacctctcaggcctggccaagcgggccaaggccgtcgtgcagctgaagccccgccacccagcccaccccatgcggggccgcctgcccctgctggccgtgtgcgactataagcaggtggaggtgactgtgcacaagggtgacgagtgccagctggtgggccctgcacagccgtcccactggaaggtgctcagcagctccggcagcgaggccgccgtgccctccgtgtgcttcctggtgcccccgcccaaccaggaggcccaggaggccgtcaccaggctggaggcccagcaccaggccctggtcacgctgtggcaccagttgcacgtggacatgaagagccttctggcctggcagagccttcgccgcgacgtgcagctcatccgctcctggtccctggccacgttccgcaccctgaagccagaggagcagcgccaagccctgcacagcctggagctgcactaccaggccttcctgcgggacagccaggacgcgggcggcttcggacccgaggaccggctgatggctgagcgcgagtacggctcctgcagccaccactaccagcagctgctgcagagcctggaacagggtgcacaggaagagtctcgctgccagcgctgcatctccgagctcaaagacatccggctgcagctggaggcctgtgagacgcgcaccgtgcaccgcctgcggctgccgctggacaaagagccggcacgggagtgtgcccagcgcatcgccgagcagcagaaggcacaggcagaggtggaggggctgggcaagggggtcgcccggctctctgccgaggccgagaaggtcttggccctaccagagccatcgcctgcggcccccacgctgcgctcggagctggagctgacgctgggcaagctggagcaggtccgcagcctgtctgccatctacctggagaagctcaagaccatcagcctggtgatccgcggcacgcagggggccgaggaggtgctcagggcccacgaggagcagctcaaggaggcccaggccgtgccggccaccctcccggagctcgaggccaccaaggcctctctgaagaagctgcgggcccaggccgaggcacagcagcccacgttcgacgccctgcgggatgagctgcggggggcacaggaggtgggggagcgactgcagcagcggcacggggagcgggacgtggaggtggagcgctggcgggagcgggtcgcccagttgcttgagcgctggcaggctgtgctggcccagaccgacgtgcggcagcgcgagctcgagcaactgggccgccagctgcgttactaccgcgagagtgcagaccccttgggcgcctggctgcaggacgccaggcggcggcaggagcagatccaggccatgccgctggccgacagccaggctgtgcgggagcagctgcggcaggagcaggccctgctggaggagatcgagcgccacggcgagaaggtcgaggagtgccagaggtttgcgaaacagtacatcaacgccatcaaggactatgaactccagctggtgacgtacaaggcgcagcttgagccggtggcctccccggccaagaagcccaaggtccagtcgggatcagagagtgtcatccaggagtacgtggacctgcgtacgcactacagcgagctgaccacactgacgagccagtacatcaagttcatcagcgagactctgcggcgcatggaggaggaggagaggctggctgagcagcagcgggcagaggagcgcgagcggctggccgaggtggaggccgcgctggagaagcagcggcagctggccgaggcgcacgcccaggcaaaggcacaggcggagcgggaggcgaaggagctgcagcagcgcatgcaggaggaggtggtgcggcgggaggaggcggcggtggacgcgcagcagcagaagcgcagcattcaggaggagctgcagcagctgcggcagagctcggaggcggagatccaggccaaggcccggcaggcagaggcggctgagcgcagccggctgcgcatcgaggaggagatccgcgtggtgcgcctgcagttggaggccaccgagcgccagcgtggcggggctgagggggagctgcaggcactgcgtgcacgggcggaggaggctgaggcacaaaagcgacaggcgcaggaggaggccgagcgcttgcggaggcaggtgcaggacgagagccagcgtaagcggcaggcggaggtggagctggcctcgcgcgtgaaggccgaggccgaggcggcgcgcgagaagcagcgggccctgcaggccctggaggagctgcggctgcaggcggaggaggcggagcggcgcctgcggcaggccgaggtggagcgagcgcggcaggtacaggtggccctggagacggcgcagcgcagtgcagaggcggagctgcagagcaaacgcgcctccttcgccgagaagacggcacagctggagcgctccctgcaggaggaacacgtggctgtggcacagctgcgggaggaggctgagcggcgggcacagcagcaggccgaggccgagcgggcgcgcgaggaggcagagcgggagctggagcgctggcagctcaaggccaacgaggcgctacggctgcggctgcaggcggaggaggtggcgcagcagaagagcctggcgcaggccgaggctgagaagcagaaggaggaggcggagcgcgaggcgcggcggcgcggcaaggcggaggagcaggccgtccggcagcgggagctggctgaacaagagctggagaagcagcggcagctggcggaaggcaccgcgcagcagcgcctggccgcggagcaggagttgatccggctgcgggccgagacggagcagggggagcagcagcggcagctgctggaggaggagctggcccggctgcagcgtgaggcggctgcagccacgcagaaacggcaggagctggaagccgagctggccaaggtgcgggccgagatggaggtgctgctggccagcaaggcgagggctgaggaggagtcgcgctccaccagcgagaagtccaagcagaggctggaggccgaggccggccggttccgcgagctggccgaggaggccgcccgcctgcgtgccctggcggaagaggccaagcggcagcggcagctggccgaggaagacgcggcgcggcagcgggccgaggcggagcgggtgcttgcggagaagctggccgccatcggcgaggccacgcggctcaagacggaggcggagatcgcgctcaaggagaaggaggcggagaacgagcgcctgcggcggctggcggaggacgaggccttccagcggcggcggctggaggagcaggccgcgcaacacaaggctgacatcgaggagcgcctggcccagctgcgcaaggcatcggacagcgagctggagcggcagaaggggctggtggaggacacgctgaggcagcggcggcaggtggaggaggagatcctggcgctgaaggcgagcttcgagaaggcggccgctggcaaggcggagctggagctggagctgggacgcatccgcagcaacgcggaggacacgctgcgcagcaaggagcaggccgagctggaggctgcgaggcagcggcagctggcggcggaggaggagcggcggcgccgtgaggctgaggagcgcgtgcagaagagcctggcggccgaggaggaggccgcacggcagcggaaggcggcgctggaggaagtcgagcggctgaaagccaaggtggaggaggcgcggcgcctgcgggagcgagcggagcaggagtcggcgcggcagctgcagctggcccaggaggccgcccagaagcggctgcaggcggaagagaaggcacacgccttcgcggtgcagcagaaggagcaggagctacagcagacgctgcagcaggagcagagcgtgctggaccagctgcgcggcgaggcggaggcggcccggcgggcggctgaggaggcggaggaggcccgggtgcaggcggagcgtgaggcggcgcagtcccggcggcaggtggaagaggccgagcggctgaagcagtcggcagaggagcaggcacaggcccgggctcaggcacaggcggctgcagagaagctgcgcaaggaggccgagcaagaggcggcgcggcgggcacaggcggagcaggcggccctgcggcagaagcaggcagctgacgcggagatggagaagcataagaaattcgccgagcagacgctgcggcagaaggcgcaggtggagcaggagctgacaacactgcggctgcagctggaggagaccgaccaccagaagaacctgctggacgaggagctgcagcggctgaaggcggaggccacggaggccgcacgccagcgcagccaggtggaggaggagctcttctcggtgcgcgtgcagatggaggagctgagcaagctcaaggcacgcatcgaggctgagaaccgcgcactcatcttgcgtgacaaggacaatacgcagcgcttcctgcaggaggaggctgagaagatgaagcaggtggcggaggaggccgcgcggctgagtgtggcggcccaagaggctgcgcgactgcggcagctggcagaggaggacctggcacagcagcgggccttggcagagaagatgctcaaggagaagatgcaggcggtgcaggaggccacgcgactcaaggctgaggcggaactgctgcagcagcagaaggagcttgcgcaggagcaggcgcggcggctgcaggaggacaaggagcagatggcgcagcagctggcggaggagacgcagggcttccagcggacgctggaggccgagcggcagcggcagctggagatgagcgctgaggctgagcgcctcaagctgcgtgtggccgagatgagccgagcccaggcccgcgctgaggaggacgcccagcgcttccggaagcaggcggaggagatcggtgagaagctgcaccgcacggagctcgccacccaggagaaggtgaccctggtgcagacactggagatccagcgacagcagagtgaccatgatgccgagcgcctgcgggaggccatcgctgagctggagcgtgagaaggagaagctccaacaggaggccaaactgctgcagctcaagtctgaggagatgcagacggtgcagcaggagcagctgctgcaggagacgcaggccctgcagcaaagcttcctctctgaaaaggacagcctgctacagcgggagcgcttcatcgagcaggagaaggccaagctggagcagctcttccaggacgaggtggccaaggcacagcagctgcgtgaggagcagcagcggcagcagcagcagatggagcaggaacggcagcggctggtggccagcatggaggaggcgcggcggcggcagcatgaggccgaggagggcgtgcggcgcaagcaggaggagctgcagcagctggagcagcagcggcggcagcaggaggagctgctggctgaggagaaccagaggctgcgtgagcagctgcagctcctggaggagcagcaccgggccgcgctggcgcactcagaggaggtcactgcctcgcaggtggctgccacaaagaccctgcccaatggccgggatgcacttgatggccccgcggcagaggcagagccggagcacagcttcgatggcctgcggcggaaggtgtcagctcagaggctgcaggaggccggcatcctgagtgcggaggagctgcagcggttggcgcagggccacaccacggtggacgagctcgcacggcgggaagacgtgcgccactacctgcagggccgcagcagtatcgcagggctgttgctgaaggccaccaatgagaagctgagtgtttacgccgccctgcagaggcagctgctgagtcccggcacggccctcatcctgctggaggcgcaggcggcctcaggcttcctgctggaccctgtgcggaaccggcggctgaccgtcaacgaggctgtgaaggagggtgtggtgggccccgagctgcaccacaagctgctgtcggccgagcgcgccgtcactggctacaaggacccctacactggccagcagatctctctcttccaagccatgcagaagggcctcatcgtccgggagcacggcatccgcctgctggaggcccagatcgccacgggcggcgttatcgaccccgtgcacagccaccgcgtgcccgtggacgtggcctaccggcgcggctacttcgacgaggagatgaaccgcgtcctggcggaccccagcgacgacaccaagggcttctttgaccccaacacgcacgagaacctcacgtacctgcagctactggagcgctgcgtggaggaccccgagacgggcctgtgccttctgccactcacggataaggctgccaagggcggggagctggtctacactgactccgaggcccgggacgtctttgagaaggccaccgtgtctgcgccgttcggcaagttccagggcaagacggtgaccatttgggagatcatcaactcggaatacttcacggcagagcagcggcgggacctgctgcggcagttccgcacgggccggatcacagtggagaagatcatcaagatcatcatcacggtggtggaggagcaggagcagaagggccggctttgctttgagggcctgcgcagcctggtgccagccgccgagctgctggagagcagggtcatcgaccgcgagctctaccagcagctgcagcgaggtgagcgctctgtgcgagacgtagccgaggtggacactgtgcggcgggctctccggggtgccaacgtcatcgcgggtgtatggctggaggaggcggggcagaagctgagtatctacaatgccctgaagaaagacctgctgccatccgacatggccgtggccctgttggaagcccaggccggcaccgggcacatcatcgaccccgccaccagcgcccggctgaccgtggacgaggcagtgcgtgctggcctggtgggccccgagtttcatgagaagctgctatcagccgagaaggctgtgacagggtacagggacccctacacagggcagagcgtctccctgttccaggccctgaagaagggcctcattccccgggagcagggcctgcgcctgttggacgcccagctgtccacgggcggcatcgtggaccccagcaagagccaccgcgtgcccctggatgtcgcctgcgcccgaggctgcctggatgaggagaccagcagggccctgtcggcaccaagggccgacgccaaggcctacagtgaccccagcacaggggagccggccacctacggcgagctccagcagcggtgccggcccgaccagctgaccgggctgagcctgctgccgctctcagaaaaggctgctcgggcccggcaggaggagctctactcagagctgcaggcccgtgagacctttgaaaagaccccggttgaggtccccgtgggtggcttcaagggcaggacggtgacggtgtgggagctcatcagctctgagtacttcactgcggagcagcggcaggagctgttgcgtcagttccgcacgggcaaggtcaccgtggagaaggtcatcaagattctcattaccatcgtggaggaggtggagaccctgcggcaggagaggctgtccttcagcggcctccgtgcccctgtgccagccagcgagctcctggcttccggggtcctcagcagagcccagtttgagcagctcaaggacggcaagacgacggtcaaggacctttcggagctgggctccgtgcggacgctgctgcagggcagtggctgcctcgccggcatctacctggaggacaccaaggagaaggtgtccatctacgaggccatgcgccggggcctgctgagagccacaacggctgcgctcctgctggaggcgcaggcggccactggcttcctggtggaccccgtgcggaaccagcgcctgtatgtccacgaggccgtgaaggcgggcgtggtgggccccgagcttcacgagcagctgctgtctgccgagaaggccgtcaccggctacagagacccctactcgggcagcaccatctccctcttccaggccatgcagaagggcctggttctccggcagcacggcatccgcctgctggaggcccagatcgccacgggcggcatcatcgaccccgtgcacagccaccgcgtgcctgtggacgtggcctaccagcgcggctacttcagtgaggagatgaaccgcgtcctggcggaccccagcgacgacaccaagggcttctttgaccccaacacgcatgagaacctcacgtacaggcagctgctggagcggtgcgtggaggaccccgagacgggcttgcgccttctgccactgaaaggggcggagaaggctgaggtggtggagaccacgcaggtgtacactgaggaggagacaagaagggcatttgaagagacacagatcgacattcccggcggcggcagccacggcggctccaccatgtccctgtgggaggtgatgcagtcggacctgatccccgaggagcagcgggcccagctgatggctgacttccaggccggccgggtgaccaaggaacgcatgatcatcatcatcatcgagatcattgagaagacagagatcatccgccagcagggtctggcctcctacgactacgtgcgccgccgcctcacggctgaggacctgttcgaggctcggatcatctctctcgagacctacaacctgctccgggagggcaccaggagcctccgtgaggctctcgaggcggagtccgcctggtgctacctctatggcacgggctccgtggctggtgtctacctgcccggttccaggcagacactgagcatctaccaggctctcaagaaagggctgctgagtgccgaggtggcccgcctgctgctggaggcacaggcagccacaggcttcctgctggacccggtgaagggggagcggctgactgtggatgaggctgtgcggaagggcctcgtggggcccgagctgcacgaccgcctgctctcggctgagcgggcggtcaccggctaccgtgacccctacaccgagcagaccatctcgctcttccaggccatgaagaaggagctgatccctactgaggaggccctgcggctgctggatgcccagctggccaccggcggcatcgtggacccccgcctgggcttccaccttcccctggaggtggcttaccagcgtggctacctcaacaaggacacgcacgaccagctgtcagagcccagcgaggtgcgcagctacgtggacccgtccaccgacgagcgcctcagctacacgcagctgctcaggcggtgccgtcgtgacgacggcaccggccagctgctcctgccactgtcggacgcccgcaagctgaccttccgtggcctgcggaagcagatcaccatggaggagctggtgcgctcgcaggtcatggacgaggccacggcgctgcagctgcgggagggcctgacctccatcgaggaggtcaccaagaacttgcagaagttcctggaaggcaccagctgcatcgctggtgtcttcgtggacgccaccaaggaacggctctcggtgtaccaggccatgaagaagggcatcatccgccccggcacagcctttgagctcctggaggcgcaggcggccaccggttacgtcatcgaccccatcaagggactgaagctgacggtggaggaggctgtgcgtatgggcattgtgggccccgagttcaaggacaagctgctgtcggccgagcgcgccgtcactgggtacaaggacccctactctgggaagctcatctccctcttccaggccatgaagaagggcctgatcctgaaggaccatggcatccgcctgctggaggcccagatcgccacgggcggcatcatcgaccctgaggagagccaccggctgcccgtggaggtggcctacaagcgcggcctcttcgatgaggagatgaacgagatcctgaccgacccctcggacgacaccaagggcttctttgaccctaacacggaggagaacctcacctacctgcagctgatggagcgttgtatcactgacccccagacgggcctgtgtctcttgccgctgaaggagaagaagcgggagcggaagacgtcctccaagtcctccgtgcgcaagcgccgagtggtcatcgtggaccccgagacgggcaaggagatgtcagtgtacgaggcctaccgcaagggcctgattgaccaccagacgtacctggagctgtccgagcaggagtgcgagtgggaggagatcaccatctcctcctcggacggcgtggtcaagtccatgatcatcgaccgccgctccgggcgccagtacgacatcgatgatgccatcgccaagaacctcatcgaccgctcggcactggaccagtaccgcgccggcacgctctccatcaccgagttcgccgacatgctctcgggcaacgccggtggtttccgctcccgttcctcctcggtgggatcctcctcctcctaccccatcagccccgccgtctccaggacccagctggcctcctggtcagaccccactgaggagacgggccccgtggctggcatcctggacacggagacgctggagaaggtgtccatcaccgaggccatgcaccggaacctggtggataacatcacggggcagcggctgctggaggcgcaggcctgcaccgggggcatcatcgaccccagcaccggtgagcgcttccctgtcaccgacgccgtcaacaagggcctggtggacaagatcatggtggaccgcatcaacctggcccagaaggccttctgcggcttcgaggacccacgcaccaagaccaagatgtcggccgcccaggccctgaagaagggctggctctactacgaggccggccagcgcttcctggaggtgcagtacctgaccggcggcttgatcgagcccgacacgccgggccgcgtgcccctggacgaggccctgcagcgcggcacggtggacgcccgcaccgcacagaagctgcgtgacgtgggcgcctactccaagtacctcacctgccctaagaccaagctcaagatctcctataaggacgcgctggaccgcagcatggtggaggagggcacggggctgcggctgctggaggctgccgcgcagtccaccaagggctactacagcccctacagcgtcagcggctccggctctaccgctggctcccgcaccggctcgcgcaccggctcccgggccggctcccgccgcggcagctttgacgccaccggctccggcttctccatgaccttctcttcatcctcctactcctcctcgggctacggccgccgctacgcctcggggtcctcggcctccctggggggccctgagtctgccgtggcctgaggctgcctgcgcccaccccgctctgcatgcggcccagcccggctcccaccgaggcgcgggggccgttttcaacgcttaaaggtgtcttcctcccaagtggtgcctaaagtttaaccaaaaagaccagactaatatattaatatatatctgctgtccagacagcctgtatcttgggggacagggctggcccagccctgctggccgcctcaccccctcgggtctcctcactcccttctacctgccactcacacagccaggtgccttggagggtcccaagctgggccccagcccaccctcctgtcttcccagggtagcccgcctgccagtcctagctgcacagggcagctgggcccaaccctgtctgtagagggccctggtgtttctagcactggcctgcacggtgggccttgctggggacggggggccccagtcagcctctctcccagtctacccagagaagccccttccccatgggaagacgaggccctcgggcccagcccccacagtgctgtctgatctgtgctttccagctcaccccccacactcactcctgagacccctggcctccggcgtcagcctccagcctctgttcccctagtaagtgccttccatgtcggcctctaaccccaggccccgaggacccagacccagtggggaggcggacgttccagccggcatggctgggaactgcagacctgtcctcctggtgggtccaggggcccctccagcttgtggagccccacactggggtgccgcctgcccgtctctctcccatggagccccagccccctttgggcccagggacaccagccaggctctgtgctgaccctcctgttgcacccagccctggtctcagcagcgaccacccctgcctccaccctctgagctttgcatgttccactaaccccgggcgggtggcaggtggaggtgtcaggctgctggcgcctctgcaagggcagaacactaacctgaccgtgggcggggccttgcggtatccgcccccaataaaagcaattccaacctttgagctgagcctgtgccgagtgagcgtctcgtggggccgccagccttcagctgcctgtgtgccacacggggctgcccagagcaccgtgcctgaggccgagggtccgggcgacgaaggtgtgggggcagcatgtctcagcaccagctccgcgtgccgcagcccgagggcctgggccgaaagagaaccagctcggaggacaacctgtacctggctgtgctcagggcctctgagggcaagaaagatgagcgggatcgtgtgcagaagaaaaccttcaccaagtgggtcaacaagcacctcatcaaggcccagaggcacatcagtgacctgtatgaagacctccgcgatggccacaacctcatctccctgctggaggtcctctcgggggacagcctgccccgggagaaggggaggatgcgtttccacaagctgcagaatgtccagattgccctggactacctccggcaccgccaggtgaagctggtgaacatcaggaatgatgacatcgctgacggcaaccccaagctgacccttggcctcatctggacaatcattctgcacttccagatctcagatatccaggtgagtgggcagtcggaggacatgacggccaaggagaagctgctgctgtggtcgcagcgaatggtggaggggtaccagggcctgcgatgcgacaacttcacctccagctggagagacggccgcctcttcaatgccatcatccaccggcacaagcccctgctcatcgacatgaacaaggtgtaccggcagaccaacctggagaacctggaccaggccttctctgtggcggagcgggacctgggagtgacgcggctcctggaccctgaggacgtggatgtccctcagcccgacgagaagtccatcatcacctacgtctcgtcgctgtatgacgccatgccccgcgtgccggacgtgcaggatggggtgagggccaacgagctgcagctgcgctggcaggagtaccgggagctggtgctgctgctgcttcagtggatgcgacaccacacggccgcctttgaggaacgcaggttcccctccagcttcgaggagattgagatcctgtggtctcagttcctgaagtttaaggagatggagctaccagccaaggaggccgacaagaacaggtccaagggcatctaccaatccctggagggagcggtgcaagcaggccagctcaaggtgccccctggctaccacccgctggatgtggagaaggagtggggcaagctgcacgtggccatcctggagcgggagaagcagctccgcagcgagtttgagaggctggagtgtcttcagcgcatcgtgaccaagctgcagatggaggcggggctgtgtgaggagcagctgaaccaggccgacgccctgctgcagtcggatgtccggctgctggctgcaggcaaagtgccacagcgggcgggggaggtggaacgggacttggacaaggcggatagcatgatccggctgctcttcaacgacgtgcagaccctcaaggatggacggcacccgcagggcgagcagatgtaccgcagggtgtaccgtctgcacgagcgcctggtagccatccgcaccgagtacaacctacggctgaaggcaggcgtggcggcccctgcaacccaggtggcccaggtgactctgcagagtgtgcagaggcgccccgagctggaggactccactctgcgctacctgcaggacctgctggcctgggtggaggagaaccagcaccgtgtggatggcgctgagtggggtgtggacctgcccagcgtggaggcgcagctgggcagccaccgaggcctgcaccagtccatcgaagaattccgggccaagatcgagcgggcacggagtgacgagggccagctctcccccgccacccggggtgcctaccgtgactgcctgggtcggctggacctgcagtacgccaagctgctgaactcctccaaggcccgcctcaggtccctggagagcttgcacagctttgtggcagccgccactaaggagctaatgtggctgaatgagaaggaggaggaggaggtgggcttcgactggagcgaccgcaacaccaacatgaccgccaagaaggagagctactcggcgctgatgcgggagctggagctgaaggagaagaagatcaaggagctccaaaatgctggggaccggctgctgcgggaggaccacccggcccggcccacggtggagtccttccaggcggccctgcagacgcagtggagctggatgctacagctgtgctgctgtatcgaggcacacctgaaggagaacgctgcctactttcagttcttctcagatgtgcgggaggccgaggggcagttgcagaagctgcaggaggcactgcgtaggaaatacagttgtgatcgctccgccaccgtcacccggctggaggacctgctgcaggatgcccaggacgagaaggaacagctgaacgagtacaagggccacctctcaggcctggccaagcgggccaaggccgtcgtgcagctgaagccccgcc

SEQ ID NO: 647 - DNA, 32765 bp, Homo sapiens
  misc_feature (212)..(212): second gene starts at position 212
atgttcagctttgtggacctccggctcctgctcctcttagcggccaccgccctcctgacgcacggccaagaggaaggccaagtcgagggccaagacgaagacatcccaccaatcacctgcgtacagaacggcctcaggtaccatgaccgagacgtgtggaaacccgagccctgccggatctgcgtctgcgacaacggcaaggtgttgtgcgatgacgtgatctgtgacgagaccaagaactgccccggcgccgaagtccccgagggcgagtgctgtcccgtctgccccgacggctcagagtcacccaccgaccaagaaaccaccggcgtcgagggacccaagggagacactggcccccgaggcccaaggggacccgcaggcccccctggccgagatggcatccctggacagcctggacttcccggaccccccggaccccccggacctcccggaccccctggcctcggaggaaactttgctccccagctgtcttatggctatgatgagaaatcaaccggaggaatttccgtgcctggccccatgggtccctctggtcctcgtggtctccctggcccccctggtgcacctggtccccaaggcttccaaggtccccctggtgagcctggcgagcctggagcttcaggtcccatgggtccccgaggtcccccaggtccccctggaaagaatggagatgatggggaagctggaaaacctggtcgtcctggtgagcgtgggcctcctgggcctcagggtgctcgaggattgcccggaacagctggcctccctggaatgaagggacacagaggtttcagtggtttggatggtgccaagggagatgctggtcctgctggtcctaagggtgagcctggcagccctggtgaaaatggagctcctggtcagatgggcccccgtggcctgcctggtgagagaggtcgccctggagcccctggccctgctggtgctcgtggaaatgatggtgctactggtgctgccgggccccctggtcccaccggccccgctggtcctcctggcttccctggtgctgttggtgctaagggtgaagctggtccccaagggccccgaggctctgaaggtccccagggtgtgcgtggtgagcctggcccccctggccctgctggtgctgctggccctgctggaaaccctggtgctgatggacagcctggtgctaaaggtgccaatggtgctcctggtattgctggtgctcctggcttccctggtgcccgaggcccctctggaccccagggccccggcggccctcctggtcccaagggtaacagcggtgaacctggtgctcctggcagcaaaggagacactggtgctaagggagagcctggccctgttggtgttcaaggaccccctggccctgctggagaggaaggaaagcgaggagctcgaggtgaacccggacccactggcctgcccggaccccctggcgagcgtggtggacctggtagccgtggtttccctggcgcagatggtgttgctggtcccaagggtcccgctggtgaacgtggttctcctggccctgctggccccaaaggatctcctggtgaagctggtcgtcccggtgaagctggtctgcctggtgccaagggtctgactggaagccctggcagccctggtcctgatggcaaaactggcccccctggtcccgccggtcaagatggtcgccccggacccccaggcccacctggtgcccgtggtcaggctggtgtgatgggattccctggacctaaaggtgctgctggagagcccggcaaggctggagagcgaggtgttcccggaccccctggcgctgtcggtcctgctggcaaagatggagaggctggagctcagggaccccctggccctgctggtcccgctggcgagagaggtgaacaaggccctgctggctcccccggattccagggtctccctggtcctgctggtcctccaggtgaagcaggcaaacctggtgaacagggtgttcctggagaccttggcgcccctggcccctctggagcaagaggcgagagaggtttccctggcgagcgtggtgtgcaaggtccccctggtcctgctggtccccgaggggccaacggtgctcccggcaacgatggtgctaagggtgatgctggtgcccctggagctcccggtagccagggcgcccctggccttcagggaatgcctggtgaacgtggtgcagctggtcttccagggcctaagggtgacagaggtgatgctggtcccaaaggtgctgatggctctcctggcaaagatggcgtccgtggtctgactggccccattggtcctcctggccctgctggtgcccctggtgacaagggtgaaagtggtcccagcggccctgctggtcccactggagctcgtggtgcccccggagaccgtggtgagcctggtccccccggccctgctggctttgctggcccccctggtgctgacggccaacctggtgctaaaggcgaacctggtgatgctggtgctaaaggcgatgctggtccccctggccctgccggacccgctggaccccctggccccattggtaatgttggtgctcctggagccaaaggtgctcgcggcagcgctggtccccctggtgctactggtttccctggtgctgctggccgagtcggtcctcctggcccctctggaaatgctggaccccctggccctcctggtcctgctggcaaagaaggcggcaaaggtccccgtggtgagactggccctgctggacgtcctggtgaagttggtccccctggtccccctggccctgctggcgagaaaggatcccctggtgctgatggtcctgctggtgctcctggtactcccgggcctcaaggtattgctggacagcgtggtgtggtcggcctgcctggtcagagaggagagagaggcttccctggtcttcctggcccctctggtgaacctggcaaacaaggtccctctggagcaagtggtgaacgtggtccccctggtcccatgggcccccctggattggctggaccccctggtgaatctggacgtgagggggctcctggtgccgaaggttcccctggacgagacggttctcctggcgccaagggtgaccgtggtgagaccggccccgctggaccccctggtgctcctggtgctcctggtgcccctggccccgttggccctgctggcaagagtggtgatcgtggtgagactggtccgtgtgcgactataagcaggtggaggtgactgtgcacaagggtgacgagtgccagctggtgggccctgcacagccgtcccactggaaggtgctcagcagctccggcagcgaggccgccgtgccctccgtgtgcttcctggtgcccccgcccaaccaggaggcccaggaggccgtcaccaggctggaggcccagcaccaggccctggtcacgctgtggcaccagttgcacgtggacatgaagagccttctggcctggcagagccttcgccgcgacgtgcagctcatccgctcctggtccctggccacgttccgcaccctgaagccagaggagcagcgccaagccctgcacagcctggagctgcactaccaggccttcctgcgggacagccaggacgcgggcggcttcggacccgaggaccggctgatggctgagcgcgagtacggctcctgcagccaccactaccagcagctgctgcagagcctggaacagggtgcacaggaagagtctcgctgccagcgctgcatctccgagctcaaagacatccggctgcagctggaggcctgtgagacgcgcaccgtgcaccgcctgcggctgccgctggacaaagagccggcacgggagtgtgcccagcgcatcgccgagcagcagaaggcacaggcagaggtggaggggctgggcaagggggtcgcccggctctctgccgaggccgagaaggtcttggccctaccagagccatcgcctgcggcccccacgctgcgctcggagctggagctgacgctgggcaagctggagcaggtccgcagcctgtctgccatctacctggagaagctcaagaccatcagcctggtgatccgcggcacgcagggggccgaggaggtgctcagggcccacgaggagcagctcaaggaggcccaggccgtgccggccaccctcccggagctcgaggccaccaaggcctctctgaagaagctgcgggcccaggccgaggcacagcagcccacgttcgacgccctgcgggatgagctgcggggggcacaggaggtgggggagcgactgcagcagcggcacggggagcgggacgtggaggtggagcgctggcgggagcgggtcgcccagttgcttgagcgctggcaggctgtgctggcccagaccgacgtgcggcagcgcgagctcgagcaactgggccgccagctgcgttactaccgcgagagtgcagaccccttgggcgcctggctgcaggacgccaggcggcggcaggagcagatccaggccatgccgctggccgacagccaggctgtgcgggagcagctgcggcaggagcaggccctgctggaggagatcgagcgccacggcgagaaggtcgaggagtgccagaggtttgcgaaacagtacatcaacgccatcaaggactatgaactccagctggtgacgtacaaggcgcagcttgagccggtggcctccccggccaagaagcccaaggtccagtcgggatcagagagtgtcatccaggagtacgtggacctgcgtacgcactacagcgagctgaccacactgacgagccagtacatcaagttcatcagcgagactctgcggcgcatggaggaggaggagaggctggctgagcagcagcgggcagaggagcgcgagcggctggccgaggtggaggccgcgctggagaagcagcggcagctggccgaggcgcacgcccaggcaaaggcacaggcggagcgggaggcgaaggagctgcagcagcgcatgcaggaggaggtggtgcggcgggaggaggcggcggtggacgcgcagcagcagaagcgcagcattcaggaggagctgcagcagctgcggcagagctcggaggcggagatccaggccaaggcccggcaggcagaggcggctgagcgcagccggctgcgcatcgaggaggagatccgcgtggtgcgcctgcagttggaggccaccgagcgccagcgtggcggggctgagggggagctgcaggcactgcgtgcacgggcggaggaggctgaggcacaaaagcgacaggcgcaggaggaggccgagcgcttgcggaggcaggtgcaggacgagagccagcgtaagcggcaggcggaggtggagctggcctcgcgcgtgaaggccgaggccgaggcggcgcgcgagaagcagcgggccctgcaggccctggaggagctgcggctgcaggcggaggaggcggagcggcgcctgcggcaggccgaggtggagcgagcgcggcaggtacaggtggccctggagacggcgcagcgcagtgcagaggcggagctgcagagcaaacgcgcctccttcgccgagaagacggcacagctggagcgctccctgcaggaggaacacgtggctgtggcacagctgcgggaggaggctgagcggcgggcacagcagcaggccgaggccgagcgggcgcgcgaggaggcagagcgggagctggagcgctggcagctcaaggccaacgaggcgctacggctgcggctgcaggcggaggaggtggcgcagcagaagagcctggcgcaggccgaggctgagaagcagaaggaggaggcggagcgcgaggcgcggcggcgcggcaaggcggaggagcaggccgtccggcagcgggagctggctgaacaagagctggagaagcagcggcagctggcggaaggcaccgcgcagcagcgcctggccgcggagcaggagttgatccggctgcgggccgagacggagcagggggagcagcagcggcagctgctggaggaggagctggcccggctgcagcgtgaggcggctgcagccacgcagaaacggcaggagctggaagccgagctggccaaggtgcgggccgagatggaggtgctgctggccagcaaggcgagggctgaggaggagtcgcgctccaccagcgagaagtccaagcagaggctggaggccgaggccggccggttccgcgagctggccgaggaggccgcccgcctgcgtgccctggcggaagaggccaagcggcagcggcagctggccgaggaagacgcggcgcggcagcgggccgaggcggagcgggtgcttgcggagaagctggccgccatcggcgaggccacgcggctcaagacggaggcggagatcgcgctcaaggagaaggaggcggagaacgagcgcctgcggcggctggcggaggacgaggccttccagcggcggcggctggaggagcaggccgcgcaacacaaggctgacatcgaggagcgcctggcccagctgcgcaaggcatcggacagcgagctggagcggcagaaggggctggtggaggacacgctgaggcagcggcggcaggtggaggaggagatcctggcgctgaaggcgagcttcgagaaggcggccgctggcaaggcggagctggagctggagctgggacgcatccgcagcaacgcggaggacacgctgcgcagcaaggagcaggccgagctggaggctgcgaggcagcggcagctggcggcggaggaggagcggcggcgccgtgaggctgaggagcgcgtgcagaagagcctggcggccgaggaggaggccgcacggcagcggaaggcggcgctggaggaagtcgagcggctgaaagccaaggtggaggaggcgcggcgcctgcgggagcgagcggagcaggagtcggcgcggcagctgcagctggcccaggaggccgcccagaagcggctgcaggcggaagagaaggcacacgccttcgcggtgcagcagaaggagcaggagctacagcagacgctgcagcaggagcagagcgtgctggaccagctgcgcggcgaggcggaggcggcccggcgggcggctgaggaggcggaggaggcccgggtgcaggcggagcgtgaggcggcgcagtcccggcggcaggtggaagaggccgagcggctgaagcagtcggcagaggagcaggcacaggcccgggctcaggcacaggcggctgcagagaagctgcgcaaggaggccgagcaagaggcggcgcggcgggcacaggcggagcaggcggccctgcggcagaagcaggcagctgacgcggagatggagaagcataagaaattcgccgagcagacgctgcggcagaaggcgcaggtggagcaggagctgacaacactgcggctgcagctggaggagaccgaccaccagaagaacctgctggacgaggagctgcagcggctgaaggcggaggccacggaggccgcacgccagcgcagccaggtggaggaggagctcttctcggtgcgcgtgcagatggaggagctgagcaagctcaaggcacgcatcgaggctgagaaccgcgcactcatcttgcgtgacaaggacaatacgcagcgcttcctgcaggaggaggctgagaagatgaagcaggtggcggaggaggccgcgcggctgagtgtggcggcccaagaggctgcgcgactgcggcagctggcagaggaggacctggcacagcagcgggccttggcagagaagatgctcaaggagaagatgcaggcggtgcaggaggccacgcgactcaaggctgaggcggaactgctgcagcagcagaaggagcttgcgcaggagcaggcgcggcggctgcaggaggacaaggagcagatggcgcagcagctggcggaggagacgcagggcttccagcggacgctggaggccgagcggcagcggcagctggagatgagcgctgaggctgagcgcctcaagctgcgtgtggccgagatgagccgagcccaggcccgcgctgaggaggacgcccagcgcttccggaagcaggcggaggagatcggtgagaagctgcaccgcacggagctcgccacccaggagaaggtgaccctggtgcagacactggagatccagcgacagcagagtgaccatgatgccgagcgcctgcgggaggccatcgctgagctggagcgtgagaaggagaagctccaacaggaggccaaactgctgcagctcaagtctgaggagatgcagacggtgcagcaggagcagctgctgcaggagacgcaggccctgcagcaaagcttcctctctgaaaaggacagcctgctacagcgggagcgcttcatcgagcaggagaaggccaagctggagcagctcttccaggacgaggtggccaaggcacagcagctgcgtgaggagcagcagcggcagcagcagcagatggagcaggaacggcagcggctggtggccagcatggaggaggcgcggcggcggcagcatgaggccgaggagggcgtgcggcgcaagcaggaggagctgcagcagctggagcagcagcggcggcagcaggaggagctgctggctgaggagaaccagaggctgcgtgagcagctgcagctcctggaggagcagcaccgggccgcgctggcgcactcagaggaggtcactgcctcgcaggtggctgccacaaagaccctgcccaatggccgggatgcacttgatggccccgcggcagaggcagagccggagcacagcttcgatggcctgcggcggaaggtgtcagctcagaggctgcaggaggccggcatcctgagtgcggaggagctgcagcggttggcgcagggccacaccacggtggacgagctcgcacggcgggaagacgtgcgccactacctgcagggccgcagcagtatcgcagggctgttgctgaaggccaccaatgagaagctgagtgtttacgccgccctgcagaggcagctgctgagtcccggcacggccctcatcctgctggaggcgcaggcggcctcaggcttcctgctggaccctgtgcggaaccggcggctgaccgtcaacgaggctgtgaaggagggtgtggtgggccccgagctgcaccacaagctgctgtcggccgagcgcgccgtcactggctacaaggacccctacactggccagcagatctctctcttccaagccatgcagaagggcctcatcgtccgggagcacggcatccgcctgctggaggcccagatcgccacgggcggcgttatcgaccccgtgcacagccaccgcgtgcccgtggacgtggcctaccggcgcggctacttcgacgaggagatgaaccgcgtcctggcggaccccagcgacgacaccaagggcttctttgaccccaacacgcacgagaacctcacgtacctgcagctactggagcgctgcgtggaggaccccgagacgggcctgtgccttctgccactcacggataaggctgccaagggcggggagctggtctacactgactccgaggcccgggacgtctttgagaaggccaccgtgtctgcgccgttcggcaagttccagggcaagacggtgaccatttgggagatcatcaactcggaatacttcacggcagagcagcggcgggacctgctgcggcagttccgcacgggccggatcacagtggagaagatcatcaagatcatcatcacggtggtggaggagcaggagcagaagggccggctttgctttgagggcctgcgcagcctggtgccagccgccgagctgctggagagcagggtcatcgaccgcgagctctaccagcagctgcagcgaggtgagcgctctgtgcgagacgtagccgaggtggacactgtgcggcgggctctccggggtgccaacgtcatcgcgggtgtatggctggaggaggcggggcagaagctgagtatctacaatgccctgaagaaagacctgctgccatccgacatggccgtggccctgttggaagcccaggccggcaccgggcacatcatcgaccccgccaccagcgcccggctgaccgtggacgaggcagtgcgtgctggcctggtgggccccgagtttcatgagaagctgctatcagccgagaaggctgtgacagggtacagggacccctacacagggcagagcgtctccctgttccaggccctgaagaagggcctcattccccgggagcagggcctgcgcctgttggacgcccagctgtccacgggcggcatcgtggaccccagcaagagccaccgcgtgcccctggatgtcgcctgcgcccgaggctgcctggatgaggagaccagcagggccctgtcggcaccaagggccgacgccaaggcctacagtgaccccagcacaggggagccggccacctacggcgagctccagcagcggtgccggcccgaccagctgaccgggctgagcctgctgccgctctcagaaaaggctgctcgggcccggcaggaggagctctactcagagctgcaggcccgtgagacctttgaaaagaccccggttgaggtccccgtgggtggcttcaagggcaggacggtgacggtgtgggagctcatcagctctgagtacttcactgcggagcagcggcaggagctgttgcgtcagttccgcacgggcaaggtcaccgtggagaaggtcatcaagattctcattaccatcgtggaggaggtggagaccctgcggcaggagaggctgtccttcagcggcctccgtgcccctgtgccagccagcgagctcctggcttccggggtcctcagcagagcccagtttgagcagctcaaggacggcaagacgacggtcaaggacctttcggagctgggctccgtgcggacgctgctgcagggcagtggctgcctcgccggcatctacctggaggacaccaaggagaaggtgtccatctacgaggccatgcgccggggcctgctgagagccacaacggctgcgctcctgctggaggcgcaggcggccactggcttcctggtggaccccgtgcggaaccagcgcctgtatgtccacgaggccgtgaaggcgggcgtggtgggccccgagcttcacgagcagctgctgtctgccgagaaggccgtcaccggctacagagacccctactcgggcagcaccatctccctcttccaggccatgcagaagggcctggttctccggcagcacggcatccgcctgctggaggcccagatcgccacgggcggcatcatcgaccccgtgcacagccaccgcgtgcctgtggacgtggcctaccagcgcggctacttcagtgaggagatgaaccgcgtcctggcggaccccagcgacgacaccaagggcttctttgaccccaacacgcatgagaacctcacgtacaggcagctgctggagcggtgcgtggaggaccccgagacgggcttgcgccttctgccactgaaaggggcggagaaggctgaggtggtggagaccacgcaggtgtacactgaggaggagacaagaagggcatttgaagagacacagatcgacattcccggcggcggcagccacggcggctccaccatgtccctgtgggaggtgatgcagtcggacctgatccccgaggagcagcgggcccagctgatggctgacttccaggccggccgggtgaccaaggaacgcatgatcatcatcatcatcgagatcattgagaagacagagatcatccgccagcagggtctggcctcctacgactacgtgcgccgccgcctcacggctgaggacctgttcgaggctcggatcatctctctcgagacctacaacctgctccgggagggcaccaggagcctccgtgaggctctcgaggcggagtccgcctggtgctacctctatggcacgggctccgtggctggtgtctacctgcccggttccaggcagacactgagcatctaccaggctctcaagaaagggctgctgagtgccgaggtggcccgcctgctgctggaggcacaggcagccacaggcttcctgctggacccggtgaagggggagcggctgactgtggatgaggctgtgcggaagggcctcgtggggcccgagctgcacgaccgcctgctctcggctgagcgggcggtcaccggctaccgtgacccctacaccgagcagaccatctcgctcttccaggccatgaagaaggagctgatccctactgaggaggccctgcggctgctggatgcccagctggccaccggcggcatcgtggacccccgcctgggcttccaccttcccctggaggtggcttaccagcgtggctacctcaacaaggacacgcacgaccagctgtcagagcccagcgaggtgcgcagctacgtggacccgtccaccgacgagcgcctcagctacacgcagctgctcaggcggtgccgtcgtgacgacggcaccggccagctgctcctgccactgtcggacgcccgcaagctgaccttccgtggcctgcggaagcagatcaccatggaggagctggtgcgctcgcaggtcatggacgaggccacggcgctgcagctgcgggagggcctgacctccatcgaggaggtcaccaagaacttgcagaagttcctggaaggcaccagctgcatcgctggtgtcttcgtggacgccaccaaggaacggctctcggtgtaccaggccatgaagaagggcatcatccgccccggcacagcctttgagctcctggaggcgcaggcggccaccggttacgtcatcgaccccatcaagggactgaagctgacggtggaggaggctgtgcgtatgggcattgtgggccccgagttcaaggacaagctgctgtcggccgagcgcgccgtcactgggtacaaggacccctactctgggaagctcatctccctcttccaggccatgaagaagggcctgatcctgaaggaccatggcatccgcctgctggaggcccagatcgccacgggcggcatcatcgaccctgaggagagccaccggctgcccgtggaggtggcctacaagcgcggcctcttcgatgaggagatgaacgagatcctgaccgacccctcggacgacaccaagggcttctttgaccctaacacggaggagaacctcacctacctgcagctgatggagcgttgtatcactgacccccagacgggcctgtgtctcttgccgctgaaggagaagaagcgggagcggaagacgtcctccaagtcctccgtgcgcaagcgccgagtggtcatcgtggaccccgagacgggcaaggagatgtcagtgtacgaggcctaccgcaagggcctgattgaccaccagacgtacctggagctgtccgagcaggagtgcgagtgggaggagatcaccatctcctcctcggacggcgtggtcaagtccatgatcatcgaccgccgctccgggcgccagtacgacatcgatgatgccatcgccaagaacctcatcgaccgctcggcactggaccagtaccgcgccggcacgctctccatcaccgagttcgccgacatgctctcgggcaacgccggtggtttccgctcccgttcctcctcggtgggatcctcctcctcctaccccatcagccccgccgtctccaggacccagctggcctcctggtcagaccccactgaggagacgggccccgtggctggcatcctggacacggagacgctggagaaggtgtccatcaccgaggccatgcaccggaacctggtggataacatcacggggcagcggctgctggaggcgcaggcctgcaccgggggcatcatcgaccccagcaccggtgagcgcttccctgtcaccgacgccgtcaacaagggcctggtggacaagatcatggtggaccgcatcaacctggcccagaaggccttctgcggcttcgaggacccacgcaccaagaccaagatgtcggccgcccaggccctgaagaagggctggctctactacgaggccggccagcgcttcctggaggtgcagtacctgaccggcggcttgatcgagcccgacacgccgggccgcgtgcccctggacgaggccctgcagcgcggcacggtggacgcccgcaccgcacagaagctgcgtgacgtgggcgcctactccaagtacctcacctgccctaagaccaagctcaagatctcctataaggacgcgctggaccgcagcatggtggaggagggcacggggctgcggctgctggaggctgccgcgcagtccaccaagggctactacagcccctacagcgtcagcggctccggctctaccgctggctcccgcaccggctcgcgcaccggctcccgggccggctcccgccgcggcagctttgacgccaccggctccggcttctccatgaccttctcttcatcctcctactcctcctcgggctacggccgccgctacgcctcggggtcctcggcctccctggggggccctgagtctgccgtggcctgaggctgcctgcgcccaccccgctctgcatgcggcccagcccggctcccaccgaggcgcgggggccgttttcaacgcttaaaggtgtcttcctcccaagtggtgcctaaagtttaaccaaaaagaccagactaatatattaatatatatctgctgtccagacagcctgtatcttgggggacagggctggcccagccctgctggccgcctcaccccctcgggtctcctcactcccttctacctgccactcacacagccaggtgccttggagggtcccaagctgggccccagcccaccctcctgtcttcccagggtagcccgcctgccagtcctagctgcacagggcagctgggcccaaccctgtctgtagagggccctggtgtttctagcactggcctgcacggtgggccttgctggggacggggggccccagtcagcctctctcccagtctacccagagaagccccttccccatgggaagacgaggccctcgggcccagcccccacagtgctgtctgatctgtgctttccagctcaccccccacactcactcctgagacccctggcctccggcgtcagcctccagcctctgttcccctagtaagtgccttccatgtcggcctctaaccccaggccccgaggacccagacccagtggggaggcggacgttccagccggcatggctgggaactgcagacctgtcctcctggtgggtccaggggcccctccagcttgtggagccccacactggggtgccgcctgcccgtctctctcccatggagccccagccccctttgggcccagggacaccagccaggctctgtgctgaccctcctgttgcacccagccctggtctcagcagcgaccacccctgcctccaccctctgagctttgcatgttccactaaccccgggcgggtggcaggtggaggtgtcaggctgctggcgcctctgcaagggcagaacactaacctgaccgtgggcggggccttgcggtatccgcccccaataaaagcaattccaaccttagtctggctgcggcggcagagctgaagtgagcggagccaccaggaggccatgtcgggtgaggacgctgaggtccgggcagtctctgaagatgtctccaatggaagcagtggctcgcccagccctggggacacactgccctggaaccttgggaaaacgcagcggagccggcgcagcgggggtggcgctgggagcaacgggagtgtcctggacccagctgagcgggcggtcattcgcatcgcagatgagcgggatcgtgtgcagaagaaaaccttcaccaagtgggtcaacaagcacctcatcaaggcccagaggcacatcagtgacctgtatgaagacctccgcgatggccacaacctcatctccctgctggaggtcctctcgggggacagcctgccccgggagaaggggaggatgcgtttccacaagctgcagaatgtccagattgccctggactacctccggcaccgccaggtgaagctggtgaacatcaggaatgatgacatcgctgacggcaaccccaagctgacccttggcctcatctggacaatcattctgcacttccagatctcagatatccaggtgagtgggcagtcggaggacatgacggccaaggagaagctgctgctgtggtcgcagcgaatggtggaggggtaccagggcctgcgatgcgacaacttcacctccagctggagagacggccgcctcttcaatgccatcatccaccggcacaagcccctgctcatcgacatgaacaaggtgtaccggcagaccaacctggagaacctggaccaggccttctctgtggcggagcgggacctgggagtgacgcggctcctggaccctgaggacgtggatgtccctcagcccgacgagaagtccatcatcacctacgtctcgtcgctgtatgacgccatgccccgcgtgccggacgtgcaggatggggtgagggccaacgagctgcagctgcgctggcaggagtaccgggagctggtgctgctgctgcttcagtggatgcgacaccacacggccgcctttgaggaacgcaggttcccctccagcttcgaggagattgagatcctgtggtctcagttcctgaagtttaaggagatggagctaccagccaaggaggccgacaagaacaggtccaagggcatctaccaatccctggagggagcggtgcaagcaggccagctcaaggtgccccctggctaccacccgctggatgtggagaaggagtggggcaagctgcacgtggccatcctggagcgggagaagcagctccgcagcgagtttgagaggctggagtgtcttcagcgcatcgtgaccaagctgcagatggaggcggggctgtgtgaggagcagctgaaccaggccgacgccctgctgcagtcggatgtccggctgctggctgcaggcaaagtgccacagcgggcgggggaggtggaacgggacttggacaaggcggatagcatgatccggctgctcttcaacgacgtgcagaccctcaaggatggacggcacccgcagggcgagcagatgtaccgcagggtgtaccgtctgcacgagcgcctggtagccatccgcaccgagtacaacctacggctgaaggcaggcgtggcggcccctgcaacccaggtggcccaggtgactctgcagagtgtgcagaggcgccccgagctggaggactccactctgcgctacctgcaggacctgctggcctgggtggaggagaaccagcaccgtgtggatggcgctgagtggggtgtggacctgcccagcgtggaggcgcagctgggcagccaccgaggcctgcaccagtccatcgaagaattccgggccaagatcgagcgggcacggagtgacgagggccagctctcccccgccacccggggtgcctaccgtgactgcctgggtcggctggacctgcagtacgccaagctgctgaactcctccaaggcccgcctcaggtccctggagagcttgcacagctttgtggcagccgccactaaggagctaatgtggctgaatgagaaggaggaggaggaggtgggcttcgactggagcgaccgcaacaccaacatgaccgccaagaaggagagctactcggcgctgatgcgggagctggagctgaaggagaagaagatcaaggagctccaaaatgctggggaccggctgctgcgggaggaccacccggcccggcccacggtggagtccttccaggcggccctgcagacgcagtggagctggatgctacagctgtgctgctgtatcgaggcacacctgaaggagaacgctgcctactttcagttcttctcagatgtgcgggaggccgaggggcagttgcagaagctgcaggaggcactgcgtaggaaatacagttgtgatcgctccgccaccgtcacccggctggaggacctgctgcaggatgcccaggacgagaaggaacagctgaacgagtacaagggccacctctcaggcctggccaagcgggccaaggccgtcgtgcagctgaagccccgccacccagcccaccccatgcggggccgcctgcccctgctggccgtgtgcgactataagcaggtggaggtgactgtgcacaagggtgacgagtgccagctggtgggccctgcacagccgtcccactggaaggtgctcagcagctccggcagcgaggccgccgtgccctccgtgtgcttcctggtgcccccgcccaaccaggaggcccaggaggccgtcaccaggctggaggcccagcaccaggccctggtcacgctgtggcaccagttgcacgtggacatgaagagccttctggcctggcagagccttcgccgcgacgtgcagctcatccgctcctggtccctggccacgttccgcaccctgaagccagaggagcagcgccaagccctgcacagcctggagctgcactaccaggccttcctgcgggacagccaggacgcgggcggcttcggacccgaggaccggctgatggctgagcgcgagtacggctcctgcagccaccactaccagcagctgctgcagagcctggaacagggtgcacaggaagagtctcgctgccagcgctgcatctccgagctcaaagacatccggctgcagctggaggcctgtgagacgcgcaccgtgcaccgcctgcggctgccgctggacaaagagccggcacgggagtgtgcccagcgcatcgccgagcagcagaaggcacaggcagaggtggaggggctgggcaagggggtcgcccggctctctgccgaggccgagaaggtcttggccctaccagagccatcgcctgcggcccccacgctgcgctcggagctggagctgacgctgggcaagctggagcaggtccgcagcctgtctgccatctacctggagaagctcaagaccatcagcctggtgatccgcggcacgcagggggccgaggaggtgctcagggcccacgaggagcagctcaaggaggcccaggccgtgccggccaccctcccggagctcgaggccaccaaggcctctctgaagaagctgcgggcccaggccgaggcacagcagcccacgttcgacgccctgcgggatgagctgcggggggcacaggaggtgggggagcgactgcagcagcggcacggggagcgggacgtggaggtggagcgctggcgggagcgggtcgcccagttgcttgagcgctggcaggctgtgctggcccagaccgacgtgcggcagcgcgagctcgagcaactgggccgccagctgcgttactaccgcgagagtgcagaccccttgggcgcctggctgcaggacgccaggcggcggcaggagcagatccaggccatgccgctggccgacagccaggctgtgcgggagcagctgcggcaggagcaggccctgctggaggagatcgagcgccacggcgagaaggtcgaggagtgccagaggtttgcgaaacagtacatcaacgccatcaaggactatgaactccagctggtgacgtacaaggcgcagcttgagccggtggcctccccggccaagaagcccaaggtccagtcgggatcagagagtgtcatccaggagtacgtggacctgcgtacgcactacagcgagctgaccacactgacgagccagtacatcaagttcatcagcgagactctgcggcgcatggaggaggaggagaggctggctgagcagcagcgggcagaggagcgcgagcggctggccgaggtggaggccgcgctggagaagcagcggcagctggccgaggcgcacgcccaggcaaaggcacaggcggagcgggaggcgaaggagctgcagcagcgcatgcaggaggaggtggtgcggcgggaggaggcggcggtggacgcgcagcagcagaagcgcagcattcaggaggagctgcagcagctgcggcagagctcggaggcggagatccaggccaaggcccggcaggcagaggcggctgagcgcagccggctgcgcatcgaggaggagatccgcgtggtgcgcctgcagttggaggccaccgagcgccagcgtggcggggctgagggggagctgcaggcactgcgtgcacgggcggaggaggctgaggcacaaaagcgacaggcgcaggaggaggccgagcgcttgcggaggcaggtgcaggacgagagccagcgtaagcggcaggcggaggtggagctggcctcgcgcgtgaaggccgaggccgaggcggcgcgcgagaagcagcgggccctgcaggccctggaggagctgcggctgcaggcggaggaggcggagcggcgcctgcggcaggccgaggtggagcgagcgcggcaggtacaggtggccctggagacggcgcagcgcagtgcagaggcggagctgcagagcaaacgcgcctccttcgccgagaagacggcacagctggagcgctccctgcaggaggaacacgtggctgtggcacagctgcgggaggaggctgagcggcgggcacagcagcaggccgaggccgagcgggcgcgcgaggaggcagagcgggagctggagcgctggcagctcaaggccaacgaggcgctacggctgcggctgcaggcggaggaggtggcgcagcagaagagcctggcgcaggccgaggctgagaagcagaaggaggaggcggagcgcgaggcgcggcggcgcggcaaggcggaggagcaggccgtccggcagcgggagctggctgaacaagagctggagaagcagcggcagctggcggaaggcaccgcgcagcagcgcctggccgcggagcaggagttgatccggctgcgggccgagacggagcagggggagcagcagcggcagctgctggaggaggagctggcccggctgcagcgtgaggcggctgcagccacgcagaaacggcaggagctggaagccgagctggccaaggtgcgggccgagatggaggtgctgctggccagcaaggcgagggctgaggaggagtcgcgctccaccagcgagaagtccaagcagaggctggaggccgaggccggccggttccgcgagctggccgaggaggccgcccgcctgcgtgccctggcggaagaggccaagcggcagcggcagctggccgaggaagacgcggcgcggcagcgggccgaggcggagcgggtgcttgcggagaagctggccgccatcggcgaggccacgcggctcaagacggaggcggagatcgcgctcaaggagaaggaggcggagaacgagcgcctgcggcggctggcggaggacgaggccttccagcggcggcggctggaggagcaggccgcgcaacacaaggctgacatcgaggagcgcctggcccagctgcgcaaggcatcggacagcgagctggagcggcagaaggggctggtggaggacacgctgaggcagcggcggcaggtggaggaggagatcctggcgctgaaggcgagcttcgagaaggcggccgctggcaaggcggagctggagctggagctgggacgcatccgcagcaacgcggaggacacgctgcgcagcaaggagcaggccgagctggaggctgcgaggcagcggcagctggcggcggaggaggagcggcggcgccgtgaggctgaggagcgcgtgcagaagagcctggcggccgaggaggaggccgcacggcagcggaaggcggcgctggaggaagtcgagcggctgaaagccaaggtggaggaggcgcggcgcctgcgggagcgagcggagcaggagtcggcgcggcagctgcagctggcccaggaggccgcccagaagcggctgcaggcggaagagaaggcacacgccttcgcggtgcagcagaaggagcaggagctacagcagacgctgcagcaggagcagagcgtgctggaccagctgcgcggcgaggcggaggcggcccggcgggcggctgaggaggcggaggaggcccgggtgcaggcggagcgtgaggcggcgcagtcccggcggcaggtggaagaggccgagcggctgaagcagtcggcagaggagcaggcacaggcccgggctcaggcacaggcggctgcagagaagctgcgcaaggaggccgagcaagaggcggcgcggcgggcacaggcggagcaggcggccctgcggcagaagcaggcagctgacgcggagatggagaagcataagaaattcgccgagcagacgctgcggcagaaggcgcaggtggagcaggagctgacaacactgcggctgcagctggaggagaccgaccaccagaagaacctgctggacgaggagctgcagcggctgaaggcggaggccacggaggccgcacgccagcgcagccaggtggaggaggagctcttctcggtgcgcgtgcagatggaggagctgagcaagctcaaggcacgcatcgaggctgagaaccgcgcactcatcttgcgtgacaaggacaatacgcagcgcttcctgcaggaggaggctgagaagatgaagcaggtggcggaggaggccgcgcggctgagtgtggcggcccaagaggctgcgcgactgcggcagctggcagaggaggacctggcacagcagcgggccttggcagagaagatgctcaaggagaagatgcaggcggtgcaggaggccacgcgactcaaggctgaggcggaactgctgcagcagcagaaggagcttgcgcaggagcaggcgcggcggctgcaggaggacaaggagcagatggcgcagcagctggcggaggagacgcagggcttccagcggacgctggaggccgagcggcagcggcagctggagatgagcgctgaggctgagcgcctcaagctgcgtgtggccgagatgagccgagcccaggcccgcgctgaggaggacgcccagcgcttccggaagcaggcggaggagatcggtgagaagctgcaccgcacggagctcgccacccaggagaaggtgaccctggtgcagacactggagatccagcgacagcagagtgaccatgatgccgagcgcctgcgggaggccatcgctgagctggagcgtgagaaggagaagctccaacaggaggccaaactgctgcagctcaagtctgaggagatgcagacggtgcagcaggagcagctgctgcaggagacgcaggccctgcagcaaagcttcctctctgaaaaggacagcctgctacagcgggagcgcttcatcgagcaggagaaggccaagctggagcagctcttccaggacgaggtggccaaggcacagcagctgcgtgaggagcagcagcggcagcagcagcagatggagcaggaacggcagcggctggtggccagcatggaggaggcgcggcggcggcagcatgaggccgaggagggcgtgcggcgcaagcaggaggagctgcagcagctggagcagcagcggcggcagcaggaggagctgctggctgaggagaaccagaggctgcgtgagcagctgcagctcctggaggagcagcaccgggccgcgctggcgcactcagaggaggtcactgcctcgcaggtggctgccacaaagaccctgcccaatggccgggatgcacttgatggccccgcggcagaggcagagccggagcacagcttcgatggcctgcggcggaaggtgtcagctcagaggctgcaggaggccggcatcctgagtgcggaggagctgcagcggttggcgcagggccacaccacggtggacgagctcgcacggcgggaagacgtgcgccactacctgcagggccgcagcagtatcgcagggctgttgctgaaggccaccaatgagaagctgagtgtttacgccgccctgcagaggcagctgctgagtcccggcacggccctcatcctgctggaggcgcaggcggcctcaggcttcctgctggaccctgtgcggaaccggcggctgaccgtcaacgaggctgtgaaggagggtgtggtgggccccgagctgcaccacaagctgctgtcggccgagcgcgccgtcactggctacaaggacccctacactggccagcagatctctctcttccaagccatgcagaagggcctcatcgtccgggagcacggcatccgcctgctggaggcccagatcgccacgggcggcgttatcgaccccgtgcacagccaccgcgtgcccgtggacgtggcctaccggcgcggctacttcgacgaggagatgaaccgcgtcctggcggaccccagcgacgacaccaagggcttctttgaccccaacacgcacgagaacctcacgtacctgcagctactggagcgctgcgtggaggaccccgagacgggcctgtgccttctgccactcacggataaggctgccaagggcggggagctggtctacactgactccgaggcccgggacgtctttgagaaggccaccgtgtctgcgccgttcggcaagttccagggcaagacggtgaccatttgggagatcatcaactcggaatacttcacggcagagcagcggcgggacctgctgcggcagttccgcacgggccggatcacagtggagaagatcatcaagatcatcatcacggtggtggaggagcaggagcagaagggccggctttgctttgagggcctgcgcagcctggtgccagccgccgagctgctggagagcagggtcatcgaccgcgagctctaccagcagctgcagcgaggtgagcgctctgtgcgagacgtagccgaggtggacactgtgcggcgggctctccggggtgccaacgtcatcgcgggtgtatggctggaggaggcggggcagaagctgagtatctacaatgccctgaagaaagacctgctgccatccgacatggccgtggccctgttggaagcccaggccggcaccgggcacatcatcgaccccgccaccagcgcccggctgaccgtggacgaggcagtgcgtgctggcctggtgggccccgagtttcatgagaagctgctatcagccgagaaggctgtgacagggtacagggacccctacacagggcagagcgtctccctgttccaggccctgaagaagggcctcattccccgggagcagggcctgcgcctgttggacgcccagctgtccacgggcggcatcgtggaccccagcaagagccaccgcgtgcccctggatgtcgcctgcgcccgaggctgcctggatgaggagaccagcagggccctgtcggcaccaagggccgacgccaaggcctacagtgaccccagcacaggggagccggccacctacggcgagctccagcagcggtgccggcccgaccagctgaccgggctgagcctgctgccgctctcagaaaaggctgctcgggcccggcaggaggagctctactcagagctgcaggcccgtgagacctttgaaaagaccccggttgaggtccccgtgggtggcttcaagggcaggacggtgacggtgtgggagctcatcagctctgagtacttcactgcggagcagcggcaggagctgttgcgtcagttccgcacgggcaaggtcaccgtggagaaggtcatcaagattctcattaccatcgtggaggaggtggagaccctgcggcaggagaggctgtccttcagcggcctccgtgcccctgtgccagccagcgagctcctggcttccggggtcctcagcagagcccagtttgagcagctcaaggacggcaagacgacggtcaaggacctttcggagctgggctccgtgcggacgctgctgcagggcagtggctgcctcgccggcatctacctggaggacaccaaggagaaggtgtccatctacgaggccatgcgccggggcctgctgagagccacaacggctgcgctcctgctggaggcgcaggcggccactggcttcctggtggaccccgtgcggaaccagcgcctgtatgtccacgaggccgtgaaggcgggcgtggtgggccccgagcttcacgagcagctgctgtctgccgagaaggccgtcaccggctacagagacccctactcgggcagcaccatctccctcttccaggccatgcagaagggcctggttctccggcagcacggcatccgcctgctggaggcccagatcgccacgggcggcatcatcgaccccgtgcacagccaccgcgtgcctgtggacgtggcctaccagcgcggctacttcagtgaggagatgaaccgcgtcctggcggaccccagcgacgacaccaagggcttctttgaccccaacacgcatgagaacctcacgtacaggcagctgctggagcggtgcgtggaggaccccgagacgggcttgcgccttctgccactgaaaggggcggagaaggctgaggtggtggagaccacgcaggtgtacactgaggaggagacaagaagggcatttgaagagacacagatcgacattcccggcggcggcagccacggcggctccaccatgtccctgtgggaggtgatgcagtcggacctgatccccgaggagcagcgggcccagctgatggctgacttccaggccggccgggtgaccaaggaacgcatgatcatcatcatcatcgagatcattgagaagacagagatcatccgccagcagggtctggcctcctacgactacgtgcgccgccgcctcacggctgaggacctgttcgaggctcggatcatctctctcgagacctacaacctgctccgggagggcaccaggagcctccgtgaggctctcgaggcggagtccgcctggtgctacctctatggcacgggctccgtggctggtgtctacctgcccggttccaggcagacactgagcatctaccaggctctcaagaaagggctgctgagtgccgaggtggcccgcctgctgctggaggcacaggcagccacaggcttcctgctggacccggtgaagggggagcggctgactgtggatgaggctgtgcggaagggcctcgtggggcccgagctgcacgaccgcctgctctcggctgagcgggcggtcaccggctaccgtgacccctacaccgagcagaccatctcgctcttccaggccatgaagaaggagctgatccctactgaggaggccctgcggctgctggatgcccagctggccaccggcggcatcgtggacccccgcctgggcttccaccttcccctggaggtggcttaccagcgtggctacctcaacaaggacacgcacgaccagctgtcagagcccagcgaggtgcgcagctacgtggacccgtccaccgacgagcgcctcagctacacgcagctgctcaggcggtgccgtcgtgacgacggcaccggccagctgctcctgccactgtcggacgcccgcaagctgaccttccgtggcctgcggaagcagatcaccatggaggagctggtgcgctcgcaggtcatggacgaggccacggcgctgcagctgcgggagggcctgacctccatcgaggaggtcaccaagaacttgcagaagttcctggaaggcaccagctgcatcgctggtgtcttcgtggacgccaccaaggaacggctctcggtgtaccaggccatgaagaagggcatcatccgccccggcacagcctttgagctcctggaggcgcaggcggccaccggttacgtcatcgaccccatcaagggactgaagctgacggtggaggaggctgtgcgtatgggcattgtgggccccgagttcaaggacaagctgctgtcggccgagcgcgccgtcactgggtacaaggacccctactctgggaagctcatctccctcttccaggccatgaagaagggcctgatcctgaaggaccatggcatccgcctgctggaggcccagatcgccacgggcggcatcatcgaccctgaggagagccaccggctgcccgtggaggtggcctacaagcgcggcctcttcgatgaggagatgaacgagatcctgaccgacccctcggacgacaccaagggcttctttgaccctaacacggaggagaacctcacctacctgcagctgatggagcgttgtatcactgacccccagacgggcctgtgtctcttgccgctgaaggagaagaagcgggagcggaagacgtcctccaagtcctccgtgcgcaagcgccgagtggtcatcgtggaccccgagacgggcaaggagatgtcagtgtacgaggcctaccgcaagggcctgattgaccaccagacgtacctggagctgtccgagcaggagtgcgagtgggaggagatcaccatctcctcctcggacggcgtggtcaagtccatgatcatcgaccgccgctccgggcgccagtacgacatcgatgatgccatcgccaagaacctcatcgaccgctcggcactggaccagtaccgcgccggcacgctctccatcaccgagttcgccgacatgctctcgggcaacgccggtggtttccgctcccgttcctcctcggtgggatcctcctcctcctaccccatcagccccgccgtctccaggacccagctggcctcctggtcagaccccactgaggagacgggccccgtggctggcatcctggacacggagacgctggagaaggtgtccatcaccgaggccatgcaccggaacctggtggataacatcacggggcagcggctgctggaggcgcaggcctgcaccgggggcatcatcgaccccagcaccggtgagcgcttccctgtcaccgacgccgtcaacaagggcctggtggacaagatcatggtggaccgcatcaacctggcccagaaggccttctgcggcttcgaggacccacgcaccaagaccaagatgtcggccgcccaggccctgaagaagggctggctctactacgaggccggccagcgcttcctggaggtgcagtacctgaccggcggcttgatcgagcccgacacgccgggccgcgtgcccctggacgaggccctgcagcgcggcacggtggacgcccgcaccgcacagaagctgcgtgacgtgggcgcctactccaagtacctcacctgccctaagaccaagctcaagatctcctataaggacgcgctggaccgcagcatggtggaggagggcacggggctgcggctgctggaggctgccgcgcagtccaccaagggctactacagcccctacagcgtcagcggctccggctctaccgctggctcccgcaccggctcgcgcaccggctcccgggccggctcccgccgcggcagctttgacgccaccggctccggcttctccatgaccttctcttcatcctcctactcctcctcgggctacggccgccgctacgcctcggggtcctcggcctccctggggggccctgagtctgccgtggcctgaggctgcctgcgcccaccccgctctgcatgcggcccagcccggctcccaccgaggcgcgggggccgttttcaacgcttaaaggtgtcttcctcccaagtggtgcctaaagtttaaccaaaaagaccagactaatatattaatatatatctgctgtccagacagcctgtatcttgggggacagggctggcccagccctgctggccgcctcaccccctcgggtctcctcactcccttctacctgccactcacacagccaggtgccttggagggtcccaagctgggccccagcccaccctcctgtcttcccagggtagcccgcctgccagtcctagctgcacagggcagctgggcccaaccctgtctgtagagggccctggtgtttctagcactggcctgcacggtgggccttgctggggacggggggccccagtcagcctctctcccagtctacccagagaagccccttccccatgggaagacgaggccctcgggcccagcccccacagtgctgtctgatctgtgctttccagctcaccccccacactcactcctgagacccctggcctccggcgtcagcctccagcctctgttcccctagtaagtgccttccatgtcggcctctaaccccaggccccgaggacccagacccagtggggaggcggacgttccagccggcatggctgggaactgcagacctgtcctcctggtgggtccaggggcccctccagcttgtggagccccacactggggtgccgcctgcccgtctctctcccatggagccccagccccctttgggcccagggacaccagccaggctctgtgctgaccctcctgttgcacccagccctggtctcagcagcgaccacccctgcctccaccctctgagctttgcatgttccactaaccccgggcgggtggcaggtggaggtgtcaggctgctggcgcctctgcaagggcagaacactaacctgaccgtgggcggggccttgcggtatccgcccccaataaaagcaattccaaccttagtctggctgcggcggcagagctgaagtgagcggagccaccaggaggccatgtcgggtgaggacgctgaggtccgggcagtctctgaagatgtctccaatggaagcagtggctcgcccagccctggggacacactgccctggaaccttgggaaaacgcagcggagccggcgcagcgggggtggcgctgggagcaacgggagtgtcctggacccagctgagcgggcggtcattcgcatcgcagatgagcgggatcgtgtgcagaagaaaaccttcaccaagtgggtcaacaagcacctcatcaaggcccagaggcacatcagtgacctgtatgaagacctccgcgatggccacaacctcatctccctgctggaggtcctctcgggggacagcctgccccgggagaaggggaggatgcgtttccacaagctgcagaatgtccagattgccctggactacctccggcaccgccaggtgaagctggtgaacatcaggaatgatgacatcgctgacggcaaccccaagctgacccttggcctcatctggacaatcattctgcacttccagatctcagatatccaggtgagtgggcagtcggaggacatgacggccaaggagaagctgctgctgtggtcgcagcgaatggtggaggggtaccagggcctgcgatgcgacaacttcacctccagctggagagacggccgcctcttcaatgccatcatccaccggcacaagcccctgctcatcgacatgaacaaggtgtaccggcagaccaacctggagaacctggaccaggccttctctgtggcggagcgggacctgggagtgacgcggctcctggaccctgaggacgtggatgtccctcagcccgacgagaagtccatcatcacctacgtctcgtcgctgtatgacgccatgccccgcgtgccggacgtgcaggatggggtgagggccaacgagctgcagctgcgctggcaggagtaccgggagctggtgctgctgctgcttcagtggatgcgacaccacacggccgcctttgaggaacgcaggttcccctccagcttcgaggagattgagatcctgtggtctcagttcctgaagtttaaggagatggagctaccagccaaggaggccgacaagaacaggtccaagggcatctaccaatccctggagggagcggtgcaagcaggccagctcaaggtgccccctggctaccacccgctggatgtggagaaggagtggggcaagctgcacgtggccatcctggagcgggagaagcagctccgcagcgagtttgagaggctggagtgtcttcagcgcatcgtgaccaagctgcagatggaggcggggctgtgtgaggagcagctgaaccaggccgacgccctgctgcagtcggatgtccggctgctggctgcaggcaaagtgccacagcgggcgggggaggtggaacgggacttggacaaggcggatagcatgatccggctgctcttcaacgacgtgcagaccctcaaggatggacggcacccgcagggcgagcagatgtaccgcagggtgtaccgtctgcacgagcgcctggtagccatccgcaccgagtacaacctacggctgaaggcaggcgtggcggcccctgcaacccaggtggcccaggtgactctgcagagtgtgcagaggcgccccgagctggaggactccactctgcgctacctgcaggacctgctggcctgggtggaggagaaccagcaccgtgtggatggcgctgagtggggtgtggacctgcccagcgtggaggcgcagctgggcagccaccgaggcctgcaccagtccatcgaagaattccgggccaagatcgagcgggcacggagtgacgagggccagctctcccccgccacccggggtgcctaccgtgactgcctgggtcggctggacctgcagtacgccaagctgctgaactcctccaaggcccgcctcaggtccctggagagcttgcacagctttgtggcagccgccactaaggagctaatgtggctgaatgagaaggaggaggaggaggtgggcttcgactggagcgaccgcaacaccaacatgaccgccaagaaggagagctactcggcgctgatgcgggagctggagctgaaggagaagaagatcaaggagctccaaaatgctggggaccggctgctgcgggaggaccacccggcccggcccacggtggagtccttccaggcggccctgcagacgcagtggagctggatgctacagctgtgctgctgtatcgaggcacacctgaaggagaacgctgcctactttcagttcttctcagatgtgcgggaggccgaggggcagttgcagaagctgcaggaggcactgcgtaggaaatacagttgtgatcgctccgccaccgtcacccggctggaggacctgctgcaggatgcccaggacgagaaggaacagctgaacgagtacaagggccacctctcaggcctggccaagcgggccaaggccgtcgtgcagctgaagccccg

SEQ ID NO: 648 - DNA, 32765 bp, Homo sapiens
  misc_feature (151)..(151): second gene starts at position 151
atgtctcccgccccaagacccccccgttgtctcctgctccccctgctcacgctcggcaccgcgctcgcctccctcggctcggcccaaagcagcagcttcagccccgaagcctggctacagcaatatggctacctgcctcccggggacctacgtacccacacacagcgctcaccccagtcactctcagcggccatcgctgccatgcagaagttttacggcttgcaagtaacaggcaaagctgatgcagacaccatgaaggccatgaggcgcccccgatgtggtgttccagacaagtttggggctgagatcaaggccaatgttcgaaggaagcgctacgccatccagggtctcaaatggcaacataatgaaatcactttctgcatccagaattacacccccaaggtgggcgagtatgccacatacgaggccattcgcaaggcgttccgcgtgtgggagagtgccacaccactgcgcttccgcgaggtgccctatgcctacatccgtgagggccatgagaagcaggccgacatcatgatcttctttgccgagggcttccatggcgacagcacgcccttcgatggtgagggcggcttcctggcccatgcctacttcccaggccccaacattggaggagacacccactttgactctgccgagccttggactgtcaggaatgaggatctgaatggaaatgacatcttcctggtggctgtgcacgagctgggccatgccctggggctcgagcattccagtgacccctcggccatcatggcacccttttaccagtggatggacacggagaattttgtgctgcccgatgatgaccgccggggcatccagcaactttatgggggtgagtcagggttccccaccaagatgccccctcaacccaggactacctcccggccttctgttcctgataaacccaaaaaccccacctatgggcccaacatctgtgacgggaactttgacaccgtggccatgctccgaggggagatgtttgtcttcaaggagcgctggttctggcgggtgaggaataaccaagtgatggatggatacccaatgcccattggccagttctggcggggcctgcctgcgtccatcaacactgcctacgagaggaaggatggcaaattcgtcttcttcaaaggcggttccgctgccctgaggcactcttccagccttccttcctgggcatggagtcctgtggcatccacgaaactaccttcaactccatcatgaagtgtgacgtggacatccgcaaagacctgtacgccaacacagtgctgtctggcggcaccaccatgtaccctggcattgccgacaggatgcagaaggagatcactgccctggcacccagcacaatgaagatcaagatcattgctcctcctgagcgcaagtactccgtgtggatcggcggctccatcctggcctcgctgtccaccttccagcagatgtggatcagcaagcaggagtatgacgagtccggcccctccatcgtccaccgcaaatgcttctaggcggactatgacttagttgcgttacaccctttcttgacaaaacctaacttgcgcagaaaacaagatgagattggcatggctttatttgttttttttgttttgttttggttttttttttttttttggcttgactcaggatttaaaaactggaacggtgaaggtgacagcagtcggttggagcgagcatcccccaaagttcacaatgtggccgaggactttgattgcacattgttgtttttttaatagtcattccaaatatgagatgcgttgttacaggaagtcccttgccatcctaaaagccaccccacttctctctaaggagaatggcccagtcctctcccaagtccacacaggggaggtgatagcattgctttcgtgtaaattatgtaatgcaaaatttttttaatcttcgccttaatacttttttattttgttttattttgaatgatgagccttcgtgcccccccttcccccttttttgtcccccaacttgagatgtatgaaggcttttggtctccctgggagtgggtggaggcagccagggcttacctgtacactgacttgagaccagttgaataaaagtgcacaccttaaaaatgaaccgccgagaccgcgtccgccccgcgagcacagagcctcgcctttgccgatccgccgcccgtccacacccgccgccagctcaccatggatgatgatatcgccgcgctcgtcgtcgacaacggctccggcatgtgcaaggccggcttcgcgggcgacgatgccccccgggccgtcttcccctccatcgtggggcgccccaggcaccagggcgtgatggtgggcatgggtcagaaggattcctatgtgggcgacgaggcccagagcaagagaggcatcctcaccctgaagtaccccatcgagcacggcatcgtcaccaactgggacgacatggagaaaatctggcaccacaccttctacaatgagctgcgtgtggctcccgaggagcaccccgtgctgctgaccgaggcccccctgaaccccaaggccaaccgcgagaagatgacccagatcatgtttgagaccttcaacaccccagccatgtacgttgctatccaggctgtgctatccctgtacgcctctggccgtaccactggcatcgtgatggactccggtgacggggtcacccacactgtgcccatctacgaggggtatgccctcccccatgccatcctgcgtctggacctggctggccgggacctgactgactacctcatgaagatcctcaccgagcgcggctacagcttcaccaccacggccgagcgggaaatcgtgcgtgacattaaggagaagctgtgctacgtcgccctggacttcgagcaagagatggccacggctgcttccagctcctccctggagaagagctacgagctgcctgacggccaggtcatcaccattggcaatgagcggttccgctgccctgaggcactcttccagccttccttcctgggcatggagtcctgtggcatccacgaaactaccttcaactccatcatgaagtgtgacgtggacatccgcaaagacctgtacgccaacacagtgctgtctggcggcaccaccatgtaccctggcattgccgacaggatgcagaaggagatcactgccctggcacccagcacaatgaagatcaagatcattgctcctcctgagcgcaagtactccgtgtggatcggcggctccatcctggcctcgctgtccaccttccagcagatgtggatcagcaagcaggagtatgacgagtccggcccctccatcgtccaccgcaaatgcttctaggcggactatgacttagttgcgttacaccctttcttgacaaaacctaacttgcgcagaaaacaagatgagattggcatggctttatttgttttttttgttttgttttggttttttttttttttttggcttgactcaggatttaaaaactggaacggtgaaggtgacagcagtcggttggagcgagcatcccccaaagttcacaatgtggccgaggactttgattgcacattgttgtttttttaatagtcattccaaatatgagatgcgttgttacaggaagtcccttgccatcctaaaagccaccccacttctctctaaggagaatggcccagtcctctcccaagtccacacaggggaggtgatagcattgctttcgtgtaaattatgtaatgcaaaatttttttaatcttcgccttaatacttttttattttgttttattttgaatgatgagccttcgtgcccccccttcccccttttttgtcccccaacttgagatgtatgaaggcttttggtctccctgggagtgggtggaggcagccagggcttacctgtacactgacttgagaccagttgaataaaagtgcacaccttaaaaatgaaccgccgagaccgcgtccgccccgcgagcacagagcctcgcctttgccgatccgccgcccgtccacacccgccgccagctcaccatggatgatgatatcgccgcgctcgtcgtcgacaacggctccggcatgtgcaaggccggcttcgcgggcgacgatgccccccgggccgtcttcccctccatcgtggggcgccccaggcaccagggcgtgatggtgggcatgggtcagaaggattcctatgtgggcgacgaggcccagagcaagagaggcatcctcaccctgaagtaccccatcgagcacggcatcgtcaccaactgggacgacatggagaaaatctggcaccacaccttctacaatgagctgcgtgtggctcccgaggagcaccccgtgctgctgaccgaggcccccctgaaccccaaggccaaccgcgagaagatgacccagatcatgtttgagaccttcaacaccccagccatgtacgttgctatccaggctgtgctatccctgtacgcctctggccgtaccactggcatcgtgatggactccggtgacggggtcacccacactgtgcccatctacgaggggtatgccctcccccatgccatcctgcgtctggacctggctggccgggacctgactgactacctcatgaagatcctcaccgagcgcggctacagcttcaccaccacggccgagcgggaaatcgtgcgtgacattaaggagaagctgtgctacgtcgccctggacttcgagcaagagatggccacggctgcttccagctcctccctggagaagagctacgagctgcctgacggccaggtcatcaccattggcaatgagcggttccgctgccctgaggcactcttccagccttccttcctgggcatggagtcctgtggcatccacgaaactaccttcaactccatcatgaagtgtgacgtggacatccgcaaagacctgtacgccaacacagtgctgtctggcggcaccaccatgtaccctggcattgccgacaggatgcagaaggagatcactgccctggcacccagcacaatgaagatcaagatcattgctcctcctgagcgcaagtactccgtgtggatcggcggctccatcctggcctcgctgtccaccttccagcagatgtggatcagcaagcaggagtatgacgagtccggcccctccatcgtccaccgcaaatgcttctaggcggactatgacttagttgcgttacaccctttcttgacaaaacctaacttgcgcagaaaacaagatgagattggcatggctttatttgttttttttgttttgttttggttttttttttttttttggcttgactcaggatttaaaaactggaacggtgaaggtgacagcagtcggttggagcgagcatcccccaaagttcacaatgtggccgaggactttgattgcacattgttgtttttttaatagtcattccaaatatgagatgcgttgttacaggaagtcccttgccatcctaaaagccaccccacttctctctaaggagaatggcccagtcctctcccaagtccacacaggggaggtgatagcattgctttcgtgtaaattatgtaatgcaaaatttttttaatcttcgccttaatacttttttattttgttttattttgaatgatgagccttcgtgcccccccttcccccttttttgtcccccaacttgagatgtatgaaggcttttggtctccctgggagtgggtggaggcagccagggcttacctgtacactgacttgagaccagttgaataaaagtgcacaccttaaaaatgaaccgccgagaccgcgtccgccccgcgagcacagagcctcgcctttgccgatccgccgcccgtccacacccgccgccagctcaccatggatgatgatatcgccgcgctcgtcgtcgacaacggctccggcatgtgcaaggccggcttcgcgggcgacgatgccccccgggccgtcttcccctccatcgtggggcgccccaggcaccagggcgtgatggtgggcatgggtcagaaggattcctatgtgggcgacgaggcccagagcaagagaggcatcctcaccctgaagtaccccatcgagcacggcatcgtcaccaactgggacgacatggagaaaatctggcaccacaccttctacaatgagctgcgtgtggctcccgaggagcaccccgtgctgctgaccgaggcccccctgaaccccaaggccaaccgcgagaagatgacccagatcatgtttgagaccttcaacaccccagccatgtacgttgctatccaggctgtgctatccctgtacgcctctggccgtaccactggcatcgtgatggactccggtgacggggtcacccacactgtgcccatctacgaggggtatgccctcccccatgccatcctgcgtctggacctggctggccgggacctgactgactacctcatgaagatcctcaccgagcgcggctacagcttcaccaccacggccgagcgggaaatcgtgcgtgacattaaggagaagctgtgctacgtcgccctggacttcgagcaagagatggccacggctgcttccagctcctccctggagaagagctacgagctgcctgacggccaggtcatcaccattggcaatgagcggttccgctgccctgaggcactcttccagccttccttcctgggcatggagtcctgtggcatccacgaaactaccttcaactccatcatgaagtgtgacgtggacatccgcaaagacctgtacgccaacacagtgctgtctggcggcaccaccatgtaccctggcattgccgacaggatgcagaaggagatcactgccctggcacccagcacaatgaagatcaagatcattgctcctcctgagcgcaagtactccgtgtggatcggcggctccatcctggcctcgctgtccaccttccagcagatgtggatcagcaagcaggagtatgacgagtccggcccctccatcgtccaccgcaaatgcttctaggcggactatgacttagttgcgttacaccctttcttgacaaaacctaacttgcgcagaaaacaagatgagattggcatggctttatttgttttttttgttttgttttggttttttttttttttttggcttgactcaggatttaaaaactggaacggtgaaggtgacagcagtcggttggagcgagcatcccccaaagttcacaatgtggccgaggactttgattgcacattgttgtttttttaatagtcattccaaatatgagatgcgttgttacaggaagtcccttgccatcctaaaagccaccccacttctctctaaggagaatggcccagtcctctcccaagtccacacaggggaggtgatagcattgctttcgtgtaaattatgtaatgcaaaatttttttaatcttcgccttaatacttttttattttgttttattttgaatgatgagccttcgtgcccccccttcccccttttttgtcccccaacttgagatgtatgaaggcttttggtctccctgggagtgggtggaggcagccagggcttacctgtacactgacttgagaccagttgaataaaagtgcacaccttaaaaatgaaccgccgagaccgcgtccgccccgcgagcacagagcctcgcctttgccgatccgccgcccgtccacacccgccgccagctcaccatggatgatgatatcgccgcgctcgtcgtcgacaacggctccggcatgtgcaaggccggcttcgcgggcgacgatgccccccgggccgtcttcccctccatcgtggggcgccccaggcaccagggcgtgatggtgggcatgggtcagaaggattcctatgtgggcgacgaggcccagagcaagagaggcatcctcaccctgaagtaccccatcgagcacggcatcgtcaccaactgggacgacatggagaaaatctggcaccacaccttctacaatgagctgcgtgtggctcccgaggagcaccccgtgctgctgaccgaggcccccctgaaccccaaggccaaccgcgagaagatgacccagatcatgtttgagaccttcaacaccccagccatgtacgttgctatccaggctgtgctatccctgtacgcctctggccgtaccactggcatcgtgatggactccggtgacggggtcacccacactgtgcccatctacgaggggtatgccctcccccatgccatcctgcgtctggacctggctggccgggacctgactgactacctcatgaagatcctcaccgagcgcggctacagcttcaccaccacggccgagcgggaaatcgtgcgtgacattaaggagaagctgtgctacgtcgccctggacttcgagcaagagatggccacggctgcttccagctcctccctggagaagagctacgagctgcctgacggccaggtcatcaccattggcaatgagcggttccgctgccctgaggcactcttccagccttccttcctgggcatggagtcctgtggcatccacgaaactaccttcaactccatcatgaagtgtgacgtggacatccgcaaagacctgtacgccaacacagtgctgtctggcggcaccaccatgtaccctggcattgccgacaggatgcagaaggagatcactgccctggcacccagcacaatgaagatcaagatcattgctcctcctgagcgcaagtactccgtgtggatcggcggctccatcctggcctcgctgtccaccttccagcagatgtggatcagcaagcaggagtatgacgagtccggcccctccatcgtccaccgcaaatgcttctaggcggactatgacttagttgcgttacaccctttcttgacaaaacctaacttgcgcagaaaacaagatgagattggcatggctttatttgttttttttgttttgttttggttttttttttttttttggcttgactcaggatttaaaaactggaacggtgaaggtgacagcagtcggttggagcgagcatcccccaaagttcacaatgtggccgaggactttgattgcacattgttgtttttttaatagtcattccaaatatgagatgcgttgttacaggaagtcccttgccatcctaaaagccaccccacttctctctaaggagaatggcccagtcctctcccaagtccacacaggggaggtgatagcattgctttcgtgtaaattatgtaatgcaaaatttttttaatcttcgccttaatacttttttattttgttttattttgaatgatgagccttcgtgcccccccttcccccttttttgtcccccaacttgagatgtatgaaggcttttggtctccctgggagtgggtggaggcagccagggcttacctgtacactgacttgagaccagttgaataaaagtgcacaccttaaaaatgaaccgccgagaccgcgtccgccccgcgagcacagagcctcgcctttgccgatccgccgcccgtccacacccgccgccagctcaccatggatgatgatatcgccgcgctcgtcgtcgacaacggctccggcatgtgcaaggccggcttcgcgggcgacgatgccccccgggccgtcttcccctccatcgtggggcgccccaggcaccagggcgtgatggtgggcatgggtcagaaggattcctatgtgggcgacgaggcccagagcaagagaggcatcctcaccctgaagtaccccatcgagcacggcatcgtcaccaactgggacgacatggagaaaatctggcaccacaccttctacaatgagctgcgtgtggctcccgaggagcaccccgtgctgctgaccgaggcccccctgaaccccaaggccaaccgcgagaagatgacccagatcatgtttgagaccttcaacaccccagccatgtacgttgctatccaggctgtgctatccctgtacgcctctggccgtaccactggcatcgtgatggactccggtgacggggtcacccacactgtgcccatctacgaggggtatgccctcccccatgccatcctgcgtctggacctggctggccgggacctgactgactacctcatgaagatcctcaccgagcgcggctacagcttcaccaccacggccgagcgggaaatcgtgcgtgacattaaggagaagctgtgctacgtcgccctggacttcgagcaagagatggccacggctgcttccagctcctccctggagaagagctacgagctgcctgacggccaggtcatcaccattggcaatgagcggttccgctgccctgaggcactcttccagccttccttcctgggcatggagtcctgtggcatccacgaaactaccttcaactccatcatgaagtgtgacgtggacatccgcaaagacctgtacgccaacacagtgctgtctggcggcaccaccatgtaccctggcattgccgacaggatgcagaaggagatcactgccctggcacccagcacaatgaagatcaagatcattgctcctcctgagcgcaagtactccgtgtggatcggcggctccatcctggcctcgctgtccaccttccagcagatgtggatcagcaagcaggagtatgacgagtccggcccctccatcgtccaccgcaaatgcttctaggcggactatgacttagttgcgttacaccctttcttgacaaaacctaacttgcgcagaaaacaagatgagattggcatggctttatttgttttttttgttttgttttggttttttttttttttttggcttgactcaggatttaaaaactggaacggtgaaggtgacagcagtcggttggagcgagcatcccccaaagttcacaatgtggccgaggactttgattgcacattgttgtttttttaatagtcattccaaatatgagatgcgttgttacaggaagtcccttgccatcctaaaagccaccccacttctctctaaggagaatggcccagtcctctcccaagtccacacaggggaggtgatagcattgctttcgtgtaaattatgtaatgcaaaatttttttaatcttcgccttaatacttttttattttgttttattttgaatgatgagccttcgtgcccccccttcccccttttttgtcccccaacttgagatgtatgaaggcttttggtctccctgggagtgggtggaggcagccagggcttacctgtacactgacttgagaccagttgaataaaagtgcacaccttaaaaatgaaccgccgagaccgcgtccgccccgcgagcacagagcctcgcctttgccgatccgccgcccgtccacacccgccgccagctcaccatggatgatgatatcgccgcgctcgtcgtcgacaacggctccggcatgtgcaaggccggcttcgcgggcgacgatgccccccgggccgtcttcccctccatcgtggggcgccccaggcaccagggcgtgatggtgggcatgggtcagaaggattcctatgtgggcgacgaggcccagagcaagagaggcatcctcaccctgaagtaccccatcgagcacggcatcgtcaccaactgggacgacatggagaaaatctggcaccacaccttctacaatgagctgcgtgtggctcccgaggagcaccccgtgctgctgaccgaggcccccctgaaccccaaggccaaccgcgagaagatgacccagatcatgtttgagaccttcaacaccccagccatgtacgttgctatccaggctgtgctatccctgtacgcctctggccgtaccactggcatcgtgatggactccggtgacggggtcacccacactgtgcccatctacgaggggtatgccctcccccatgccatcctgcgtctggacctggctggccgggacctgactgactacctcatgaagatcctcaccgagcgcggctacagcttcaccaccacggccgagcgggaaatcgtgcgtgacattaaggagaagctgtgctacgtcgccctggacttcgagcaagagatggccacggctgcttccagctcctccctggagaagagctacgagctgcctgacggccaggtcatcaccattggcaatgagcggttccgctgccctgaggcactcttccagccttccttcctgggcatggagtcctgtggcatccacgaaactaccttcaactccatcatgaagtgtgacgtggacatccgcaaagacctgtacgccaacacagtgctgtctggcggcaccaccatgtaccctggcattgccgacaggatgcagaaggagatcactgccctggcacccagcacaatgaagatcaagatcattgctcctcctgagcgcaagtactccgtgtggatcggcggctccatcctggcctcgctgtccaccttccagcagatgtggatcagcaagcaggagtatgacgagtccggcccctccatcgtccaccgcaaatgcttctaggcggactatgacttagttgcgttacaccctttcttgacaaaacctaacttgcgcagaaaacaagatgagattggcatggctttatttgttttttttgttttgttttggttttttttttttttttggcttgactcaggatttaaaaactggaacggtgaaggtgacagcagtcggttggagcgagcatcccccaaagttcacaatgtggccgaggactttgattgcacattgttgtttttttaatagtcattccaaatatgagatgcgttgttacaggaagtcccttgccatcctaaaagccaccccacttctctctaaggagaatggcccagtcctctcccaagtccacacaggggaggtgatagcattgctttcgtgtaaattatgtaatgcaaaatttttttaatcttcgccttaatacttttttattttgttttattttgaatgatgagccttcgtgcccccccttcccccttttttgtcccccaacttgagatgtatgaaggcttttggtctccctgggagtgggtggaggcagccagggcttacctgtacactgacttgagaccagttgaataaaagtgcacaccttaaaaatgaaccgccgagaccgcgtccgccccgcgagcacagagcctcgcctttgccgatccgccgcccgtccacacccgccgccagctcaccatggatgatgatatcgccgcgctcgtcgtcgacaacggctccggcatgtgcaaggccggcttcgcgggcgacgatgccccccgggccgtcttcccctccatcgtggggcgccccaggcaccagggcgtgatggtgggcatgggtcagaaggattcctatgtgggcgacgaggcccagagcaagagaggcatcctcaccctgaagtaccccatcgagcacggcatcgtcaccaactgggacgacatggagaaaatctggcaccacaccttctacaatgagctgcgtgtggctcccgaggagcaccccgtgctgctgaccgaggcccccctgaaccccaaggccaaccgcgagaagatgacccagatcatgtttgagaccttcaacaccccagccatgtacgttgctatccaggctgtgctatccctgtacgcctctggccgtaccactggcatcgtgatggactccggtgacggggtcacccacactgtgcccatctacgaggggtatgccctcccccatgccatcctgcgtctggacctggctggccgggacctgactgactacctcatgaagatcctcaccgagcgcggctacagcttcaccaccacggccgagcgggaaatcgtgcgtgacattaaggagaagctgtgctacgtcgccctggacttcgagcaagagatggccacggctgcttccagctcctccctggagaagagctacgagctgcctgacggccaggtcatcaccattggcaatgagcggttccgctgccctgaggcactcttccagccttccttcctgggcatggagtcctgtggcatccacgaaactaccttcaactccatcatgaagtgtgacgtggacatccgcaaagacctgtacgccaacacagtgctgtctggcggcaccaccatgtaccctggcattgccgacaggatgcagaaggagatcactgccctggcacccagcacaatgaagatcaagatcattgctcctcctgagcgcaagtactccgtgtggatcggcggctccatcctggcctcgctgtccaccttccagcagatgtggatcagcaagcaggagtatgacgagtccggcccctccatcgtccaccgcaaatgcttctaggcggactatgacttagttgcgttacaccctttcttgacaaaacctaacttgcgcagaaaacaagatgagattggcatggctttatttgttttttttgttttgttttggttttttttttttttttggcttgactcaggatttaaaaactggaacggtgaaggtgacagcagtcggttggagcgagcatcccccaaagttcacaatgtggccgaggactttgattgcacattgttgtttttttaatagtcattccaaatatgagatgcgttgttacaggaagtcccttgccatcctaaaagccaccccacttctctctaaggagaatggcccagtcctctcccaagtccacacaggggaggtgatagcattgctttcgtgtaaattatgtaatgcaaaatttttttaatcttcgccttaatacttttttattttgttttattttgaatgatgagccttcgtgcccccccttcccccttttttgtcccccaacttgagatgtatgaaggcttttggtctccctgggagtgggtggaggcagccagggcttacctgtacactgacttgagaccagttgaataaaagtgcacaccttaaaaatgaaccgccgagaccgcgtccgccccgcgagcacagagcctcgcctttgccgatccgccgcccgtccacacccgccgccagctcaccatggatgatgatatcgccgcgctcgtcgtcgacaacggctccggcatgtgcaaggccggcttcgcgggcgacgatgccccccgggccgtcttcccctccatcgtggggcgccccaggcaccagggcgtgatggtgggcatgggtcagaaggattcctatgtgggcgacgaggcccagagcaagagaggcatcctcaccctgaagtaccccatcgagcacggcatcgtcaccaactgggacgacatggagaaaatctggcaccacaccttctacaatgagctgcgtgtggctcccgaggagcaccccgtgctgctgaccgaggcccccctgaaccccaaggccaaccgcgagaagatgacccagatcatgtttgagaccttcaacaccccagccatgtacgttgctatccaggctgtgctatccctgtacgcctctggccgtaccactggcatcgtgatggactccggtgacggggtcacccacactgtgcccatctacgaggggtatgccctcccccatgccatcctgcgtctggacctggctggccgggacctgactgactacctcatgaagatcctcaccgagcgcggctacagcttcaccaccacggccgagcgggaaatcgtgcgtgacattaaggagaagctgtgctacgtcgccctggacttcgagcaagagatggccacggctgcttccagctcctccctggagaagagctacgagctgcctgacggccaggtcatcaccattggcaatgagcggttccgctgccctgaggcactcttccagccttccttcctgggcatggagtcctgtggcatccacgaaactaccttcaactccatcatgaagtgtgacgtggacatccgcaaagacctgtacgccaacacagtgctgtctggcggcaccaccatgtaccctggcattgccgacaggatgcagaaggagatcactgccctggcacccagcacaatgaagatcaagatcattgctcctcctgagcgcaagtactccgtgtggatcggcggctccatcctggcctcgctgtccaccttccagcagatgtggatcagcaagcaggagtatgacgagtccggcccctccatcgtccaccgcaaatgcttctaggcggactatgacttagttgcgttacaccctttcttgacaaaacctaacttgcgcagaaaacaagatgagattggcatggctttatttgttttttttgttttgttttggttttttttttttttttggcttgactcaggatttaaaaactggaacggtgaaggtgacagcagtcggttggagcgagcatcccccaaagttcacaatgtggccgaggactttgattgcacattgttgtttttttaatagtcattccaaatatgagatgcgttgttacaggaagtcccttgccatcctaaaagccaccccacttctctctaaggagaatggcccagtcctctcccaagtccacacaggggaggtgatagcattgctttcgtgtaaattatgtaatgcaaaatttttttaatcttcgccttaatacttttttattttgttttattttgaatgatgagccttcgtgcccccccttcccccttttttgtcccccaacttgagatgtatgaaggcttttggtctccctgggagtgggtggaggcagccagggcttacctgtacactgacttgagaccagttgaataaaagtgcacaccttaaaaatgaaccgccgagaccgcgtccgccccgcgagcacagagcctcgcctttgccgatccgccgcccgtccacacccgccgccagctcaccatggatgatgatatcgccgcgctcgtcgtcgacaacggctccggcatgtgcaaggccggcttcgcgggcgacgatgccccccgggccgtcttcccctccatcgtggggcgccccaggcaccagggcgtgatggtgggcatgggtcagaaggattcctatgtgggcgacgaggcccagagcaagagaggcatcctcaccctgaagtaccccatcgagcacggcatcgtcaccaactgggacgacatggagaaaatctggcaccacaccttctacaatgagctgcgtgtggctcccgaggagcaccccgtgctgctgaccgaggcccccctgaaccccaaggccaaccgcgagaagatgacccagatcatgtttgagaccttcaacaccccagccatgtacgttgctatccaggctgtgctatccctgtacgcctctggccgtaccactggcatcgtgatggactccggtgacggggtcacccacactgtgcccatctacgaggggtatgccctcccccatgccatcctgcgtctggacctggctggccgggacctgactgactacctcatgaagatcctcaccgagcgcggctacagcttcaccaccacggccgagcgggaaatcgtgcgtgacattaaggagaagctgtgctacgtcgccctggacttcgagcaagagatggccacggctgcttccagctcctccctggagaagagctacgagctgcctgacggccaggtcatcaccattggcaatgagcggttccgctgccctgaggcactcttccagccttccttcctgggcatggagtcctgtggcatccacgaaactaccttcaactccatcatgaagtgtgacgtggacatccgcaaagacctgtacgccaacacagtgctgtctggcggcaccaccatgtaccctggcattgccgacaggatgcagaaggagatcactgccctggcacccagcacaatgaagatcaagatcattgctcctcctgagcgcaagtactccgtgtggatcggcggctccatcctggcctcgctgtccaccttccagcagatgtggatcagcaagcaggagtatgacgagtccggcccctccatcgtccaccgcaaatgcttctaggcggactatgacttagttgcgttacaccctttcttgacaaaacctaacttgcgcagaaaacaagatgagattggcatggctttatttgttttttttgttttgttttggttttttttttttttttggcttgactcaggatttaaaaactggaacggtgaaggtgacagcagtcggttggagcgagcatcccccaaagttcacaatgtggccgaggactttgattgcacattgttgtttttttaatagtcattccaaatatgagatgcgttgttacaggaagtcccttgccatcctaaaagccaccccacttctctctaaggagaatggcccagtcctctcccaagtccacacaggggaggtgatagcattgctttcgtgtaaattatgtaatgcaaaatttttttaatcttcgccttaatacttttttattttgttttattttgaatgatgagccttcgtgcccccccttcccccttttttgtcccccaacttgagatgtatgaaggcttttggtctccctgggagtgggtggaggcagccagggcttacctgtacactgacttgagaccagttgaataaaagtgcacaccttaaaaatgaaccgccgagaccgcgtccgccccgcgagcacagagcctcgcctttgccgatccgccgcccgtccacacccgccgccagctcaccatggatgatgatatcgccgcgctcgtcgtcgacaacggctccggcatgtgcaaggccggcttcgcgggcgacgatgccccccgggccgtcttcccctccatcgtggggcgccccaggcaccagggcgtgatggtgggcatgggtcagaaggattcctatgtgggcgacgaggcccagagcaagagaggcatcctcaccctgaagtaccccatcgagcacggcatcgtcaccaactgggacgacatggagaaaatctggcaccacaccttctacaatgagctgcgtgtggctcccgaggagcaccccgtgctgctgaccgaggcccccctgaaccccaaggccaaccgcgagaagatgacccagatcatgtttgagaccttcaacaccccagccatgtacgttgctatccaggctgtgctatccctgtacgcctctggccgtaccactggcatcgtgatggactccggtgacggggtcacccacactgtgcccatctacgaggggtatgccctcccccatgccatcctgcgtctggacctggctggccgggacctgactgactacctcatgaagatcctcaccgagcgcggctacagcttcaccaccacggccgagcgggaaatcgtgcgtgacattaaggagaagctgtgctacgtcgccctggacttcgagcaagagatggccacggctgcttccagctcctccctggagaagagctacgagctgcctgacggccaggtcatcaccattggcaatgagcggttccgctgccctgaggcactcttccagccttccttcctgggcatggagtcctgtggcatccacgaaactaccttcaactccatcatgaagtgtgacgtggacatccgcaaagacctgtacgccaacacagtgctgtctggcggcaccaccatgtaccctggcattgccgacaggatgcagaaggagatcactgccctggcacccagcacaatgaagatcaagatcattgctcctcctgagcgcaagtactccgtgtggatcggcggctccatcctggcctcgctgtccaccttccagcagatgtggatcagcaagcaggagtatgacgagtccggcccctccatcgtccaccgcaaatgcttctaggcggactatgacttagttgcgttacaccctttcttgacaaaacctaacttgcgcagaaaacaagatgagattggcatggctttatttgttttttttgttttgttttggttttttttttttttttggcttgactcaggatttaaaaactggaacggtgaaggtgacagcagtcggttggagcgagcatcccccaaagttcacaatgtggccgaggactttgattgcacattgttgtttttttaatagtcattccaaatatgagatgcgttgttacaggaagtcccttgccatcctaaaagccaccccacttctctctaaggagaatggcccagtcctctcccaagtccacacaggggaggtgatagcattgctttcgtgtaaattatgtaatgcaaaatttttttaatcttcgccttaatacttttttattttgttttattttgaatgatgagccttcgtgcccccccttcccccttttttgtcccccaacttgagatgtatgaaggcttttggtctccctgggagtgggtggaggcagccagggcttacctgtacactgacttgagaccagttgaataaaagtgcacaccttaaaaatgaaccgccgagaccgcgtccgccccgcgagcacagagcctcgcctttgccgatccgccgcccgtccacacccgccgccagctcaccatggatgatgatatcgccgcgctcgtcgtcgacaacggctccggcatgtgcaaggccggcttcgcgggcgacgatgccccccgggccgtcttcccctccatcgtggggcgccccaggcaccagggcgtgatggtgggcatgggtcagaaggattcctatgtgggcgacgaggcccagagcaagagaggcatcctcaccctgaagtaccccatcgagcacggcatcgtcaccaactgggacgacatggagaaaatctggcaccacaccttctacaatgagctgcgtgtggctcccgaggagcaccccgtgctgctgaccgaggcccccctgaaccccaaggccaaccgcgagaagatgacccagatcatgtttgagaccttcaacaccccagccatgtacgttgctatccaggctgtgctatccctgtacgcctctggccgtaccactggcatcgtgatggactccggtgacggggtcacccacactgtgcccatctacgaggggtatgccctcccccatgccatcctgcgtctggacctggctggccgggacctgactgactacctcatgaagatcctcaccgagcgcggctacagcttcaccaccacggccgagcgggaaatcgtgcgtgacattaaggagaagctgtgctacgtcgccctggacttcgagcaagagatggccacggctgcttccagctcctccctggagaagagctacgagctgcctgacggccaggtcatcaccattggcaatgagcggttccgctgccctgaggcactcttccagccttccttcctgggcatggagtcctgtggcatccacgaaactaccttcaactccatcatgaagtgtgacgtggacatccgcaaagacctgtacgccaacacagtgctgtctggcggcaccaccatgtaccctggcattgccgacaggatgcagaaggagatcactgccctggcacccagcacaatgaagatcaagatcattgctcctcctgagcgcaagtactccgtgtggatcggcggctccatcctggcctcgctgtccaccttccagcagatgtggatcagcaagcaggagtatgacgagtccggcccctccatcgtccaccgcaaatgcttctaggcggactatgacttagttgcgttacaccctttcttgacaaaacctaacttgcgcagaaaacaagatgagattggcatggctttatttgttttttttgttttgttttggttttttttttttttttggcttgactcaggatttaaaaactggaacggtgaaggtgacagcagtcggttggagcgagcatcccccaaagttcacaatgtggccgaggactttgattgcacattgttgtttttttaatagtcattccaaatatgagatgcgttgttacaggaagtcccttgccatcctaaaagccaccccacttctctctaaggagaatggcccagtcctctcccaagtccacacaggggaggtgatagcattgctttcgtgtaaattatgtaatgcaaaatttttttaatcttcgccttaatacttttttattttgttttattttgaatgatgagccttcgtgcccccccttcccccttttttgtcccccaacttgagatgtatgaaggcttttggtctccctgggagtgggtggaggcagccagggcttacctgtacactgacttgagaccagttgaataaaagtgcacaccttaaaaatgaaccgccgagaccgcgtccgccccgcgagcacagagcctcgcctttgccgatccgccgcccgtccacacccgccgccagctcaccatggatgatgatatcgccgcgctcgtcgtcgacaacggctccggcatgtgcaaggccggcttcgcgggcgacgatgccccccgggccgtcttcccctccatcgtggggcgccccaggcaccagggcgtgatggtgggcatgggtcagaaggattcctatgtgggcgacgaggcccagagcaagagaggcatcctcaccctgaagtaccccatcgagcacggcatcgtcaccaactgggacgacatggagaaaatctggcaccacaccttctacaatgagctgcgtgtggctcccgaggagcaccccgtgctgctgaccgaggcccccctgaaccccaaggccaaccgcgagaagatgacccagatcatgtttgagaccttcaacaccccagccatgtacgttgctatccaggctgtgctatccctgtacgcctctggccgtaccactggcatcgtgatggactccggtgacggggtcacccacactgtgcccatctacgaggggtatgccctcccccatgccatcctgcgtctggacctggctggccgggacctgactgactacctcatgaagatcctcaccgagcgcggctacagcttcaccaccacggccgagcgggaaatcgtgcgtgacattaaggagaagctgtgctacgtcgccctggacttcgagcaagagatggccacggctgcttccagctcctccctggagaagagctacgagctgcctgacggccaggtcatcaccattggcaatgagcggttccgctgccctgaggcactcttccagccttccttcctgggcatggagtcctgtggcatccacgaaactaccttcaactccatcatgaagtgtgacgtggacatccgcaaagacctgtacgccaacacagtgctgtctggcggcaccaccatgtaccctggcattgccgacaggatgcagaaggagatcactgccctggcacccagcacaatgaagatcaagatcattgctcctcctgagcgcaagtactccgtgtggatcggcggctccatcctggcctcgctgtccaccttccagcagatgtggatcagcaagcaggagtatgacgagtccggcccctccatcgtccaccgcaaatgcttctaggcggactatgacttagttgcgttacaccctttcttgacaaaacctaacttgcgcagaaaacaagatgagattggcatggctttatttgttttttttgttttgttttggttttttttttttttttggcttgactcaggatttaaaaactggaacggtgaaggtgacagcagtcggttggagcgagcatcccccaaagttcacaatgtggccgaggactttgattgcacattgttgtttttttaatagtcattccaaatatgagatgcgttgttacaggaagtcccttgccatcctaaaagccaccccacttctctctaaggagaatggcccagtcctctcccaagtccacacaggggaggtgatagcattgctttcgtgtaaattatgtaatgcaaaatttttttaatcttcgccttaatacttttttattttgttttattttgaatgatgagccttcgtgcccccccttcccccttttttgtcccccaacttgagatgtatgaaggcttttggtctccctgggagtgggtggaggcagccagggcttacctgtacactgacttgagaccagttgaataaaagtgcacaccttaaaaatgaaccgccgagaccgcgtccgccccgcgagcacagagcctcgcctttgccgatccgccgcccgtccacacccgccgccagctcaccatggatgatgatatcgccgcgctcgtcgtcgacaacggctccggcatgtgcaaggccggcttcgcgggcgacgatgccccccgggccgtcttcccctccatcgtggggcgccccaggcaccagggcgtgatggtgggcatgggtcagaaggattcctatgtgggcgacgaggcccagagcaagagaggcatcctcaccctgaagtaccccatcgagcacggcatcgtcaccaactgggacgacatggagaaaatctggcaccacaccttctacaatgagctgcgtgtggctcccgaggagcaccccgtgctgctgaccgaggcccccctgaaccccaaggccaaccgcgagaagatgacccagatcatgtttgagaccttcaacaccccagccatgtacgttgctatccaggctgtgctatccctgtacgcctctggccgtaccactggcatcgtgatggactccggtgacggggtcacccacactgtgcccatctacgaggggtatgccctcccccatgccatcctgcgtctggacctggctggccgggacctgactgactacctcatgaagatcctcaccgagcgcggctacagcttcaccaccacggccgagcgggaaatcgtgcgtgacattaaggagaagctgtgctacgtcgccctggacttcgagcaagagatggccacggctgcttccagctcctccctggagaagagctacgagctgcctgacggccaggtcatcaccattggcaatgagcggttccgctgccctgaggcactcttccagccttccttcctgggcatggagtcctgtggcatccacgaaactaccttcaactccatcatgaagtgtgacgtggacatccgcaaagacctgtacgccaacacagtgctgtctggcggcaccaccatgtaccctggcattgccgacaggatgcagaaggagatcactgccctggcacccagcacaatgaagatcaagatcattgctcctcctgagcgcaagtactccgtgtggatcggcggctccatcctggcctcgctgtccaccttccagcagatgtggatcagcaagcaggagtatgacgagtccggcccctccatcgtccaccgcaaatgcttctaggcggactatgacttagttgcgttacaccctttcttgacaaaacctaacttgcgcagaaaacaagatgagattggcatggctttatttgttttttttgttttgttttggttttttttttttttttggcttgactcaggatttaaaaactggaacggtgaaggtgacagcagtcggttggagcgagcatcccccaaagttcacaatgtggccgaggactttgattgcacattgttgtttttttaatagtcattccaaatatgagatgcgttgttacaggaagtcccttgccatcctaaaagccaccccacttctctctaaggagaatggcccagtcctctcccaagtccacacaggggaggtgatagcattgctttcgtgtaaattatgtaatgcaaaatttttttaatcttcgccttaatacttttttattttgttttattttgaatgatgagccttcgtgcccccccttcccccttttttgtcccccaacttgagatgtatgaaggcttttggtctccctgggagtgggtggaggcagccagggcttacctgtacactgacttgagaccagttgaataaaagtgcacaccttaaaaatgaaccgccgagaccgcgtccgccccgcgagcacagagcctcgcctttgccgatccgccgcccgtccacacccgccgccagctcaccatggatgatgatatcgccgcgctcgtcgtcgacaacggctccggcatgtgcaaggccggcttcgcgggcgacgatgccccccgggccgtcttcccctccatcgtggggcgccccaggcaccagggcgtgatggtgggcatgggtcagaaggattcctatgtgggcgacgaggcccagagcaagagaggcatcctcaccctgaagtaccccatcgagcacggcatcgtcaccaactgggacgacatggagaaaatctggcaccacaccttctacaatgagctgcgtgtggctcccgaggagcaccccgtgctgctgaccgaggcccccctgaaccccaaggccaaccgcgagaagatgacccagatcatgtttgagaccttcaacaccccagccatgtacgttgctatccaggctgtgctatccctgtacgcctctggccgtaccactggcatcgtgatggactccggtgacggggtcacccacactgtgcccatctacgaggggtatgccctcccccatgccatcctgcgtctggacctggctggccgggacctgactgactacctcatgaagatcctcaccgagcgcggctacagcttcaccaccacggccgagcgggaaatcgtgcgtgacattaaggagaagctgtgctacgtcgccctggacttcgagcaagagatggccacggctgcttccagctcctccctggagaagagctacgagctgcctgacggccaggtcatcaccattggcaatgagcggttccgctgccctgaggcactcttccagccttccttcctgggcatggagtcctgtggcatccacgaaactaccttcaactccatcatgaagtgtgacgtggacatccgcaaagacctgtacgccaacacagtgctgtctggcggcaccaccatgtaccctggcattgccgacaggatgcagaaggagatcactgccctggcacccagcacaatgaagatcaagatcattgctcctcctgagcgcaagtactccgtgtggatcggcggctccatcctggcctcgctgtccaccttccagcagatgtggatcagcaagcaggagtatgacgagtccggcccctccatcgtccaccgcaaatgcttctaggcggactatgacttagttgcgttacaccctttcttgacaaaacctaacttgcgcagaaaacaagatgagattggcatggctttatttgttttttttgttttgttttggttttttttttttttttggcttgactcaggatttaaaaactggaacggtgaaggtgacagcagtcggttggagcgagcatcccccaaagttcacaatgtggccgaggactttgattgcacattgttgtttttttaatagtcattccaaatatgagatgcgttgttacaggaagtcccttgccatcctaaaagccaccccacttctctctaaggagaatggcccagtcctctcccaagtccacacaggggaggtgatagcattgctttcgtgtaaattatgtaatgcaaaatttttttaatcttcgccttaatacttttttattttgttttattttgaatgatgagccttcgtgcccccccttcccccttttttgtcccccaacttgagatgtatgaaggcttttggtctccctgggagtgggtggaggcagccagggcttacctgtacactgacttgagaccagttgaataaaagtgcacaccttaaaaatgaaccgccgagaccgcgtccgccccgcgagcacagagcctcgcctttgccgatccgccgcccgtccacacccgccgccagctcaccatggatgatgatatcgccgcgctcgtcgtcgacaacggctccggcatgtgcaaggccggcttcgcgggcgacgatgccccccgggccgtcttcccctccatcgtggggcgccccaggcaccagggcgtgatggtgggcatgggtcagaaggattcctatgtgggcgacgaggcccagagcaagagaggcatcctcaccctgaagtaccccatcgagcacggcatcgtcaccaactgggacgacatggagaaaatctggcaccacaccttctacaatgagctgcgtgtggctcccgaggagcaccccgtgctgctgaccgaggcccccctgaaccccaaggccaaccgcgagaagatgacccagatcatgtttgagaccttcaacaccccagccatgtacgttgctatccaggctgtgctatccctgtacgcctctggccgtaccactggcatcgtgatggactccggtgacggggtcacccacactgtgcccatctacgaggggtatgccctcccccatgccatcctgcgtctggacctggctggccgggacctgactgactacctcatgaagatcctcaccgagcgcggctacagcttcaccaccacggccgagcgggaaatcgtgcgtgacattaaggagaagctgtgctacgtcgccctggacttcgagcaagagatggccacggctgcttccagctcctccctggagaagagctacgagctgcctgacggccaggtcatcaccattggcaatgagcggttccgctgccctgaggcactcttccagccttccttcctgggcatggagtcctgtggcatccacgaaactaccttcaactccatcatgaagtgtgacgtggacatccgcaaagacctgtacgccaacacagtgctgtctggcggcaccaccatgtaccctggcattgccgacaggatgcagaaggagatcactgccctggcacccagcacaatgaagatcaagatcattgctcctcctgagcgcaagtactccgtgtggatcggcggctccatcctggcctcgctgtccaccttccagcagatgtggatcagcaagcaggagtatgacgagtccggcccctccatcgtccaccgcaaatgcttctaggcggactatgacttagttgcgttacaccctttcttgacaaaacctaacttgcgcagaaaacaagatgagattggcatggctttatttgttttttttgttttgttttggttttttttttttttttggcttgactcaggatttaaaaactggaacggtgaaggtgacagcagtcggttggagcgagcatcccccaaagttcacaatgtggccgaggactttgattgcacattgttgtttttttaatagtcattccaaatatgagatgcgttgttacaggaagtcccttgccatcctaaaagccaccccacttctctctaaggagaatggcccagtcctctcccaagtccacacaggggaggtgatagcattgctttcgtgtaaattatgtaatgcaaaatttttttaatcttcgccttaatacttttttattttgttttattttgaatgatgagccttcgtgcccccccttcccccttttttgtcccccaacttgagatgtatgaaggcttttggtctccctgggagtgggtggaggcagccagggcttacctgtacactgacttgagaccagttgaataaaagtgcacaccttaaaaatgaaccgccgagaccgcgtccgccccgcgagcacagagcctcgcctttgccgatccgccgcccgtccacacccgccgccagctcaccatggatgatgatatcgccgcgctcgtcgtcgacaacggctccggcatgtgcaaggccggcttcgcgggcgacgatgccccccgggccgtcttcccctccatcgtggggcgccccaggcaccagggcgtgatggtgggcatgggtcagaaggattcctatgtgggcgacgaggcccagagcaagagaggcatcctcaccctgaagtaccccatcgagcacggcatcgtcaccaactgggacgacatggagaaaatctggcaccacaccttctacaatgagctgcgtgtggctcccgaggagcaccccgtgctgctgaccgaggcccccctgaaccccaaggccaaccgcgagaagatgacccagatcatgtttgagaccttcaacaccccagccatgtacgttgctatccaggctgtgctatccctgtacgcctctggccgtaccactggcatcgtgatggactccggtgacggggtcacccacactgtgcccatctacgaggggtatgccctcccccatgccatcctgcgtctggacctggctggccgggacctgactgactacctcatgaagatcctcaccgagcgcggctacagcttcaccaccacggccgagcgggaaatcgtgcgtgacattaaggagaagctgtgctacgtcgccctggacttcgagcaagagatggccacggctgcttccagctcctccctggagaagagctacgagctgcctgacggccaggtcatcaccattggcaatgagcggttccgctgccctgaggcactcttccagccttccttcctgggcatggagtcctgtggcatccacgaaactaccttcaactccatcatgaagtgtgacgtggacatccgcaaagacctgtacgccaacacagtgctgtctggcggcaccaccatgtaccctggcattgccgacaggatgcagaaggagatcactgccctggcacccagcacaatgaagatcaagatcattgctcctcctgagcgcaagtactccgtgtggatcggcggctccatcctggcctcgctgtccaccttccagcagatgtggatcagcaagcaggagtatgacgagtccggcccctccatcgtccaccgcaaatgcttctaggcggactatgacttagttgcgttacaccctttcttgacaaaacctaacttgcgcagaaaacaagatgagattggcatggctttatttgttttttttgttttgttttggttttttttttttttttggcttgactcaggatttaaaaactggaacggtgaaggtgacagcagtcggttggagcgagcatcccccaaagttcacaatgtggccgaggactttgattgcacattgttgtttttttaatagtcattccaaatatgagatgcgttgttacaggaagtcccttgccatcctaaaagccaccccacttctctctaaggagaatggcccagtcctctcccaagtccacacaggggaggtgatagcattgctttcgtgtaaattatgtaatgcaaaatttttttaatcttcgccttaatacttttttattttgttttattttgaatgatgagccttcgtgcccccccttcccccttttttgtcccccaacttgagatgtatgaaggcttttggtctccctgggagtgggtggaggcagccagggcttacctgtacactgacttgagaccagttgaataaaagtgcacaccttaaaaatgaaccgccgagaccgcgtccgccccgcgagcacagagcctcgcctttgccgatccgccgcccgtccacacccgccgccagctcaccatggatgatgatatcgccgcgctcgtcgtcgacaacggctccggcatgtgcaaggccggcttcgcgggcgacgatgccccccgggccgtcttcccctccatcgtggggcgccccaggcaccagggcgtgatggtgggcatgggtcagaaggattcctatgtgggcgacgaggcccagagcaagagaggcatcctcaccctgaagtaccccatcgagcacggcatcgtcaccaactgggacgacatggagaaaatctggcaccacaccttctacaatgagctgcgtgtggctcccgaggagcaccccgtgctgctgaccgaggcccccctgaaccccaaggccaaccgcgagaagatgacccagatcatgtttgagaccttcaacaccccagccatgtacgttgctatccaggctgtgctatccctgtacgcctctggccgtaccactggcatcgtgatggactccggtgacggggtcacccacactgtgcccatctacgaggggtatgccctcccccatgccatcctgcgtctggacctggctggccgggacctgactgactacctcatgaagatcctcaccgagcgcggctacagcttcaccaccacggccgagcgggaaatcgtgcgtgacattaaggagaagctgtgctacgtcgccctggacttcgagcaagagatggccacggctgcttccagctcctccctggagaagagctacgagctgcctgacggccaggtcatcaccattggcaatgagcggttccgctgccctgaggcactcttccagccttccttcctgggcatggagtcctgtggcatccacgaaactaccttcaactccatcatgaagtgtgacgtggacatccgcaaagacctgtacgccaacacagtgctgtctggcggcaccaccatgtaccctggcattgccgacaggatgcagaaggagatcactgccctggcacccagcacaatgaagatcaagatcattgctcctcctgagcgcaagtactccgtgtggatcggcggctccatcctggcctcgctgtccaccttccagcagatgtggatcagcaagcaggagtatgacgagtccggcccctccatcgtccaccgcaaatgcttctaggcggactatgacttagttgcgttacaccctttcttgacaaaacctaacttgcgcagaaaacaagatgagattggcatggctttatttgttttttttgttttgttttggttttttttttttttttggcttgactcaggatttaaaaactggaacggtgaaggtgacagcagtcggttggagcgagcatcccccaaagttcacaatgtggccgaggactttgattgcacattgttgtttttttaatagtcattccaaatatgagatgcgttgttacaggaagtcccttgccatcctaaaagccaccccacttctctctaaggagaatggcccagtcctctcccaagtccacacaggggaggtgatagcattgctttcgtgtaaattatgtaatgcaaaatttttttaatcttcgccttaatacttttttattttgttttattt

SEQ ID NO: 649 - DNA, 4413 bp, Homo sapiens
  misc_feature (1735)..(1735): second gene starts at position 1735
atgtctcgccagtcaagtgtgtccttccggagcgggggcagtcgtagcttcagcaccgcctctgccatcaccccgtctgtctcccgcaccagcttcacctccgtgtcccggtccgggggtggcggtggtggtggcttcggcagggtcagccttgcgggtgcttgtggagtgggtggctatggcagccggagcctctacaacctggggggctccaagaggatatccatcagcactagtggtggcagcttcaggaaccggtttggtgctggtgctggaggcggctatggctttggaggtggtgccggtagtggatttggtttcggcggtggagctggtggtggctttgggctcggtggcggagctggctttggaggtggcttcggtggccctggctttcctgtctgccctcctggaggtatccaagaggtcactgtcaaccagagtctcctgactcccctcaacctgcaaatcgaccccagcatccagagggtgaggaccgaggagcgcgagcagatcaagaccctcaacaataagtttgcctccttcatcgacaaggtgcggttcctggagcagcagaacaaggttctggacaccaagtggaccctgctgcaggagcagggcaccaagactgtgaggcagaacctggagccgttgttcgagcagtacatcaacaacctcaggaggcagctggacagcatcgtgggggaacggggccgcctggactcagagctgagaaacatgcaggacctggtggaagacttcaagaacaagtatgaggatgaaatcaacaagcgtaccactgctgagaatgagtttgtgatgctgaagaaggatgtagatgctgcctacatgaacaaggtggagctggaggccaaggttgatgcactgatggatgagattaacttcatgaagatgttctttgatgcggagctgtcccagatgcagacgcatgtctctgacacctcagtggtcctctccatggacaacaaccgcaacctggacctggatagcatcatcgctgaggtcaaggcccagtatgaggagattgccaaccgcagccggacagaagccgagtcctggtatcagaccaagtatgaggagctgcagcagacagctggccggcatggcgatgacctccgcaacaccaagcatgagatctctgagatgaaccggatgatccagaggctgagagccgagattgacaatgtcaagaaacagtgcgccaatctgcagaacgccattgcggatgccgagcagcgtggggagctggccctcaaggatgccaggaacaagctggccgagctggaggaggccctgcagaaggccaagcaggacatggcccggctgctgcgtgagtaccaggagctcatgaacaccaagctggccctggacgtggagatcgccacttaccgcaagctgctggagggcgaggaatgcagactcagtggagaaggagttggaccagtcaacatctctgttgtcacaagcagtgtttcctctggatatggcagtggcagtggctatggcggtggcctcggtggaggtcttggcggcggcctcggtggaggtcttgccggaggtagcagtggaagctactactccagcagcagtgggggtgtcggcctaggtggtgggctcagtgtggggggctctggcttcagtgcaagcagtggccgagggctgggggtgggctttggcagtggcgggggtagcagctccagcgtcaaatttgtcggtggtggaggacctggatatggcaaccagggtgggggctacggaggtggttatgacaactatggaggaggaaattatggaagtggaaattacaatgattttggaaattataaccagcaaccttctaactacggtccaatgaagagtggaaactttggtggtagcaggaacatggggggaccatatggtggaggaaactatggtccaggaggcagtggaggaagtgggggttatggtgggaggagccgatactgagcttcttcctatttgccatgggcttcactgtataaataggagaggatgagagcccagaggtaacagaacagcttcaggttatcgaaataacaatgttaaggaaactcttatctcagtcatgcataaatatgcagtgatatggcagaagacaccagagcagatgcagagagccattttgtgaatggattggattatttaataacattaccttactgtggaggaaggattgtaaaaaaaaatgcctttgagacagtttcttagctttttaattgttgtttctttctagtggtctttgtaagagtgtagaagcattccttctttgataatgttaaatttgtaagtttcaggtgacatgtgaaaccttttttaagatttttctcaaagttttgaaaagctattagccaggatcatggtgtaataagacataacgtttttcctttaaaaaaatttaagtgcgtgtgtagagttaagaagctgttgtacatttatgatttaataaaataattctaaaggaaattgtgtaattatagactttttattttaaataagttaaggagtgggtagtataattaaggtccgttgcaaagctgttgttatatttgtataagataaatgctggtcagatgtaagtgtgttgtctgcaattcatcaggattaaattatgtagataacttaagggatatctctgcaaggagaaacacctttttagatcttttagatgctgcttcttcaatgcaaggaaaggaaataaccccagcgaggtactcttcagggacacaggtctagtacaagagaactcttgacggctactaagttcagccagtcttaaaaaactgtgctgtttctacaaaactttaactacagtagtttataaggatgccaacgaaagctgagggtgtagagcaaaatagttctaagcttcagttaaacttctttaggtaagatcttatttacttttcctttcttaattttcctccctaaaagataaactaatactcttaaatggtctttcagtatagtggttcttacgtagtttaacatagctataaattgagtttaacaatttataaactcaagagaataatttttataaaccctgttttccaatctgtcatttacttaaattattttggttgtttttccctttttttccttcttttcccaccccctccccctccatgtgaagatttgggtgcttaacatatcatttttttccctgccggaattttagcattgatatgaaccatggacaagtatattctgctgccacaaagactgtaaagtgcttcatttcaacagctgaggcaagccaagtgatcattaataaagcttttcttggttccttcagtggtgttggtagtaaaatggtaggtaaaagttaggctgcaagttcaataaatcatgagatttcccatcgttacacccttgtgtattcacatttcttggatcaaacattttgagtgaactaggggtttttattaaagacatttgttgtatttatggttgtaactgtacatgcttatcaggatgagactgaaagaaggtagggcaaaaatggttgaatctattttcagatagtagttcatacttgagtgaagtgtcttgtctgcattatgaagcctggtatgtatccagtactaaataggtgggttaaatgtggtaattctagttcagtgtcttaccctgaagagaaagttgtaggttggctgttgaaattcattccttagatatgatcagtttgattgcccggctttattgcctttacaggaatgtgatactcagggcttactctatacaccaatgagtcttctttgatcctaagaccaccactgaagttgtttaggttcttttggacaaacatgataaacttcttcagatactttttttttcctttggcaggaaggtgtcttgctgcaggtaactaatgaagaagtggtcaaccacagagtcttcaagaaataagaaattctgtaccatctgaaagtagttcttgttggtgccttcatttaaaaagcactctttaaaataaaagggaaatgttttctgataaaacaaacatttagttgaggttcttgatataaaacaattacaaaatgagtgttgtttgtaaaacagtaacatcaaattggctagagagataaatgtatcatgttttaaattaggttttgtgagtagacagattacaattctattttaaatataaagtttataaaataaatactttttgtatccaaatacttggtgtaatgtttacacataaaatgtgtgaatcttgttctataaatatttggttgtctaaaagatcaccatcccctaaatttttaaaagcagtttcacaaagctatgcatattttaatattaacaggtaaatgagaagagcattgtggacattattggctgtccccaataaaatgctgttcatta

SEQ ID NO: 650 - DNA, 4413 bp, Homo sapiens; identical to SEQ ID NO: 649
  misc_feature (1735)..(1735): second gene starts at position 1735

SEQ ID NO: 651 - DNA, 17877 bp, Homo sapiens
  misc_feature (747)..(747): second gene starts at position 747
atgcttaggggtccggggcccgggctgctgctgctggccgtccagtgcctggggacagcggtgccctccacgggagcctcgaagagcaagaggcaggctcagcaaatggttcagccccagtccccggtggctgtcagtcaaagcaagcccggttgttatgacaatggaaaacactatcagataaatcaacagtgggagcggacctacctaggcaatgcgttggtttgtacttgttatggaggaagccgaggttttaactgcgagagtaaacctgaagctgaagagacttgctttgacaagtacactgggaacacttaccgagtgggtgacacttatgagcgtcctaaagactccatgatctgggactgtacctgcatcggggctgggcgagggagaataagctgtaccatcgcaaaccgctgccatgaagggggtcagtcctacaagattggtgacacctggaggagaccacatgagactggtggttacatgttagagtgtgtgtgtcttggtaatggaaaaggagaatggacctgcaagcccatagctgagaagtgttttgatcatgctgctgggacttcctatgtggtcggagaaacgtgggagaagccctaccaaggctggatgatggtagattgtacttgcctgggagaaggcagcggacgcatcacttgcacttctagaaatagatgcaacgatcaggacacaaggacatcctatagaattggagacacctggagcaagaaggataatcgaggaaacctgctccagtgcatctgcacaggcaacggccgaggagagtggaagtgtgagaggcacacctctgtgcagaccacatcgagcggatctggccccttcaccgatgttcgtgcagctgtttaccaaccgcagcctcacccccagcctcctccctatggccactgtgtcacagacagtggtgtggtctactctgtggggatgcagtggctgaagacacaaggaaataagcaaatgctttgcacgtgcctgggcaacggagtcagctgccaagagacagctgtaacccagacttacggtggcaactcaaatggagagccatgtgtcttaccattcacctacaatggcaggacgttctactcctgcaccacagaagggcgacaggacggacatctttggtgcagcacaacttcgaattatgagcaggaccagaaatactctttctgcacagaccacactgttttggttcagactcgaggaggaaattccaatggtgccttgtgccacttccccttcctatacaacaaccacaattacactgattgcacttctgagggcagaagagacaacatgaagtggtgtgggaccacacagaactatgatgccgaccagaagtttgggttctgccccatggctgcccacgaggaaatctgcacaaccaatgaaggggtcatgtaccgcattggagatcagtgggataagcagcatgacatgggtcacatgatgaggtgcacgtgtgttgggaatggtcgtggggaatggacatgcattgcctactcgcagcttcgagatcagtgcattgttgatgacatcacttacaatgtgaacgacacattccacaagcgtcatgaagaggggcacatgctgaactgtacatgcttcggtcagggtcggggcaggtggaagtgtgatcccgtcgaccaatgccaggattcagagactgggacgttttatcaaattggagattcatgggagaagtatgtgcatggtgtcagataccagtgctactgctatggccgtggcattggggagtggcattgccaacctttacagacctatccaagctcaagtggtcctgtcgaagtatttatcactgagactccgagtcagcccaactcccaccccatccagtggaatgcaccacagccatctcacatttccaagtacattctcaggtggagacctaaaaattctgtaggccgttggaaggaagctaccataccaggccacttaaactcctacaccatcaaaggcctgaagcctggtgtggtatacgagggccagctcatcagcatccagcagtacggccaccaagaagtgactcgctttgacttcaccaccaccagcaccagcacacctgtgaccagcaacaccgtgacaggagagacgactcccttttctcctcttgtggccacttctgaatctgtgaccgaaatcacagccagtagctttgtggtctcctgggtctcagcttccgacaccgtgtcgggattccgggtggaatatgagctgagtgaggagggagatgagccacagtacctggatcttccaagcacagccacttctgtgaacatccctgacctgcttcctggccgaaaatacattgtaaatgtctatcagatatctgaggatggggagcagagtttgatcctgtctacttcacaaacaacagcgcctgatgcccctcctgacacgactgtggaccaagttgatgacacctcaattgttgttcgctggagcagaccccaggctcccatcacagggtacagaatagtctattcgccatcagtagaaggtagcagcacagaactcaaccttcctgaaactgcaaactccgtcaccctcagtgacttgcaacctggtgttcagtataacatcactatctatgctgtggaagaaaatcaagaaagtacacctgttgtcattcaacaagaaaccactggcaccccacgctcagatacagtgccctctcccagggacctgcagtttgtggaagtgacagacgtgaaggtcaccatcatgtggacaccgcctgagagtgcagtgaccggctaccgtgtggatgtgatccccgtcaacctgcctggcgagcacgggcagaggctgcccatcagcaggaacacctttgcagaagtcaccgggctgtcccctggggtcacctattacttcaaagtctttgcagtgagccatgggagggagagcaagcctctgactgctcaacagacaaccaaactggatgctcccactaacctccagtttgtcaatgaaactgattctactgtcctggtgagatggactccacctcgggcccagataacaggataccgactgaccgtgggccttacccgaagaggacagcccaggcagtacaatgtgggtccctctgtctccaagtacccactgaggaatctgcagcctgcatctgagtacaccgtatccctcgtggccataaagggcaaccaagagagccccaaagccactggagtctttaccacactgcagcctgggagctctattccaccttacaacaccgaggtgactgagaccaccattgtgatcacatggacgcctgctccaagaattggttttaagctgggtgtacgaccaagccagggaggagaggcaccacgagaagtgacttcagactcaggaagcatcgttgtgtccggcttgactccaggagtagaatacgtctacaccatccaagtcctgagagatggacaggaaagagatgcgccaattgtaaacaaagtggtgacaccattgtctccaccaacaaacttgcatctggaggcaaaccctgacactggagtgctcacagtctcctgggagaggagcaccaccccagacattactggttatagaattaccacaacccctacaaacggccagcagggaaattctttggaagaagtggtccatgctgatcagagctcctgcacttttgataacctgagtcccggcctggagtacaatgtcagtgtttacactgtcaaggatgacaaggaaagtgtccctatctctgataccatcatcccagctgttcctcctcccactgacctgcgattcaccaacattggtccagacaccatgcgtgtcacctgggctccacccccatccattgatttaaccaacttcctggtgcgttactcacctgtgaaaaatgaggaagatgttgcagagttgtcaatttctccttcagacaatgcagtggtcttaacaaatctcctgcctggtacagaatatgtagtgagtgtctccagtgtctacgaacaacatgagagcacacctcttagaggaagacagaaaacaggtcttgattccccaactggcattgacttttctgatattactgccaactcttttactgtgcactggattgctcctcgagccaccatcactggctacaggatccgccatcatcccgagcacttcagtgggagacctcgagaagatcgggtgccccactctcggaattccatcaccctcaccaacctcactccaggcacagagtatgtggtcagcatcgttgctcttaatggcagagaggaaagtcccttattgattggccaacaatcaacagtttctgatgttccgagggacctggaagttgttgctgcgacccccaccagcctactgatcagctgggatgctcctgctgtcacagtgagatattacaggatcacttacggagagacaggaggaaatagccctgtccaggagttcactgtgcctgggagcaagtctacagctaccatcagcggccttaaacctggagttgattataccatcactgtgtatgctgtcactggccgtggagacagccccgcaagcagcaagccaatttccattaattaccgaacagaaattgacaaaccatcccagatgcaagtgaccgatgttcaggacaacagcattagtgtcaagtggctgccttcaagttcccctgttactggttacagagtaaccaccactcccaaaaatggaccaggaccaacaaaaactaaaactgcaggtccagatcaaacagaaatgactattgaaggcttgcagcccacagtggagtatgtggttagtgtctatgctcagaatccaagcggagagagtcagcctctggttcagactgcagtaaccaacattgatcgccctaaaggactggcattcactgatgtggatgtcgattccatcaaaattgcttgggaaagcccacaggggcaagtttccaggtacagggtgacctactcgagccctgaggatggaatccatgagctattccctgcacctgatggtgaagaagacactgcagagctgcaaggcctcagaccgggttctgagtacacagtcagtgtggttgccttgcacgatgatatggagagccagcccctgattggaacccagtccacagctattcctgcaccaactgacctgaagttcactcaggtcacacccacaagcctgagcgcccagtggacaccacccaatgttcagctcactggatatcgagtgcgggtgacccccaaggagaagaccggaccaatgaaagaaatcaaccttgctcctgacagctcatccgtggttgtatcaggacttatggtggccaccaaatatgaagtgagtgtctatgctcttaaggacactttgacaagcagaccagctcagggagttgtcaccactctggagaatgtcagcccaccaagaagggctcgtgtgacagatgctactgagaccaccatcaccattagctggagaaccaagactgagacgatcactggcttccaagttgatgccgttccagccaatggccagactccaatccagagaaccatcaagccagatgtcagaagctacaccatcacaggtttacaaccaggcactgactacaagatctacctgtacaccttgaatgacaatgctcggagctcccctgtggtcatcgacgcctccactgccattgatgcaccatccaacctgcgtttcctggccaccacaccactggcgtcagatctgtaagtttatttgctcaatgtacgacagctacataatgactcacattcatgatattccatcactgaggaaactgctaaagatggtccgtgtgtgaaataattccttagagaaacacggagctggaaaaataatcactgattagaccttaaaaatagttcactgcataacatgacaaaaagcacaaaggctcattcagagaacatatttgttgttctccaacactgtaatagttataatttcaccatgacaaacaccagacattaagattaagctaacactggtgtttcttttgctcccccccttttaaaaacaaaatatataactgcatgtcactatagcaacatccaaaacagatcaatttgttacaatcactatttggtagagcaaactttacccccaaaaggaaaaattaaattaaaaaaaaaaaacctttaaaaaatttgaagacttaattttttttgtcataggaatacataacacctacagtataagttaatcaatttcaagctactgtatagaaatacaacactagcatgcacaatattgtatcaatagagtaatggaggagtaatcatttcactggagagacagtatcataggcaagtgcatttctttaaaaataaagaaaagaaaaaccattcaagctgcttaaatatcaagtctcccattccctctccgttttcagccctcaggtgtgatttttatcttgcattattctaaaaagcagccagagccaaagctgaaatttaaaggaaaaataggttttgtaattccagtaaatcatttccaaatgctacaaggaaaaacgcaacactgctcactggacatgaagataaattagggaaagccccacctaccctgcccccccccccctccccccccaaatcgtcttcctcccatggcaatgactttaggcgcctgtgagaggcacaaaagcggcaaagcttcttctactagttcttctggtaggcttcacttaactgggacttttactctagcgtgaggagggggcctcctaaggaaagtcatgctgggtaaactgtgcgatgttacagagcacattgagtctgtggtcatcgtggttcttctatcttcactgtcacctgtatcctgttacacatactcagttcctaattgtaagctcaattttggtattagcaaaagcatctgtcagtttttcctcaattactcacacctcttcttgcctaaataaaacaaagaaacaaagaaaacaagtgtggtgtcattacacgtctcgggagttcctcgtcactgactttatatatataaaaaaaagaatgcacatgcgggccacgttcacagatagacagattcacccgaaatgagaatgagggccttaaggctgccgaaaacaaatgggtggaaatagcaacgttgtttccgtcaattccaaatgtgcactggctgcgtgagacaagccaatctccaattcctatgcttttttcattaaaaagaaaaaactatctcgagaggaaaaagttctggtcaaataggagttcagtgtttgttatctggtaacagtttttttatcttcctacaattacttggggaaggagtgtcttcggggaggaaaaactgacacactgacaaggctcccgaaattggacagaatggttaaggatatagctcttccttttgggtttttctaccagtaggcttctagcacctgaattttcacacactgcaccacagaccttctccaaacgcctctccgaccccacagcttctgcacccagctgcgtccgccagcacgaggcgcagtaggaaacgccccagtgcagagtgggtgacggcagtgtgatccctgaggagggagctgcagcagcttcagaagcgggatgttctctgaaaataccaacacgatccatgacatacagacctgaattttctctatttttgtggcgtttcacgtttctctcaagaggattaataattttggtggtggatttacgttaagaggaaagaaggaccaaaaaaaaaaaatcccacagccacctgacctgaagtcgctttcattctcatttagcctaggagaccgatcaacagcaaaaccaacctggataaggctgaataaggatgttaaagcccaaacaactagcaaaggaaaagtacacaatcgatggcttgatgttacatatggctgtaatgtagaaatactgtaaactgcaatttagtgttaatactgtcaactaatcagagacttcggaaaactggcaaggcctaaaccataaggatgaatgagacctcaggttctaagtctgtcagtctgggatttacactgttccatgtctgtaggctacaccctggaaaacatgcagagccgagacagatgagatagaaagtacccaaaacgagagacgagagcgtatgtacataaaaatccttactggaaccacagaacttactgaatgagggccattcctctttaagttttcttttcatctgaaaaccctattatctagcaataagttaaattagagacagacagctccacttgcatgaatctacagaacagtccagacgccagtgtgaggctgctattccaataccagcacagctagcctgactttccactagtggtattttggcaaaaatgtcaaagaggcgatcaaagacaggacaggtcgtgggtttctccctgggaaggtcatccctccctttccctcccccacccgacccccaactcatgggaaaaaaataaagactgcagtagtagcatccgcgtgcgctgccagttcccctggggccttaattgttgccttcgccgccatcgtcgtcctgctggtcgctcgtccagagcgtgaggttgtcgcggaggagctgcatgatgagcgtggagtccttgtaggagtcctcgttgagggtgtcaagctcggcgatggcgtcgtcgaacgcggtcttggccaagtggcacgcttgctctggggcgttctggatctcatagtagaagacggagtagttaagagccaggcctaatcggatggggtgggtgggctgcatgtgctctttgctgatctcgtgggcttcgctgtaggccttctcggaggactccaccaccgtcgcccttttctctccggtggccacttcagccaggtagcggtagtagtcccctttcatcttcaggtagaacactttgctctcgtactgggtctcgctgcaattcttgatcaggtagttatccagcaggctcagcacatcctggcacacagcctccaactccttctctatcttctcccggtacgcacggaccatctcaatcttcttctcattgccgtctgcagatgtcttctgctcaatgctactgatgaccctccaggaagagcggcgtgcccccacaacgttcttgtaggccacagacagaaggtttcgttcctcattcgacagtggctcattcagctctgtcacgttcttcatggccgcggccatgtcgtcgtagcgctccgcctgctcggccagccgggctttctgcaccagttgctcgcggtccaccatcttcgcggggctgggtctggccggagaaggaggaggacactggggcggcctgaagggcttggagggcgcgactggagcccaagtgccggagaggaccgacccacagagcgagcagctgaggcggcggctgcgcggaggaggcggctggagctgcgaccgcgggaccgggcgcgaggcggctgcggctgctgtgcgtgccactgacggacaaccccctcactggcgtcagatctgtaagtttatttgctcaatgtacgacagctacataatgactcacattcatgatattccatcactgaggaaactgctaaagatggtccgtgtgtgaaataattccttagagaaacacggagctggaaaaataatcactgattagaccttaaaaatagttcactgcataacatgacaaaaagcacaaaggctcattcagagaacatatttgttgttctccaacactgtaatagttataatttcaccatgacaaacaccagacattaagattaagctaacactggtgtttcttttgctcccccccttttaaaaacaaaatatataactgcatgtcactatagcaacatccaaaacagatcaatttgttacaatcactatttggtagagcaaactttacccccaaaaggaaaaattaaattaaaaaaaaaaaacctttaaaaaatttgaagacttaattttttttgtcataggaatacataacacctacagtataagttaatcaatttcaagctactgtatagaaatacaacactagcatgcacaatattgtatcaatagagtaatggaggagtaatcatttcactggagagacagtatcataggcaagtgcatttctttaaaaataaagaaaagaaaaaccattcaagctgcttaaatatcaagtctcccattccctctccgttttcagccctcaggtgtgatttttatcttgcattattctaaaaagcagccagagccaaagctgaaatttaaaggaaaaataggttttgtaattccagtaaatcatttccaaatgctacaaggaaaaacgcaacactgctcactggacatgaagataaattagggaaagccccacctaccctgcccccccccccctccccccccaaatcgtcttcctcccatggcaatgactttaggcgcctgtgagaggcacaaaagcggcaaagcttcttctactagttcttctggtaggcttcacttaactgggacttttactctagcgtgaggagggggcctcctaaggaaagtcatgctgggtaaactgtgcgatgttacagagcacattgagtctgtggtcatcgtggttcttctatcttcactgtcacctgtatcctgttacacatactcagttcctaattgtaagctcaattttggtattagcaaaagcatctgtcagtttttcctcaattactcacacctcttcttgcctaaataaaacaaagaaacaaagaaaacaagtgtggtgtcattacacgtctcgggagttcctcgtcactgactttatatatataaaaaaaagaatgcacatgcgggccacgttcacagatagacagattcacccgaaatgagaatgagggccttaaggctgccgaaaacaaatgggtggaaatagcaacgttgtttccgtcaattccaaatgtgcactggctgcgtgagacaagccaatctccaattcctatgcttttttcattaaaaagaaaaaactatctcgagaggaaaaagttctggtcaaataggagttcagtgtttgttatctggtaacagtttttttatcttcctacaattacttggggaaggagtgtcttcggggaggaaaaactgacacactgacaaggctcccgaaattggacagaatggttaaggatatagctcttccttttgggtttttctaccagtaggcttctagcacctgaattttcacacactgcaccacagaccttctccaaacgcctctccgaccccacagcttctgcacccagctgcgtccgccagcacgaggcgcagtaggaaacgccccagtgcagagtgggtgacggcagtgtgatccctgaggagggagctgcagcagcttcagaagcgggatgttctctgaaaataccaacacgatccatgacatacagacctgaattttctctatttttgtggcgtttcacgtttctctcaagaggattaataattttggtggtggatttacgttaagaggaaagaaggaccaaaaaaaaaaaatcccacagccacctgacctgaagtcgctttcattctcatttagcctaggagaccgatcaacagcaaaaccaacctggataaggctgaataaggatgttaaagcccaaacaactagcaaaggaaaagtacacaatcgatggcttgatgttacatatggctgtaatgtagaaatactgtaaactgcaatttagtgttaatactgtcaactaatcagagacttcggaaaactggcaaggcctaaaccataaggatgaatgagacctcaggttctaagtctgtcagtctgggatttacactgttccatgtctgtaggctacaccctggaaaacatgcagagccgagacagatgagatagaaagtacccaaaacgagagacgagagcgtatgtacataaaaatccttactggaaccacagaacttactgaatgagggccattcctctttaagttttcttttcatctgaaaaccctattatctagcaataagttaaattagagacagacagctccacttgcatgaatctacagaacagtccagacgccagtgtgaggctgctattccaataccagcacagctagcctgactttccactagtggtattttggcaaaaatgtcaaagaggcgatcaaagacaggacaggtcgtgggtttctccctgggaaggtcatccctccctttccctcccccacccgacccccaactcatgggaaaaaaataaagactgcagtagtagcatccgcgtgcgctgccagttcccctggggccttaattgttgccttcgccgccatcgtcgtcctgctggtcgctcgtccagagcgtgaggttgtcgcggaggagctgcatgatgagcgtggagtccttgtaggagtcctcgttgagggtgtcaagctcggcgatggcgtcgtcgaacgcggtcttggccaagtggcacgcttgctctggggcgttctggatctcatagtagaagacggagtagttaagagccaggcctaatcggatggggtgggtgggctgcatgtgctctttgctgatctcgtgggcttcgctgtaggccttctcggaggactccaccaccgtcgcccttttctctccggtggccacttcagccaggtagcggtagtagtcccctttcatcttcaggtagaacactttgctctcgtactgggtctcgctgcaattcttgatcaggtagttatccagcaggctcagcacatcctggcacacagcctccaactccttctctatcttctcccggtacgcacggaccatctcaatcttcttctcattgccgtctgcagatgtcttctgctcaatgctactgatgaccctccaggaagagcggcgtgcccccacaacgttcttgtaggccacagacagaaggtttcgttcctcattcgacagtggctcattcagctctgtcacgttcttcatggccgcggccatgtcgtcgtagcgctccgcctgctcggccagccgggctttctgcaccagttgctcgcggtccaccatcttcgcggggctgggtctggccggagaaggaggaggacactggggcggcctgaagggcttggagggcgcgactggagcccaagtgccggagaggaccgacccacagagcgagcagctgaggcggcggctgcgcggaggaggcggctggagctgcgaccgcgggaccgggcgcgaggcggctgcggctgctgtgcgtgccactgacggacaaccccctcactggcgtcagatctgtaagtttatttgctcaatgtacgacagctacataatgactcacattcatgatattccatcactgaggaaactgctaaagatggtccgtgtgtgaaataattccttagagaaacacggagctggaaaaataatcactgattagaccttaaaaatagttcactgcataacatgacaaaaagcacaaaggctcattcagagaacatatttgttgttctccaacactgtaatagttataatttcaccatgacaaacaccagacattaagattaagctaacactggtgtttcttttgctcccccccttttaaaaacaaaatatataactgcatgtcactatagcaacatccaaaacagatcaatttgttacaatcactatttggtagagcaaactttacccccaaaaggaaaaattaaattaaaaaaaaaaaacctttaaaaaatttgaagacttaattttttttgtcataggaatacataacacctacagtataagttaatcaatttcaagctactgtatagaaatacaacactagcatgcacaatattgtatcaatagagtaatggaggagtaatcatttcactggagagacagtatcataggcaagtgcatttctttaaaaataaagaaaagaaaaaccattcaagctgcttaaatatcaagtctcccattccctctccgttttcagccctcaggtgtgatttttatcttgcattattctaaaaagcagccagagccaaagctgaaatttaaaggaaaaataggttttgtaattccagtaaatcatttccaaatgctacaaggaaaaacgcaacactgctcactggacatgaagataaattagggaaagccccacctaccctgcccccccccccctccccccccaaatcgtcttcctcccatggcaatgactttaggcgcctgtgagaggcacaaaagcggcaaagcttcttctactagttcttctggtaggcttcacttaactgggacttttactctagcgtgaggagggggcctcctaaggaaagtcatgctgggtaaactgtgcgatgttacagagcacattgagtctgtggtcatcgtggttcttctatcttcactgtcacctgtatcctgttacacatactcagttcctaattgtaagctcaattttggtattagcaaaagcatctgtcagtttttcctcaattactcacacctcttcttgcctaaataaaacaaagaaacaaagaaaacaagtgtggtgtcattacacgtctcgggagttcctcgtcactgactttatatatataaaaaaaagaatgcacatgcgggccacgttcacagatagacagattcacccgaaatgagaatgagggccttaaggctgccgaaaacaaatgggtggaaatagcaacgttgtttccgtcaattccaaatgtgcactggctgcgtgagacaagccaatctccaattcctatgcttttttcattaaaaagaaaaaactatctcgagaggaaaaagttctggtcaaataggagttcagtgtttgttatctggtaacagtttttttatcttcctacaattacttggggaaggagtgtcttcggggaggaaaaactgacacactgacaaggctcccgaaattggacagaatggttaaggatatagctcttccttttgggtttttctaccagtaggcttctagcacctgaattttcacacactgcaccacagaccttctccaaacgcctctccgaccccacagcttctgcacccagctgcgtccgccagcacgaggcgcagtaggaaacgccccagtgcagagtgggtgacggcagtgtgatccctgaggagggagctgcagcagcttcagaagcgggatgttctctgaaaataccaacacgatccatgacatacagacctgaattttctctatttttgtggcgtttcacgtttctctcaagaggattaataattttggtggtggatttacgttaagaggaaagaaggaccaaaaaaaaaaaatcccacagccacctgacctgaagtcgctttcattctcatttagcctaggagaccgatcaacagcaaaaccaacctggataaggctgaataaggatgttaaagcccaaacaactagcaaaggaaaagtacacaatcgatggcttgatgttacatatggctgtaatgtagaaatactgtaaactgcaatttagtgttaatactgtcaactaatcagagacttcggaaaactggcaaggcctaaaccataaggatgaatgagacctcaggttctaagtctgtcagtctgggatttacactgttccatgtctgtaggctacaccctggaaaacatgcagagccgagacagatgagatagaaagtacccaaaacgagagacgagagcgtatgtacataaaaatccttactggaaccacagaacttactgaatgagggccattcctctttaagttttcttttcatctgaaaaccctattatctagcaataagttaaattagagacagacagctccacttgcatgaatctacagaacagtccagacgccagtgtgaggctgctattccaataccagcacagctagcctgactttccactagtggtattttggcaaaaatgtcaaagaggcgatcaaagacaggacaggtcgtgggtttctccctgggaaggtcatccctccctttccctcccccacccgacccccaactcatgggaaaaaaataaagactgcagtagtagcatccgcgtgcgctgccagttcccctggggccttaattgttgccttcgccgccatcgtcgtcctgctggtcgctcgtccagagcgtgaggttgtcgcggaggagctgcatgatgagcgtggagtccttgtaggagtcctcgttgagggtgtcaagctcggcgatggcgtcgtcgaacgcggtcttggccaagtggcacgcttgctctggggcgttctggatctcatagtagaagacggagtagttaagagccaggcctaatcggatggggtgggtgggctgcatgtgctctttgctgatctcgtgggcttcgctgtaggccttctcggaggactccaccaccgtcgcccttttctctccggtggccacttcagccaggtagcggtagtagtcccctttcatcttcaggtagaacactttgctctcgtactgggtctcgctgcaattcttgatcaggtagttatccagcaggctcagcacatcctggcacacagcctccaactccttctctatcttctcccggtacgcacggaccatctcaatcttcttctcattgccgtctgcagatgtcttctgctcaatgctactgatgaccctccaggaagagcggcgtgcccccacaacgttcttgtaggccacagacagaaggtttcgttcctcattcgacagtggctcattcagctctgtcacgttcttcatggccgcggccatgtcgtcgtagcgctccgcctgctcggccagccgggctttctgcaccagttgctcgcggtccaccatcttcgcggggctgggtctggccggagaaggaggaggacactggggcggcctgaagggcttggagggcgcgactggagcccaagtgccggagaggaccgacccacagagcgagcagctgaggcggcggctgcgcggaggaggcggctggagctgcgaccgcgggaccgggcgcgaggcggctgcggctgctgtgcgtgccactgacggacaaccccctcactggcgtcagatctgtaagtttatttgctcaatgtacgacagctacataatgactcacattcatgatattccatcactgaggaaactgctaaagatggtccgtgtgtgaaataattccttagagaaacacggagctggaaaaataatcactgattagaccttaaaaatagttcactgcataacatgacaaaaagcacaaaggctcattcagagaacatatttgttgttctccaacactgtaatagttataatttcaccatgacaaacaccagacattaagattaagctaacactggtgtttcttttgctcccccccttttaaaaacaaaatatataactgcatgtcactatagcaacatccaaaacagatcaatttgttacaatcactatttggtagagcaaactttacccccaaaaggaaaaattaaattaaaaaaaaaaaacctttaaaaaatttgaagacttaattttttttgtcataggaatacataacacctacagtataagttaatcaatttcaagctactgtatagaaatacaacactagcatgcacaatattgtatcaatagagtaatggaggagtaatcatttcactggagagacagtatcataggcaagtgcatttctttaaaaataaagaaaagaaaaaccattcaagctgcttaaatatcaagtctcccattccctctccgttttcagccctcaggtgtgatttttatcttgcattattctaaaaagcagccagagccaaagctgaaatttaaaggaaaaataggttttgtaattccagtaaatcatttccaaatgctacaaggaaaaacgcaacactgctcactggacatgaagataaattagggaaagccccacctaccctgcccccccccccc

SEQ ID NO: 652 - DNA, 18150 bp, Homo sapiens
  misc_feature (20)..(20): second gene starts at position 20
atgcttaggggtccggggcccgggctgctgctgctggccgtccagtgcctggggacagcggtgccctccacgggagcctcgaagagcaagaggcaggctcagcaaatggttcagccccagtccccggtggctgtcagtcaaagcaagcccggttgttatgacaatggaaaacactatcagataaatcaacagtgggagcggacctacctaggcaatgcgttggtttgtacttgttatggaggaagccgaggttttaactgcgagagtaaacctgaagctgaagagacttgctttgacaagtacactgggaacacttaccgagtgggtgacacttatgagcgtcctaaagactccatgatctgggactgtacctgcatcggggctgggcgagggagaataagctgtaccatcgcaaaccgctgccatgaagggggtcagtcctacaagattggtgacacctggaggagaccacatgagactggtggttacatgttagagtgtgtgtgtcttggtaatggaaaaggagaatggacctgcaagcccatagctgagaagtgttttgatcatgctgctgggacttcctatgtggtcggagaaacgtgggagaagccctaccaaggctggatgatggtagattgtacttgcctgggagaaggcagcggacgcatcacttgcacttctagaaatagatgcaacgatcaggacacaaggacatcctatagaattggagacacctggagcaagaaggataatcgaggaaacctgctccagtgcatctgcacaggcaacggccgaggagagtggaagtgtgagaggcacacctctgtgcagaccacatcgagcggatctggccccttcaccgatgttcgtgcagctgtttaccaaccgcagcctcacccccagcctcctccctatggccactgtgtcacagacagtggtgtggtctactctgtggggatgcagtggctgaagacacaaggaaataagcaaatgctttgcacgtgcctgggcaacggagtcagctgccaagagacagctgtaacccagacttacggtggcaactcaaatggagagccatgtgtcttaccattcacctacaatggcaggacgttctactcctgcaccacagaagggcgacaggacggacatctttggtgcagcacaacttcgaattatgagcaggaccagaaatactctttctgcacagaccacactgttttggttcagactcgaggaggaaattccaatggtgccttgtgccacttccccttcctatacaacaaccacaattacactgattgcacttctgagggcagaagagacaacatgaagtggtgtgggaccacacagaactatgatgccgaccagaagtttgggttctgccccatggctgcccacgaggaaatctgcacaaccaatgaaggggtcatgtaccgcattggagatcagtgggataagcagcatgacatgggtcacatgatgaggtgcacgtgtgttgggaatggtcgtggggaatggacatgcattgcctactcgcagcttcgagatcagtgcattgttgatgacatcacttacaatgtgaacgacacattccacaagcgtcatgaagaggggcacatgctgaactgtacatgcttcggtcagggtcggggcaggtggaagtgtgatcccgtcgaccaatgccaggattcagagactgggacgttttatcaaattggagattcatgggagaagtatgtgcatggtgtcagataccagtgctactgctatggccgtggcattggggagtggcattgccaacctttacagacctatccaagctcaagtggtcctgtcgaagtatttatcactgagactccgagtcagcccaactcccaccccatccagtggaatgcaccacagccatctcacatttccaagtacattctcaggtggagacctaaaaattctgtaggccgttggaaggaagctaccataccaggccacttaaactcctacaccatcaaaggcctgaagcctggtgtggtatacgagggccagctcatcagcatccagcagtacggccaccaagaagtgactcgctttgacttcaccaccaccagcaccagcacacctgtgaccagcaacaccgtgacaggagagacgactcccttttctcctcttgtggccacttctgaatctgtgaccgaaatcacagccagtagctttgtggtctcctgggtctcagcttccgacaccgtgtcgggattccgggtggaatatgagctgagtgaggagggagatgagccacagtacctggatcttccaagcacagccacttctgtgaacatccctgacctgcttcctggccgaaaatacattgtaaatgtctatcagatatctgaggatggggagcagagtttgatcctgtctacttcacaaacaacagcgcctgatgcccctcctgacacgactgtggaccaagttgatgacacctcaattgttgttcgctggagcagaccccaggctcccatcacagggtacagaatagtctattcgccatcagtagaaggtagcagcacagaactcaaccttcctgaaactgcaaactccgtcaccctcagtgacttgcaacctggtgttcagtataacatcactatctatgctgtggaagaaaatcaagaaagtacacctgttgtcattcaacaagaaaccactggcaccccacgctcagatacagtgccctctcccagggacctgcagtttgtggaagtgacagacgtgaaggtcaccatcatgtggacaccgcctgagagtgcagtgaccggctaccgtgtggatgtgatccccgtcaacctgcctggcgagcacgggcagaggctgcccatcagcaggaacacctttgcagaagtcaccgggctgtcccctggggtcacctattacttcaaagtctttgcagtgagccatgggagggagagcaagcctctgactgctcaacagacaaccaaactggatgctcccactaacctccagtttgtcaatgaaactgattctactgtcctggtgagatggactccacctcgggcccagataacaggataccgactgaccgtgggccttacccgaagaggacagcccaggcagtacaatgtgggtccctctgtctccaagtacccactgaggaatctgcagcctgcatctgagtacaccgtatccctcgtggccataaagggcaaccaagagagccccaaagccactggagtctttaccacactgcagcctgggagctctattccaccttacaacaccgaggtgactgagaccaccattgtgatcacatggacgcctgctccaagaattggttttaagctgggtgtacgaccaagccagggaggagaggcaccacgagaagtgacttcagactcaggaagcatcgttgtgtccggcttgactccaggagtagaatacgtctacaccatccaagtcctgagagatggacaggaaagagatgcgccaattgtaaacaaagtggtgacaccattgtctccaccaacaaacttgcatctggaggcaaaccctgacactggagtgctcacagtctcctgggagaggagcaccaccccagacattactggttatagaattaccacaacccctacaaacggccagcagggaaattctttggaagaagtggtccatgctgatcagagctcctgcacttttgataacctgagtcccggcctggagtacaatgtcagtgtttacactgtcaaggatgacaaggaaagtgtccctatctctgataccatcatcccagaggtgccccaactcactgacctaagctttgttgatataaccgattcaagcatcggcctgaggtggaccccgctaaactcttccaccattattgggtaccgcatcacagtagttgcggcaggagaaggtatccctatttttgaagattttgtggactcctcagtaggatactacacagtcacagggctggagccgggcattgactatgatatcagcgttatcactctcattaatggcggcgagagtgcccctactacactgacacaacaaacggctgttcctcctcccactgacctgcgattcaccaacattggtccagacaccatgcgtgtcacctgggctccacccccatccattgatttaaccaacttcctggtgcgttactcacctgtgaaaaatgaggaagatgttgcagagttgtcaatttctccttcagacaatgcagtggtcttaacaaatctcctgcctggtacagaatatgtagtgagtgtctccagtgtctacgaacaacatgagagcacacctcttagaggaagacagaaaacaggtcttgattccccaactggcattgacttttctgatattactgccaactcttttactgtgcactggattgctcctcgagccaccatcactggctacaggatccgccatcatcccgagcacttcagtgggagacctcgagaagatcgggtgccccactctcggaattccatcaccctcaccaacctcactccaggcacagagtatgtggtcagcatcgttgctcttaatggcagagaggaaagtcccttattgattggccaacaatcaacagtttctgatgttccgagggacctggaagttgttgctgcgacccccaccagcctactgatcagctgggatgctcctgctgtcacagtgagatattacaggatcacttacggagagacaggaggaaatagccctgtccaggagttcactgtgcctgggagcaagtctacagctaccatcagcggccttaaacctggagttgattataccatcactgtgtatgctgtcactggccgtggagacagccccgcaagcagcaagccaatttccattaattaccgaacagaaattgacaaaccatcccagatgcaagtgaccgatgttcaggacaacagcattagtgtcaagtggctgccttcaagttcccctgttactggttacagagtaaccaccactcccaaaaatggaccaggaccaacaaaaactaaaactgcaggtccagatcaaacagaaatgactattgaaggcttgcagcccacagtggagtatgtggttagtgtctatgctcagaatccaagcggagagagtcagcctctggttcagactgcagtaaccaacattgatcgccctaaaggactggcattcactgatgtggatgtcgattccatcaaaattgcttgggaaagcccacaggggcaagtttccaggtacagggtgacctactcgagccctgaggatggaatccatgagctattccctgcacctgatggtgaagaagacactgcagagctgcaaggcctcagaccgggttctgagtacacagtcagtgtggttgccttgcacgatgatatggagagccagcccctgattggaacccagtccacagctattcctgcaccaactgacctgaagttcactcaggtcacacccacaagcctgagcgcccagtggacaccacccaatgttcagctcactggatatcgagtgcgggtgacccccaaggagaagaccggaccaatgaaagaaatcaaccttgctcctgacagctcatccgtggttgtatcaggacttatggtggccaccaaatatgaagtgagtgtctatgctcttaaggacactttgacaagcagaccagctcagggagttgtcaccactctggagaatgtcagcccaccaagaagggctcgtgtgacagatgctactgagaccaccatcaccattagctggagaaccaagactgagacgatcactggcttccaagttgatgccgttccagccaatggccagactccaatccagagaaccatcaagccagatgtcagaagctacaccatcacaggtttacaaccaggcactgactacaagatctacctgtacaccttgaatgacaatgctcggagctcccctgtggtcatcgacgcctccactgccattgatgcaccatccaacctgcgtttcctggccaccacaccactggcgtcagatctgtaagtttatttgctcaatgtacgacagctacataatgactcacattcatgatattccatcactgaggaaactgctaaagatggtccgtgtgtgaaataattccttagagaaacacggagctggaaaaataatcactgattagaccttaaaaatagttcactgcataacatgacaaaaagcacaaaggctcattcagagaacatatttgttgttctccaacactgtaatagttataatttcaccatgacaaacaccagacattaagattaagctaacactggtgtttcttttgctcccccccttttaaaaacaaaatatataactgcatgtcactatagcaacatccaaaacagatcaatttgttacaatcactatttggtagagcaaactttacccccaaaaggaaaaattaaattaaaaaaaaaaaacctttaaaaaatttgaagacttaattttttttgtcataggaatacataacacctacagtataagttaatcaatttcaagctactgtatagaaatacaacactagcatgcacaatattgtatcaatagagtaatggaggagtaatcatttcactggagagacagtatcataggcaagtgcatttctttaaaaataaagaaaagaaaaaccattcaagctgcttaaatatcaagtctcccattccctctccgttttcagccctcaggtgtgatttttatcttgcattattctaaaaagcagccagagccaaagctgaaatttaaaggaaaaataggttttgtaattccagtaaatcatttccaaatgctacaaggaaaaacgcaacactgctcactggacatgaagataaattagggaaagccccacctaccctgcccccccccccctccccccccaaatcgtcttcctcccatggcaatgactttaggcgcctgtgagaggcacaaaagcggcaaagcttcttctactagttcttctggtaggcttcacttaactgggacttttactctagcgtgaggagggggcctcctaaggaaagtcatgctgggtaaactgtgcgatgttacagagcacattgagtctgtggtcatcgtggttcttctatcttcactgtcacctgtatcctgttacacatactcagttcctaattgtaagctcaattttggtattagcaaaagcatctgtcagtttttcctcaattactcacacctcttcttgcctaaataaaacaaagaaacaaagaaaacaagtgtggtgtcattacacgtctcgggagttcctcgtcactgactttatatatataaaaaaaagaatgcacatgcgggccacgttcacagatagacagattcacccgaaatgagaatgagggccttaaggctgccgaaaacaaatgggtggaaatagcaacgttgtttccgtcaattccaaatgtgcactggctgcgtgagacaagccaatctccaattcctatgcttttttcattaaaaagaaaaaactatctcgagaggaaaaagttctggtcaaataggagttcagtgtttgttatctggtaacagtttttttatcttcctacaattacttggggaaggagtgtcttcggggaggaaaaactgacacactgacaaggctcccgaaattggacagaatggttaaggatatagctcttccttttgggtttttctaccagtaggcttctagcacctgaattttcacacactgcaccacagaccttctccaaacgcctctccgaccccacagcttctgcacccagctgcgtccgccagcacgaggcgcagtaggaaacgccccagtgcagagtgggtgacggcagtgtgatccctgaggagggagctgcagcagcttcagaagcgggatgttctctgaaaataccaacacgatccatgacatacagacctgaattttctctatttttgtggcgtttcacgtttctctcaagaggattaataattttggtggtggatttacgttaagaggaaagaaggaccaaaaaaaaaaaatcccacagccacctgacctgaagtcgctttcattctcatttagcctaggagaccgatcaacagcaaaaccaacctggataaggctgaataaggatgttaaagcccaaacaactagcaaaggaaaagtacacaatcgatggcttgatgttacatatggctgtaatgtagaaatactgtaaactgcaatttagtgttaatactgtcaactaatcagagacttcggaaaactggcaaggcctaaaccataaggatgaatgagacctcaggttctaagtctgtcagtctgggatttacactgttccatgtctgtaggctacaccctggaaaacatgcagagccgagacagatgagatagaaagtacccaaaacgagagacgagagcgtatgtacataaaaatccttactggaaccacagaacttactgaatgagggccattcctctttaagttttcttttcatctgaaaaccctattatctagcaataagttaaattagagacagacagctccacttgcatgaatctacagaacagtccagacgccagtgtgaggctgctattccaataccagcacagctagcctgactttccactagtggtattttggcaaaaatgtcaaagaggcgatcaaagacaggacaggtcgtgggtttctccctgggaaggtcatccctccctttccctcccccacccgacccccaactcatgggaaaaaaataaagactgcagtagtagcatccgcgtgcgctgccagttcccctggggccttaattgttgccttcgccgccatcgtcgtcctgctggtcgctcgtccagagcgtgaggttgtcgcggaggagctgcatgatgagcgtggagtccttgtaggagtcctcgttgagggtgtcaagctcggcgatggcgtcgtcgaacgcggtcttggccaagtggcacgcttgctctggggcgttctggatctcatagtagaagacggagtagttaagagccaggcctaatcggatggggtgggtgggctgcatgtgctctttgctgatctcgtgggcttcgctgtaggccttctcggaggactccaccaccgtcgcccttttctctccggtggccacttcagccaggtagcggtagtagtcccctttcatcttcaggtagaacactttgctctcgtactgggtctcgctgcaattcttgatcaggtagttatccagcaggctcagcacatcctggcacacagcctccaactccttctctatcttctcccggtacgcacggaccatctcaatcttcttctcattgccgtctgcagatgtcttctgctcaatgctactgatgaccctccaggaagagcggcgtgcccccacaacgttcttgtaggccacagacagaaggtttcgttcctcattcgacagtggctcattcagctctgtcacgttcttcatggccgcggccatgtcgtcgtagcgctccgcctgctcggccagccgggctttctgcaccagttgctcgcggtccaccatcttcgcggggctgggtctggccggagaaggaggaggacactggggcggcctgaagggcttggagggcgcgactggagcccaagtgccggagaggaccgacccacagagcgagcagctgaggcggcggctgcgcggaggaggcggctggagctgcgaccgcgggaccgggcgcgaggcggctgcggctgctgtgcgtgccactgacggacaaccccctcactggcgtcagatctgtaagtttatttgctcaatgtacgacagctacataatgactcacattcatgatattccatcactgaggaaactgctaaagatggtccgtgtgtgaaataattccttagagaaacacggagctggaaaaataatcactgattagaccttaaaaatagttcactgcataacatgacaaaaagcacaaaggctcattcagagaacatatttgttgttctccaacactgtaatagttataatttcaccatgacaaacaccagacattaagattaagctaacactggtgtttcttttgctcccccccttttaaaaacaaaatatataactgcatgtcactatagcaacatccaaaacagatcaatttgttacaatcactatttggtagagcaaactttacccccaaaaggaaaaattaaattaaaaaaaaaaaacctttaaaaaatttgaagacttaattttttttgtcataggaatacataacacctacagtataagttaatcaatttcaagctactgtatagaaatacaacactagcatgcacaatattgtatcaatagagtaatggaggagtaatcatttcactggagagacagtatcataggcaagtgcatttctttaaaaataaagaaaagaaaaaccattcaagctgcttaaatatcaagtctcccattccctctccgttttcagccctcaggtgtgatttttatcttgcattattctaaaaagcagccagagccaaagctgaaatttaaaggaaaaataggttttgtaattccagtaaatcatttccaaatgctacaaggaaaaacgcaacactgctcactggacatgaagataaattagggaaagccccacctaccctgcccccccccccctccccccccaaatcgtcttcctcccatggcaatgactttaggcgcctgtgagaggcacaaaagcggcaaagcttcttctactagttcttctggtaggcttcacttaactgggacttttactctagcgtgaggagggggcctcctaaggaaagtcatgctgggtaaactgtgcgatgttacagagcacattgagtctgtggtcatcgtggttcttctatcttcactgtcacctgtatcctgttacacatactcagttcctaattgtaagctcaattttggtattagcaaaagcatctgtcagtttttcctcaattactcacacctcttcttgcctaaataaaacaaagaaacaaagaaaacaagtgtggtgtcattacacgtctcgggagttcctcgtcactgactttatatatataaaaaaaagaatgcacatgcgggccacgttcacagatagacagattcacccgaaatgagaatgagggccttaaggctgccgaaaacaaatgggtggaaatagcaacgttgtttccgtcaattccaaatgtgcactggctgcgtgagacaagccaatctccaattcctatgcttttttcattaaaaagaaaaaactatctcgagaggaaaaagttctggtcaaataggagttcagtgtttgttatctggtaacagtttttttatcttcctacaattacttggggaaggagtgtcttcggggaggaaaaactgacacactgacaaggctcccgaaattggacagaatggttaaggatatagctcttccttttgggtttttctaccagtaggcttctagcacctgaattttcacacactgcaccacagaccttctccaaacgcctctccgaccccacagcttctgcacccagctgcgtccgccagcacgaggcgcagtaggaaacgccccagtgcagagtgggtgacggcagtgtgatccctgaggagggagctgcagcagcttcagaagcgggatgttctctgaaaataccaacacgatccatgacatacagacctgaattttctctatttttgtggcgtttcacgtttctctcaagaggattaataattttggtggtggatttacgttaagaggaaagaaggaccaaaaaaaaaaaatcccacagccacctgacctgaagtcgctttcattctcatttagcctaggagaccgatcaacagcaaaaccaacctggataaggctgaataaggatgttaaagcccaaacaactagcaaaggaaaagtacacaatcgatggcttgatgttacatatggctgtaatgtagaaatactgtaaactgcaatttagtgttaatactgtcaactaatcagagacttcggaaaactggcaaggcctaaaccataaggatgaatgagacctcaggttctaagtctgtcagtctgggatttacactgttccatgtctgtaggctacaccctggaaaacatgcagagccgagacagatgagatagaaagtacccaaaacgagagacgagagcgtatgtacataaaaatccttactggaaccacagaacttactgaatgagggccattcctctttaagttttcttttcatctgaaaaccctattatctagcaataagttaaattagagacagacagctccacttgcatgaatctacagaacagtccagacgccagtgtgaggctgctattccaataccagcacagctagcctgactttccactagtggtattttggcaaaaatgtcaaagaggcgatcaaagacaggacaggtcgtgggtttctccctgggaaggtcatccctccctttccctcccccacccgacccccaactcatgggaaaaaaataaagactgcagtagtagcatccgcgtgcgctgccagttcccctggggccttaattgttgccttcgccgccatcgtcgtcctgctggtcgctcgtccagagcgtgaggttgtcgcggaggagctgcatgatgagcgtggagtccttgtaggagtcctcgttgagggtgtcaagctcggcgatggcgtcgtcgaacgcggtcttggccaagtggcacgcttgctctggggcgttctggatctcatagtagaagacggagtagttaagagccaggcctaatcggatggggtgggtgggctgcatgtgctctttgctgatctcgtgggcttcgctgtaggccttctcggaggactccaccaccgtcgcccttttctctccggtggccacttcagccaggtagcggtagtagtcccctttcatcttcaggtagaacactttgctctcgtactgggtctcgctgcaattcttgatcaggtagttatccagcaggctcagcacatcctggcacacagcctccaactccttctctatcttctcccggtacgcacggaccatctcaatcttcttctcattgccgtctgcagatgtcttctgctcaatgctactgatgaccctccaggaagagcggcgtgcccccacaacgttcttgtaggccacagacagaaggtttcgttcctcattcgacagtggctcattcagctctgtcacgttcttcatggccgcggccatgtcgtcgtagcgctccgcctgctcggccagccgggctttctgcaccagttgctcgcggtccaccatcttcgcggggctgggtctggccggagaaggaggaggacactggggcggcctgaagggcttggagggcgcgactggagcccaagtgccggagaggaccgacccacagagcgagcagctgaggcggcggctgcgcggaggaggcggctggagctgcgaccgcgggaccgggcgcgaggcggctgcggctgctgtgcgtgccactgacggacaaccccctcactggcgtcagatctgtaagtttatttgctcaatgtacgacagctacataatgactcacattcatgatattccatcactgaggaaactgctaaagatggtccgtgtgtgaaataattccttagagaaacacggagctggaaaaataatcactgattagaccttaaaaatagttcactgcataacatgacaaaaagcacaaaggctcattcagagaacatatttgttgttctccaacactgtaatagttataatttcaccatgacaaacaccagacattaagattaagctaacactggtgtttcttttgctcccccccttttaaaaacaaaatatataactgcatgtcactatagcaacatccaaaacagatcaatttgttacaatcactatttggtagagcaaactttacccccaaaaggaaaaattaaattaaaaaaaaaaaacctttaaaaaatttgaagacttaattttttttgtcataggaatacataacacctacagtataagttaatcaatttcaagctactgtatagaaatacaacactagcatgcacaatattgtatcaatagagtaatggaggagtaatcatttcactggagagacagtatcataggcaagtgcatttctttaaaaataaagaaaagaaaaaccattcaagctgcttaaatatcaagtctcccattccctctccgttttcagccctcaggtgtgatttttatcttgcattattctaaaaagcagccagagccaaagctgaaatttaaaggaaaaataggttttgtaattccagtaaatcatttccaaatgctacaaggaaaaacgcaacactgctcactggacatgaagataaattagggaaagccccacctaccctgcccccccccccctccccccccaaatcgtcttcctcccatggcaatgactttaggcgcctgtgagaggcacaaaagcggcaaagcttcttctactagttcttctggtaggcttcacttaactgggacttttactctagcgtgaggagggggcctcctaaggaaagtcatgctgggtaaactgtgcgatgttacagagcacattgagtctgtggtcatcgtggttcttctatcttcactgtcacctgtatcctgttacacatactcagttcctaattgtaagctcaattttggtattagcaaaagcatctgtcagtttttcctcaattactcacacctcttcttgcctaaataaaacaaagaaacaaagaaaacaagtgtggtgtcattacacgtctcgggagttcctcgtcactgactttatatatataaaaaaaagaatgcacatgcgggccacgttcacagatagacagattcacccgaaatgagaatgagggccttaaggctgccgaaaacaaatgggtggaaatagcaacgttgtttccgtcaattccaaatgtgcactggctgcgtgagacaagccaatctccaattcctatgcttttttcattaaaaagaaaaaactatctcgagaggaaaaagttctggtcaaataggagttcagtgtttgttatctggtaacagtttttttatcttcctacaattacttggggaaggagtgtcttcggggaggaaaaactgacacactgacaaggctcccgaaattggacagaatggttaaggatatagctcttccttttgggtttttctaccagtaggcttctagcacctgaattttcacacactgcaccacagaccttctccaaacgcctctccgaccccacagcttctgcacccagctgcgtccgccagcacgaggcgcagtaggaaacgccccagtgcagagtgggtgacggcagtgtgatccctgaggagggagctgcagcagcttcagaagcgggatgttctctgaaaataccaacacgatccatgacatacagacctgaattttctctatttttgtggcgtttcacgtttctctcaagaggattaataattttggtggtggatttacgttaagaggaaagaaggaccaaaaaaaaaaaatcccacagccacctgacctgaagtcgctttcattctcatttagcctaggagaccgatcaacagcaaaaccaacctggataaggctgaataaggatgttaaagcccaaacaactagcaaaggaaaagtacacaatcgatggcttgatgttacatatggctgtaatgtagaaatactgtaaactgcaatttagtgttaatactgtcaactaatcagagacttcggaaaactggcaaggcctaaaccataaggatgaatgagacctcaggttctaagtctgtcagtctgggatttacactgttccatgtctgtaggctacaccctggaaaacatgcagagccgagacagatgagatagaaagtacccaaaacgagagacgagagcgtatgtacataaaaatccttactggaaccacagaacttactgaatgagggccattcctctttaagttttcttttcatctgaaaaccctattatctagcaataagttaaattagagacagacagctccacttgcatgaatctacagaacagtccagacgccagtgtgaggctgctattccaataccagcacagctagcctgactttccactagtggtattttggcaaaaatgtcaaagaggcgatcaaagacaggacaggtcgtgggtttctccctgggaaggtcatccctccctttccctcccccacccgacccccaactcatgggaaaaaaataaagactgcagtagtagcatccgcgtgcgctgccagttcccctggggccttaattgttgccttcgccgccatcgtcgtcctgctggtcgctcgtccagagcgtgaggttgtcgcggaggagctgcatgatgagcgtggagtccttgtaggagtcctcgttgagggtgtcaagctcggcgatggcgtcgtcgaacgcggtcttggccaagtggcacgcttgctctggggcgttctggatctcatagtagaagacggagtagttaagagccaggcctaatcggatggggtgggtgggctgcatgtgctctttgctgatctcgtgggcttcgctgtaggccttctcggaggactccaccaccgtcgcccttttctctccggtggccacttcagccaggtagcggtagtagtcccctttcatcttcaggtagaacactttgctctcgtactgggtctcgctgcaattcttgatcaggtagttatccagcaggctcagcacatcctggcacacagcctccaactccttctctatcttctcccggtacgcacggaccatctcaatcttcttctcattgccgtctgcagatgtcttctgctcaatgctactgatgaccctccaggaagagcggcgtgcccccacaacgttcttgtaggccacagacagaaggtttcgttcctcattcgacagtggctcattcagctctgtcacgttcttcatggccgcggccatgtcgtcgtagcgctccgcctgctcggccagccgggctttctgcaccagttgctcgcggtccaccatcttcgcggggctgggtctggccggagaaggaggaggacactggggcggcctgaagggcttggagggcgcgactggagcccaagtgccggagaggaccgacccacagagcgagcagctgaggcggcggctgcgcggaggaggcggctggagctgcgaccgcgggaccgggcgcgaggcggctgcggctgctgtgcgtgccactgacggacaaccccctcactggcgtcagatctgtaagtttatttgctcaatgtacgacagctacataatgactcacattcatgatattccatcactgaggaaactgctaaagatggtccgtgtgtgaaataattccttagagaaacacggagctggaaaaataatcactgattagaccttaaaaatagttcactgcataacatgacaaaaagcacaaaggctcattcagagaacatatttgttgttctccaacactgtaatagttataatttcaccatgacaaacaccagacattaagattaagctaacactggtgtttcttttgctcccccccttttaaaaacaaaatatataactgcatgtcactatagcaacatccaaaacagatcaatttgttacaatcactatttggtagagcaaactttacccccaaaaggaaaaattaaattaaaaaaaaaaaacctttaaaaaatttgaagacttaattttttttgtcataggaatacataacacctacagtataagttaatcaatttcaagctactgtatagaaatacaacactagcatgcacaatattgtatcaatagagtaatggaggagtaatcatttcactggagagacagtatcataggcaagtgcatttctttaaaaataaagaaaagaaaaaccattcaagctgcttaaatatcaagtctcccattccctctccgttttcagccctcaggtgtgatttttatcttgcattattctaaaaagcagccagagccaaagctgaaatttaaaggaaaaataggttttgtaattccagtaaatcatttccaaatgctacaaggaaaaacgcaacactgctcactggacatgaagataaattagggaaagccccacctaccctgcccccccccccc

SEQ ID NO: 653 - DNA, 17607 bp, Homo sapiens
  misc_feature (477)..(477): second gene starts at position 477
atgcttaggggtccggggcccgggctgctgctgctggccgtccagtgcctggggacagcggtgccctccacgggagcctcgaagagcaagaggcaggctcagcaaatggttcagccccagtccccggtggctgtcagtcaaagcaagcccggttgttatgacaatggaaaacactatcagataaatcaacagtgggagcggacctacctaggcaatgcgttggtttgtacttgttatggaggaagccgaggttttaactgcgagagtaaacctgaagctgaagagacttgctttgacaagtacactgggaacacttaccgagtgggtgacacttatgagcgtcctaaagactccatgatctgggactgtacctgcatcggggctgggcgagggagaataagctgtaccatcgcaaaccgctgccatgaagggggtcagtcctacaagattggtgacacctggaggagaccacatgagactggtggttacatgttagagtgtgtgtgtcttggtaatggaaaaggagaatggacctgcaagcccatagctgagaagtgttttgatcatgctgctgggacttcctatgtggtcggagaaacgtgggagaagccctaccaaggctggatgatggtagattgtacttgcctgggagaaggcagcggacgcatcacttgcacttctagaaatagatgcaacgatcaggacacaaggacatcctatagaattggagacacctggagcaagaaggataatcgaggaaacctgctccagtgcatctgcacaggcaacggccgaggagagtggaagtgtgagaggcacacctctgtgcagaccacatcgagcggatctggccccttcaccgatgttcgtgcagctgtttaccaaccgcagcctcacccccagcctcctccctatggccactgtgtcacagacagtggtgtggtctactctgtggggatgcagtggctgaagacacaaggaaataagcaaatgctttgcacgtgcctgggcaacggagtcagctgccaagagacagctgtaacccagacttacggtggcaactcaaatggagagccatgtgtcttaccattcacctacaatggcaggacgttctactcctgcaccacagaagggcgacaggacggacatctttggtgcagcacaacttcgaattatgagcaggaccagaaatactctttctgcacagaccacactgttttggttcagactcgaggaggaaattccaatggtgccttgtgccacttccccttcctatacaacaaccacaattacactgattgcacttctgagggcagaagagacaacatgaagtggtgtgggaccacacagaactatgatgccgaccagaagtttgggttctgccccatggctgcccacgaggaaatctgcacaaccaatgaaggggtcatgtaccgcattggagatcagtgggataagcagcatgacatgggtcacatgatgaggtgcacgtgtgttgggaatggtcgtggggaatggacatgcattgcctactcgcagcttcgagatcagtgcattgttgatgacatcacttacaatgtgaacgacacattccacaagcgtcatgaagaggggcacatgctgaactgtacatgcttcggtcagggtcggggcaggtggaagtgtgatcccgtcgaccaatgccaggattcagagactgggacgttttatcaaattggagattcatgggagaagtatgtgcatggtgtcagataccagtgctactgctatggccgtggcattggggagtggcattgccaacctttacagacctatccaagctcaagtggtcctgtcgaagtatttatcactgagactccgagtcagcccaactcccaccccatccagtggaatgcaccacagccatctcacatttccaagtacattctcaggtggagacctaaaaattctgtaggccgttggaaggaagctaccataccaggccacttaaactcctacaccatcaaaggcctgaagcctggtgtggtatacgagggccagctcatcagcatccagcagtacggccaccaagaagtgactcgctttgacttcaccaccaccagcaccagcacacctgtgaccagcaacaccgtgacaggagagacgactcccttttctcctcttgtggccacttctgaatctgtgaccgaaatcacagccagtagctttgtggtctcctgggtctcagcttccgacaccgtgtcgggattccgggtggaatatgagctgagtgaggagggagatgagccacagtacctggatcttccaagcacagccacttctgtgaacatccctgacctgcttcctggccgaaaatacattgtaaatgtctatcagatatctgaggatggggagcagagtttgatcctgtctacttcacaaacaacagcgcctgatgcccctcctgacacgactgtggaccaagttgatgacacctcaattgttgttcgctggagcagaccccaggctcccatcacagggtacagaatagtctattcgccatcagtagaaggtagcagcacagaactcaaccttcctgaaactgcaaactccgtcaccctcagtgacttgcaacctggtgttcagtataacatcactatctatgctgtggaagaaaatcaagaaagtacacctgttgtcattcaacaagaaaccactggcaccccacgctcagatacagtgccctctcccagggacctgcagtttgtggaagtgacagacgtgaaggtcaccatcatgtggacaccgcctgagagtgcagtgaccggctaccgtgtggatgtgatccccgtcaacctgcctggcgagcacgggcagaggctgcccatcagcaggaacacctttgcagaagtcaccgggctgtcccctggggtcacctattacttcaaagtctttgcagtgagccatgggagggagagcaagcctctgactgctcaacagacaaccaaactggatgctcccactaacctccagtttgtcaatgaaactgattctactgtcctggtgagatggactccacctcgggcccagataacaggataccgactgaccgtgggccttacccgaagaggacagcccaggcagtacaatgtgggtccctctgtctccaagtacccactgaggaatctgcagcctgcatctgagtacaccgtatccctcgtggccataaagggcaaccaagagagccccaaagccactggagtctttaccacactgcagcctgggagctctattccaccttacaacaccgaggtgactgagaccaccattgtgatcacatggacgcctgctccaagaattggttttaagctgggtgtacgaccaagccagggaggagaggcaccacgagaagtgacttcagactcaggaagcatcgttgtgtccggcttgactccaggagtagaatacgtctacaccatccaagtcctgagagatggacaggaaagagatgcgccaattgtaaacaaagtggtgacaccattgtctccaccaacaaacttgcatctggaggcaaaccctgacactggagtgctcacagtctcctgggagaggagcaccaccccagacattactggttatagaattaccacaacccctacaaacggccagcagggaaattctttggaagaagtggtccatgctgatcagagctcctgcacttttgataacctgagtcccggcctggagtacaatgtcagtgtttacactgtcaaggatgacaaggaaagtgtccctatctctgataccatcatcccagctgttcctcctcccactgacctgcgattcaccaacattggtccagacaccatgcgtgtcacctgggctccacccccatccattgatttaaccaacttcctggtgcgttactcacctgtgaaaaatgaggaagatgttgcagagttgtcaatttctccttcagacaatgcagtggtcttaacaaatctcctgcctggtacagaatatgtagtgagtgtctccagtgtctacgaacaacatgagagcacacctcttagaggaagacagaaaacaggtcttgattccccaactggcattgacttttctgatattactgccaactcttttactgtgcactggattgctcctcgagccaccatcactggctacaggatccgccatcatcccgagcacttcagtgggagacctcgagaagatcgggtgccccactctcggaattccatcaccctcaccaacctcactccaggcacagagtatgtggtcagcatcgttgctcttaatggcagagaggaaagtcccttattgattggccaacaatcaacagtttctgatgttccgagggacctggaagttgttgctgcgacccccaccagcctactgatcagctgggatgctcctgctgtcacagtgagatattacaggatcacttacggagagacaggaggaaatagccctgtccaggagttcactgtgcctgggagcaagtctacagctaccatcagcggccttaaacctggagttgattataccatcactgtgtatgctgtcactggccgtggagacagccccgcaagcagcaagccaatttccattaattaccgaacagaaattgacaaaccatcccagatgcaagtgaccgatgttcaggacaacagcattagtgtcaagtggctgccttcaagttcccctgttactggttacagagtaaccaccactcccaaaaatggaccaggaccaacaaaaactaaaactgcaggtccagatcaaacagaaatgactattgaaggcttgcagcccacagtggagtatgtggttagtgtctatgctcagaatccaagcggagagagtcagcctctggttcagactgcagtaaccactattcctgcaccaactgacctgaagttcactcaggtcacacccacaagcctgagcgcccagtggacaccacccaatgttcagctcactggatatcgagtgcgggtgacccccaaggagaagaccggaccaatgaaagaaatcaaccttgctcctgacagctcatccgtggttgtatcaggacttatggtggccaccaaatatgaagtgagtgtctatgctcttaaggacactttgacaagcagaccagctcagggagttgtcaccactctggagaatgtcagcccaccaagaagggctcgtgtgacagatgctactgagaccaccatcaccattagctggagaaccaagactgagacgatcactggcttccaagttgatgccgttccagccaatggccagactccaatccagagaaccatcaagccagatgtcagaagctacaccatcacaggtttacaaccaggcactgactacaagatctacctgtacaccttgaatgacaatgctcggagctcccctgtggtcatcgacgcctccactgccattgatgcaccatccaacctgcgtttcctggccaccacaccactggcgtcagatctgtaagtttatttgctcaatgtacgacagctacataatgactcacattcatgatattccatcactgaggaaactgctaaagatggtccgtgtgtgaaataattccttagagaaacacggagctggaaaaataatcactgattagaccttaaaaatagttcactgcataacatgacaaaaagcacaaaggctcattcagagaacatatttgttgttctccaacactgtaatagttataatttcaccatgacaaacaccagacattaagattaagctaacactggtgtttcttttgctcccccccttttaaaaacaaaatatataactgcatgtcactatagcaacatccaaaacagatcaatttgttacaatcactatttggtagagcaaactttacccccaaaaggaaaaattaaattaaaaaaaaaaaacctttaaaaaatttgaagacttaattttttttgtcataggaatacataacacctacagtataagttaatcaatttcaagctactgtatagaaatacaacactagcatgcacaatattgtatcaatagagtaatggaggagtaatcatttcactggagagacagtatcataggcaagtgcatttctttaaaaataaagaaaagaaaaaccattcaagctgcttaaatatcaagtctcccattccctctccgttttcagccctcaggtgtgatttttatcttgcattattctaaaaagcagccagagccaaagctgaaatttaaaggaaaaataggttttgtaattccagtaaatcatttccaaatgctacaaggaaaaacgcaacactgctcactggacatgaagataaattagggaaagccccacctaccctgcccccccccccctccccccccaaatcgtcttcctcccatggcaatgactttaggcgcctgtgagaggcacaaaagcggcaaagcttcttctactagttcttctggtaggcttcacttaactgggacttttactctagcgtgaggagggggcctcctaaggaaagtcatgctgggtaaactgtgcgatgttacagagcacattgagtctgtggtcatcgtggttcttctatcttcactgtcacctgtatcctgttacacatactcagttcctaattgtaagctcaattttggtattagcaaaagcatctgtcagtttttcctcaattactcacacctcttcttgcctaaataaaacaaagaaacaaagaaaacaagtgtggtgtcattacacgtctcgggagttcctcgtcactgactttatatatataaaaaaaagaatgcacatgcgggccacgttcacagatagacagattcacccgaaatgagaatgagggccttaaggctgccgaaaacaaatgggtggaaatagcaacgttgtttccgtcaattccaaatgtgcactggctgcgtgagacaagccaatctccaattcctatgcttttttcattaaaaagaaaaaactatctcgagaggaaaaagttctggtcaaataggagttcagtgtttgttatctggtaacagtttttttatcttcctacaattacttggggaaggagtgtcttcggggaggaaaaactgacacactgacaaggctcccgaaattggacagaatggttaaggatatagctcttccttttgggtttttctaccagtaggcttctagcacctgaattttcacacactgcaccacagaccttctccaaacgcctctccgaccccacagcttctgcacccagctgcgtccgccagcacgaggcgcagtaggaaacgccccagtgcagagtgggtgacggcagtgtgatccctgaggagggagctgcagcagcttcagaagcgggatgttctctgaaaataccaacacgatccatgacatacagacctgaattttctctatttttgtggcgtttcacgtttctctcaagaggattaataattttggtggtggatttacgttaagaggaaagaaggaccaaaaaaaaaaaatcccacagccacctgacctgaagtcgctttcattctcatttagcctaggagaccgatcaacagcaaaaccaacctggataaggctgaataaggatgttaaagcccaaacaactagcaaaggaaaagtacacaatcgatggcttgatgttacatatggctgtaatgtagaaatactgtaaactgcaatttagtgttaatactgtcaactaatcagagacttcggaaaactggcaaggcctaaaccataaggatgaatgagacctcaggttctaagtctgtcagtctgggatttacactgttccatgtctgtaggctacaccctggaaaacatgcagagccgagacagatgagatagaaagtacccaaaacgagagacgagagcgtatgtacataaaaatccttactggaaccacagaacttactgaatgagggccattcctctttaagttttcttttcatctgaaaaccctattatctagcaataagttaaattagagacagacagctccacttgcatgaatctacagaacagtccagacgccagtgtgaggctgctattccaataccagcacagctagcctgactttccactagtggtattttggcaaaaatgtcaaagaggcgatcaaagacaggacaggtcgtgggtttctccctgggaaggtcatccctccctttccctcccccacccgacccccaactcatgggaaaaaaataaagactgcagtagtagcatccgcgtgcgctgccagttcccctggggccttaattgttgccttcgccgccatcgtcgtcctgctggtcgctcgtccagagcgtgaggttgtcgcggaggagctgcatgatgagcgtggagtccttgtaggagtcctcgttgagggtgtcaagctcggcgatggcgtcgtcgaacgcggtcttggccaagtggcacgcttgctctggggcgttctggatctcatagtagaagacggagtagttaagagccaggcctaatcggatggggtgggtgggctgcatgtgctctttgctgatctcgtgggcttcgctgtaggccttctcggaggactccaccaccgtcgcccttttctctccggtggccacttcagccaggtagcggtagtagtcccctttcatcttcaggtagaacactttgctctcgtactgggtctcgctgcaattcttgatcaggtagttatccagcaggctcagcacatcctggcacacagcctccaactccttctctatcttctcccggtacgcacggaccatctcaatcttcttctcattgccgtctgcagatgtcttctgctcaatgctactgatgaccctccaggaagagcggcgtgcccccacaacgttcttgtaggccacagacagaaggtttcgttcctcattcgacagtggctcattcagctctgtcacgttcttcatggccgcggccatgtcgtcgtagcgctccgcctgctcggccagccgggctttctgcaccagttgctcgcggtccaccatcttcgcggggctgggtctggccggagaaggaggaggacactggggcggcctgaagggcttggagggcgcgactggagcccaagtgccggagaggaccgacccacagagcgagcagctgaggcggcggctgcgcggaggaggcggctggagctgcgaccgcgggaccgggcgcgaggcggctgcggctgctgtgcgtgccactgacggacaaccccctcactggcgtcagatctgtaagtttatttgctcaatgtacgacagctacataatgactcacattcatgatattccatcactgaggaaactgctaaagatggtccgtgtgtgaaataattccttagagaaacacggagctggaaaaataatcactgattagaccttaaaaatagttcactgcataacatgacaaaaagcacaaaggctcattcagagaacatatttgttgttctccaacactgtaatagttataatttcaccatgacaaacaccagacattaagattaagctaacactggtgtttcttttgctcccccccttttaaaaacaaaatatataactgcatgtcactatagcaacatccaaaacagatcaatttgttacaatcactatttggtagagcaaactttacccccaaaaggaaaaattaaattaaaaaaaaaaaacctttaaaaaatttgaagacttaattttttttgtcataggaatacataacacctacagtataagttaatcaatttcaagctactgtatagaaatacaacactagcatgcacaatattgtatcaatagagtaatggaggagtaatcatttcactggagagacagtatcataggcaagtgcatttctttaaaaataaagaaaagaaaaaccattcaagctgcttaaatatcaagtctcccattccctctccgttttcagccctcaggtgtgatttttatcttgcattattctaaaaagcagccagagccaaagctgaaatttaaaggaaaaataggttttgtaattccagtaaatcatttccaaatgctacaaggaaaaacgcaacactgctcactggacatgaagataaattagggaaagccccacctaccctgcccccccccccctccccccccaaatcgtcttcctcccatggcaatgactttaggcgcctgtgagaggcacaaaagcggcaaagcttcttctactagttcttctggtaggcttcacttaactgggacttttactctagcgtgaggagggggcctcctaaggaaagtcatgctgggtaaactgtgcgatgttacagagcacattgagtctgtggtcatcgtggttcttctatcttcactgtcacctgtatcctgttacacatactcagttcctaattgtaagctcaattttggtattagcaaaagcatctgtcagtttttcctcaattactcacacctcttcttgcctaaataaaacaaagaaacaaagaaaacaagtgtggtgtcattacacgtctcgggagttcctcgtcactgactttatatatataaaaaaaagaatgcacatgcgggccacgttcacagatagacagattcacccgaaatgagaatgagggccttaaggctgccgaaaacaaatgggtggaaatagcaacgttgtttccgtcaattccaaatgtgcactggctgcgtgagacaagccaatctccaattcctatgcttttttcattaaaaagaaaaaactatctcgagaggaaaaagttctggtcaaataggagttcagtgtttgttatctggtaacagtttttttatcttcctacaattacttggggaaggagtgtcttcggggaggaaaaactgacacactgacaaggctcccgaaattggacagaatggttaaggatatagctcttccttttgggtttttctaccagtaggcttctagcacctgaattttcacacactgcaccacagaccttctccaaacgcctctccgaccccacagcttctgcacccagctgcgtccgccagcacgaggcgcagtaggaaacgccccagtgcagagtgggtgacggcagtgtgatccctgaggagggagctgcagcagcttcagaagcgggatgttctctgaaaataccaacacgatccatgacatacagacctgaattttctctatttttgtggcgtttcacgtttctctcaagaggattaataattttggtggtggatttacgttaagaggaaagaaggaccaaaaaaaaaaaatcccacagccacctgacctgaagtcgctttcattctcatttagcctaggagaccgatcaacagcaaaaccaacctggataaggctgaataaggatgttaaagcccaaacaactagcaaaggaaaagtacacaatcgatggcttgatgttacatatggctgtaatgtagaaatactgtaaactgcaatttagtgttaatactgtcaactaatcagagacttcggaaaactggcaaggcctaaaccataaggatgaatgagacctcaggttctaagtctgtcagtctgggatttacactgttccatgtctgtaggctacaccctggaaaacatgcagagccgagacagatgagatagaaagtacccaaaacgagagacgagagcgtatgtacataaaaatccttactggaaccacagaacttactgaatgagggccattcctctttaagttttcttttcatctgaaaaccctattatctagcaataagttaaattagagacagacagctccacttgcatgaatctacagaacagtccagacgccagtgtgaggctgctattccaataccagcacagctagcctgactttccactagtggtattttggcaaaaatgtcaaagaggcgatcaaagacaggacaggtcgtgggtttctccctgggaaggtcatccctccctttccctcccccacccgacccccaactcatgggaaaaaaataaagactgcagtagtagcatccgcgtgcgctgccagttcccctggggccttaattgttgccttcgccgccatcgtcgtcctgctggtcgctcgtccagagcgtgaggttgtcgcggaggagctgcatgatgagcgtggagtccttgtaggagtcctcgttgagggtgtcaagctcggcgatggcgtcgtcgaacgcggtcttggccaagtggcacgcttgctctggggcgttctggatctcatagtagaagacggagtagttaagagccaggcctaatcggatggggtgggtgggctgcatgtgctctttgctgatctcgtgggcttcgctgtaggccttctcggaggactccaccaccgtcgcccttttctctccggtggccacttcagccaggtagcggtagtagtcccctttcatcttcaggtagaacactttgctctcgtactgggtctcgctgcaattcttgatcaggtagttatccagcaggctcagcacatcctggcacacagcctccaactccttctctatcttctcccggtacgcacggaccatctcaatcttcttctcattgccgtctgcagatgtcttctgctcaatgctactgatgaccctccaggaagagcggcgtgcccccacaacgttcttgtaggccacagacagaaggtttcgttcctcattcgacagtggctcattcagctctgtcacgttcttcatggccgcggccatgtcgtcgtagcgctccgcctgctcggccagccgggctttctgcaccagttgctcgcggtccaccatcttcgcggggctgggtctggccggagaaggaggaggacactggggcggcctgaagggcttggagggcgcgactggagcccaagtgccggagaggaccgacccacagagcgagcagctgaggcggcggctgcgcggaggaggcggctggagctgcgaccgcgggaccgggcgcgaggcggctgcggctgctgtgcgtgccactgacggacaaccccctcactggcgtcagatctgtaagtttatttgctcaatgtacgacagctacataatgactcacattcatgatattccatcactgaggaaactgctaaagatggtccgtgtgtgaaataattccttagagaaacacggagctggaaaaataatcactgattagaccttaaaaatagttcactgcataacatgacaaaaagcacaaaggctcattcagagaacatatttgttgttctccaacactgtaatagttataatttcaccatgacaaacaccagacattaagattaagctaacactggtgtttcttttgctcccccccttttaaaaacaaaatatataactgcatgtcactatagcaacatccaaaacagatcaatttgttacaatcactatttggtagagcaaactttacccccaaaaggaaaaattaaattaaaaaaaaaaaacctttaaaaaatttgaagacttaattttttttgtcataggaatacataacacctacagtataagttaatcaatttcaagctactgtatagaaatacaacactagcatgcacaatattgtatcaatagagtaatggaggagtaatcatttcactggagagacagtatcataggcaagtgcatttctttaaaaataaagaaaagaaaaaccattcaagctgcttaaatatcaagtctcccattccctctccgttttcagccctcaggtgtgatttttatcttgcattattctaaaaagcagccagagccaaagctgaaatttaaaggaaaaataggttttgtaattccagtaaatcatttccaaatgctacaaggaaaaacgcaacactgctcactggacatgaagataaattagggaaagccccacctaccctgcccccccccccctccccccccaaatcgtcttcctcccatggcaatgactttaggcgcctgtgagaggcacaaaagcggcaaagcttcttctactagttcttctggtaggcttcacttaactgggacttttactctagcgtgaggagggggcctcctaaggaaagtcatgctgggtaaactgtgcgatgttacagagcacattgagtctgtggtcatcgtggttcttctatcttcactgtcacctgtatcctgttacacatactcagttcctaattgtaagctcaattttggtattagcaaaagcatctgtcagtttttcctcaattactcacacctcttcttgcctaaataaaacaaagaaacaaagaaaacaagtgtggtgtcattacacgtctcgggagttcctcgtcactgactttatatatataaaaaaaagaatgcacatgcgggccacgttcacagatagacagattcacccgaaatgagaatgagggccttaaggctgccgaaaacaaatgggtggaaatagcaacgttgtttccgtcaattccaaatgtgcactggctgcgtgagacaagccaatctccaattcctatgcttttttcattaaaaagaaaaaactatctcgagaggaaaaagttctggtcaaataggagttcagtgtttgttatctggtaacagtttttttatcttcctacaattacttggggaaggagtgtcttcggggaggaaaaactgacacactgacaaggctcccgaaattggacagaatggttaaggatatagctcttccttttgggtttttctaccagtaggcttctagcacctgaattttcacacactgcaccacagaccttctccaaacgcctctccgaccccacagcttctgcacccagctgcgtccgccagcacgaggcgcagtaggaaacgccccagtgcagagtgggtgacggcagtgtgatccctgaggagggagctgcagcagcttcagaagcgggatgttctctgaaaataccaacacgatccatgacatacagacctgaattttctctatttttgtggcgtttcacgtttctctcaagaggattaataattttggtggtggatttacgttaagaggaaagaaggaccaaaaaaaaaaaatcccacagccacctgacctgaagtcgctttcattctcatttagcctaggagaccgatcaacagcaaaaccaacctggataaggctgaataaggatgttaaagcccaaacaactagcaaaggaaaagtacacaatcgatggcttgatgttacatatggctgtaatgtagaaatactgtaaactgcaatttagtgttaatactgtcaactaatcagagacttcggaaaactggcaaggcctaaaccataaggatgaatgagacctcaggttctaagtctgtcagtctgggatttacactgttccatgtctgtaggctacaccctggaaaacatgcagagccgagacagatgagatagaaagtacccaaaacgagagacgagagcgtatgtacataaaaatccttactggaaccacagaacttactgaatgagggccattcctctttaagttttcttttcatctgaaaaccctattatctagcaataagttaaattagagacagacagctccacttgcatgaatctacagaacagtccagacgccagtgtgaggctgctattccaataccagcacagctagcctgactttccactagtggtattttggcaaaaatgtcaaagaggcgatcaaagacaggacaggtcgtgggtttctccctgggaaggtcatccctccctttccctcccccacccgacccccaactcatgggaaaaaaataaagactgcagtagtagcatccgcgtgcgctgccagttcccctggggccttaattgttgccttcgccgccatcgtcgtcctgctggtcgctcgtccagagcgtgaggttgtcgcggaggagctgcatgatgagcgtggagtccttgtaggagtcctcgttgagggtgtcaagctcggcgatggcgtcgtcgaacgcggtcttggccaagtggcacgcttgctctggggcgttctggatctcatagtagaagacggagtagttaagagccaggcctaatcggatggggtgggtgggctgcatgtgctctttgctgatctcgtgggcttcgctgtaggccttctcggaggactccaccaccgtcgcccttttctctccggtggccacttcagccaggtagcggtagtagtcccctttcatcttcaggtagaacactttgctctcgtactgggtctcgctgcaattcttgatcaggtagttatccagcaggctcagcacatcctggcacacagcctccaactccttctctatcttctcccggtacgcacggaccatctcaatcttcttctcattgccgtctgcagatgtcttctgctcaatgctactgatgaccctccaggaagagcggcgtgcccccacaacgttcttgtaggccacagacagaaggtttcgttcctcattcgacagtggctcattcagctctgtcacgttcttcatggccgcggccatgtcgtcgtagcgctccgcctgctcggccagccgggctttctgcaccagttgctcgcggtccaccatcttcgcggggctgggtctggccggagaaggaggaggacactggggcggcctgaagggcttggagggcgcgactggagcccaagtgccggagaggaccgacccacagagcgagcagctgaggcggcggctgcgcggaggaggcggctggagctgcgaccgcgggaccgggcgcgaggcggctgcggctgctgtgcgtgccactgacggacaaccccctcactggcgtcagatctgtaagtttatttgctcaatgtacgacagctacataatgactcacattcatgatattccatcactgaggaaactgctaaagatggtccgtgtgtgaaataattccttagagaaacacggagctggaaaaataatcactgattagaccttaaaaatagttcactgcataacatgacaaaaagcacaaaggctcattcagagaacatatttgttgttctccaacactgtaatagttataatttcaccatgacaaacaccagacattaagattaagctaacactggtgtttcttttgctcccccccttttaaaaacaaaatatataactgcatgtcactatagcaacatccaaaacagatcaatttgttacaatcactatttggtagagcaaactttacccccaaaaggaaaaattaaattaaaaaaaaaaaacctttaaaaaatttgaagacttaattttttttgtcataggaatacataacacctacagtataagttaatcaatttcaagctactgtatagaaatacaacactagcatgcacaatattgtatcaatagagtaatggaggagtaatcatttcactggagagacagtatcataggcaagtgcatttctttaaaaataaagaaaagaaaaaccattcaagctgcttaaatatcaagtctcccattccctctccgttttcagccctcaggtgtgatttttatcttgcattattctaaaaagcagccagagccaaagctgaaatttaaaggaaaaataggttttgtaattccagtaaatcatttccaaatgctacaaggaaaaacgcaacactgctcactggacatgaagataaattagggaaagccccacctaccctgcccccccccccc

SEQ ID NO: 654 - DNA, 17607 bp, Homo sapiens; identical to SEQ ID NO: 653
  misc_feature (477)..(477): second gene starts at position 477

SEQ ID NO: 655 - DNA, 17877 bp, Homo sapiens; identical to SEQ ID NO: 651
  misc_feature (747)..(747): second gene starts at position 747

SEQ ID NO: 656 - DNA, 15846 bp, Homo sapiens
  misc_feature (147)..(147): second gene starts at position 147
atgaagacacgacagaataaagactcgatgtcaatgaggagtggacggaagaaagaggcccctgggccccgggaagaactgagatcgaggggccgggcctcccctggaggggtcagcacgtccagcagtgatggcaaagctgagaagtccaggcagacagccaagaaggcccgagtagaggaagcctccaccccaaaggtcaacaagcagggtcggagtgaggagatctcagagagtgaaagtgaggagaccaatgcaccaaaaaagaccaaaactgagcaggaactccctcggccacagtctccctccgatctggatagcttggacgggcggagccttaatgatgatggcagcagcgaccctagggatatcgaccaggacaaccgaagcacgtcccccagtatctacagccctggaagtgtggagaatgactctgactcatcttctggcctgtcccagggcccagcccgcccctaccacccacctccactctttcctccttcccctcaaccgccagacagcacccctcgacagccagaggctagctttgaaccccatccttctgtgacacccactggatatcatgctcccatggagccccccacatctcgaatgttccaggctcctcctggggcccctccccctcacccacagctctatcctgggggcactggtggagttttgtctggacccccaatgggtcccaaggggggaggggctgcctcatcagtggggggccctaatgggggtaagcagcaccccccacccactactcccatttcagtatcaagctctggggctagtggtgctcccccaacaaagccgcctaccactccagtgggtggtgggaacctaccttctgctccaccaccagccaacttcccccatgtgacaccgaacctgcctcccccacctgccctgagacccctcaacaatgcatcagcctctccccctggcctgggggcccaaccactacctggtcatctgccctctccccacgccatgggacagggtatgggtggacttcctcctggcccagagaagggcccaactctggctccttcaccccactctctgcctcctgcttcctcttctgctccagcgccccccatgaggtttccttattcatcctctagtagtagctctgcagcagcctcctcttccagttcttcctcctcttcctctgcctcccccttcccagcttcccaggcattgcccagctacccccactctttccctcccccaacaagcctctctgtctccaatcagccccccaagtatactcagccttctctcccatcccaggctgtgtggagccagggtcccccaccacctcctccctatggccgcctcttagccaacagcaatgcccatccaggccccttccctccctctactggggcccagtccaccgcccacccaccagtctcaacacatcaccatcaccaccagcaacagcaacagcagcagcagcagcagcagcagcagcagcagcagcagcagcagcatcacggaaactctgggccccctcctcctggagcatttccccacccactggagggcggtagctcccaccacgcacacccttacgccatgtctccctccctggggtctctgaggccctacccaccagggccagcacacctgcccccacctcacagccaggtgtcctacagccaagcaggccccaatggccctccagtctcttcctcttccaactcttcctcttccacttctcaagggtcctacccatgttcacacccctccccttcccagggccctcaaggggcgccctaccctttcccaccggtgcctacggtcaccacctcttcggctaccctttccacggtcattgccaccgtggcttcctcgccagcaggctacaaaacggcctccccacctgggcccccaccgtacggaaagagagccccgtccccgggggcctacaagacagccaccccacccggatacaaacccgggtcgcctccctccttccgaacggggaccccaccgggctatcgaggaacctcgccacctgcaggcccagggaccttcaagccgggctcgcccaccgtgggacctgggcccctgccacctgcggggccctcaggcctgccatcgctgccaccaccacctgcggcccctgcctcagggccgcccctgagcgccacgcagatcaaacaggagccggctgaggagtatgagacccccgagagcccggtgcccccagcccgcagcccctcgccccctcccaaggtggtagatgtacccagccatgccagtcagtctgccaggttcaacaaacacctggatcgcggcttcaactcgtgcgcgcgcagcgacctgtacttcgtgccactggagggctccaagctggccaagaagcgggccgacctggtggagaaggtgcggcgcgaggccgagcagcgcgcgcgcgaagaaaaggagcgcgagcgcgagcgggaacgcgagaaagagcgcgagcgcgagaaggagcgcgagcttgaacgcagcgtgaagttggctcaggagggccgtgctccggtggaatgcccatctctgggcccagtgccccatcgccctccatttgaaccgggcagtgcggtggctacagtgcccccctacctgggtcctgacactccagccttgcgcactctcagtgaatatgcccggcctcatgtcatgtctcctggcaatcgcaaccatccattctacgtgcccctgggggcagtggacccggggctcctgggttacaatgtcccggccctgtacagcagtgatccagctgcccgggagagggaacgggaagcccgtgaacgagacctccgtgaccgcctcaagcctggctttgaggtgaagcctagtgagctggaacccctacatggggtccctgggccgggcttggatccctttccccgacatgggggcctggctctgcagcctggcccacctggcctgcaccctttcccctttcatccgagcctggggcccctggagcgagaacgtctagcgctggcagctgggccagccctgcggcctgacatgtcctatgctgagcggctggcagctgagaggcagcacgcagaaagggtggcggccctgggcaatgacccactggcccggctgcagatgctcaatgtgactcctgctggtggtgatgggcttctggtgggcagtgagaaggtgaccatgcagaacctcaatgaccgcctggcctcctacctggacaaggtgcgtgctctggaggaggccaacgccgacctggaagtgaagatccgtgactggtaccagaggcagcggcctgctgagatcaaagactacagtccctacttcaagaccattgaggacctgaggaacaagattctcacagccacagtggacaatgccaatgtccttctgcagattgacaatgcccgtctggccgcggatgacttccgcaccaagtatgagacagagttgaacctgcgcatgagtgtggaagccgacatcaatggcctgcgcagggtgctggacgaactgaccctggccagagctgacctggagatgcagattgagagcctgaaggaggagctggcctacctgaagaagaaccacgaggaggagatgaatgccctgagaggccaggtgggtggagatgtcaatgtggagatggacgctgcacctggcgtggacctgagccgcattctgaacgagatgcgtgaccagtatgagaagatggcagagaagaaccgcaaggatgccgaggaatggttcttcaccaagacagaggagctgaaccgcgaggtggccaccaacagcgagctggtgcagagcggcaagagcgagatctcggagctccggcgcaccatgcagaacctggagattgagctgcagtcccagctcagcatgaaagcatccctggagaacagcctggaggagaccaaaggtcgctactgcatgcagctggcccagatccaggagatgattggcagcgtggaggagcagctggcccagctccgctgcgagatggagcagcagaaccaggagtacaagatcctgctggacgtgaagacgcggctggagcaggagatcgccacctaccgccgcctgctggagggcgaggacgcccacctctcctcctcccagttctcctctggatcgcagtcatccagagatgtgacctcctccagccgccaaatccgcaccaaggtcatggatgtgcacgatggcaaggtggtgtccacccacgagcaggtccttcgcaccaagaactgaggctgcccagccccgctcaggcctaggaggccccccgtgtggacacagatcccactggaagatcccctctcctgcccaagcacttcacagctggaccctgcttcaccctcaccccctcctggcaatcaatacagcttcattatctgagttgcatacccgagcaccttctcttcactcagccaactgctcgctcgctcacctccctcctctgcaccatgaccacctgcagccgccagttcacctcctccagctccatgaagggctcctgcggcatcgggggcggcatcgggggcggctccagccgcatctcctccgtcctggccggagggtcctgccgcgcccccagcacctacgggggcggcctgtctgtctcatcctcccgcttctcctctgggggagcctgcgggctggggggcggctatggcggtggcttcagcagcagcagcagcagctttggtagtggctttgggggaggatatggtggtggccttggtgctggcttgggtggtggctttggtggtggctttgctggtggtgatgggcttctggtgggcagtgagaaggtgaccatgcagaacctcaatgaccgcctggcctcctacctggacaaggtgcgtgctctggaggaggccaacgccgacctggaagtgaagatccgtgactggtaccagaggcagcggcctgctgagatcaaagactacagtccctacttcaagaccattgaggacctgaggaacaagattctcacagccacagtggacaatgccaatgtccttctgcagattgacaatgcccgtctggccgcggatgacttccgcaccaagtatgagacagagttgaacctgcgcatgagtgtggaagccgacatcaatggcctgcgcagggtgctggacgaactgaccctggccagagctgacctggagatgcagattgagagcctgaaggaggagctggcctacctgaagaagaaccacgaggaggagatgaatgccctgagaggccaggtgggtggagatgtcaatgtggagatggacgctgcacctggcgtggacctgagccgcattctgaacgagatgcgtgaccagtatgagaagatggcagagaagaaccgcaaggatgccgaggaatggttcttcaccaagacagaggagctgaaccgcgaggtggccaccaacagcgagctggtgcagagcggcaagagcgagatctcggagctccggcgcaccatgcagaacctggagattgagctgcagtcccagctcagcatgaaagcatccctggagaacagcctggaggagaccaaaggtcgctactgcatgcagctggcccagatccaggagatgattggcagcgtggaggagcagctggcccagctccgctgcgagatggagcagcagaaccaggagtacaagatcctgctggacgtgaagacgcggctggagcaggagatcgccacctaccgccgcctgctggagggcgaggacgcccacctctcctcctcccagttctcctctggatcgcagtcatccagagatgtgacctcctccagccgccaaatccgcaccaaggtcatggatgtgcacgatggcaaggtggtgtccacccacgagcaggtccttcgcaccaagaactgaggctgcccagccccgctcaggcctaggaggccccccgtgtggacacagatcccactggaagatcccctctcctgcccaagcacttcacagctggaccctgcttcaccctcaccccctcctggcaatcaatacagcttcattatctgagttgcatacccgagcaccttctcttcactcagccaactgctcgctcgctcacctccctcctctgcaccatgaccacctgcagccgccagttcacctcctccagctccatgaagggctcctgcggcatcgggggcggcatcgggggcggctccagccgcatctcctccgtcctggccggagggtcctgccgcgcccccagcacctacgggggcggcctgtctgtctcatcctcccgcttctcctctgggggagcctgcgggctggggggcggctatggcggtggcttcagcagcagcagcagcagctttggtagtggctttgggggaggatatggtggtggccttggtgctggcttgggtggtggctttggtggtggctttgctggtggtgatgggcttctggtgggcagtgagaaggtgaccatgcagaacctcaatgaccgcctggcctcctacctggacaaggtgcgtgctctggaggaggccaacgccgacctggaagtgaagatccgtgactggtaccagaggcagcggcctgctgagatcaaagactacagtccctacttcaagaccattgaggacctgaggaacaagattctcacagccacagtggacaatgccaatgtccttctgcagattgacaatgcccgtctggccgcggatgacttccgcaccaagtatgagacagagttgaacctgcgcatgagtgtggaagccgacatcaatggcctgcgcagggtgctggacgaactgaccctggccagagctgacctggagatgcagattgagagcctgaaggaggagctggcctacctgaagaagaaccacgaggaggagatgaatgccctgagaggccaggtgggtggagatgtcaatgtggagatggacgctgcacctggcgtggacctgagccgcattctgaacgagatgcgtgaccagtatgagaagatggcagagaagaaccgcaaggatgccgaggaatggttcttcaccaagacagaggagctgaaccgcgaggtggccaccaacagcgagctggtgcagagcggcaagagcgagatctcggagctccggcgcaccatgcagaacctggagattgagctgcagtcccagctcagcatgaaagcatccctggagaacagcctggaggagaccaaaggtcgctactgcatgcagctggcccagatccaggagatgattggcagcgtggaggagcagctggcccagctccgctgcgagatggagcagcagaaccaggagtacaagatcctgctggacgtgaagacgcggctggagcaggagatcgccacctaccgccgcctgctggagggcgaggacgcccacctctcctcctcccagttctcctctggatcgcagtcatccagagatgtgacctcctccagccgccaaatccgcaccaaggtcatggatgtgcacgatggcaaggtggtgtccacccacgagcaggtccttcgcaccaagaactgaggctgcccagccccgctcaggcctaggaggccccccgtgtggacacagatcccactggaagatcccctctcctgcccaagcacttcacagctggaccctgcttcaccctcaccccctcctggcaatcaatacagcttcattatctgagttgcatacccgagcaccttctcttcactcagccaactgctcgctcgctcacctccctcctctgcaccatgaccacctgcagccgccagttcacctcctccagctccatgaagggctcctgcggcatcgggggcggcatcgggggcggctccagccgcatctcctccgtcctggccggagggtcctgccgcgcccccagcacctacgggggcggcctgtctgtctcatcctcccgcttctcctctgggggagcctgcgggctggggggcggctatggcggtggcttcagcagcagcagcagcagctttggtagtggctttgggggaggatatggtggtggccttggtgctggcttgggtggtggctttggtggtggctttgctggtggtgatgggcttctggtgggcagtgagaaggtgaccatgcagaacctcaatgaccgcctggcctcctacctggacaaggtgcgtgctctggaggaggccaacgccgacctggaagtgaagatccgtgactggtaccagaggcagcggcctgctgagatcaaagactacagtccctacttcaagaccattgaggacctgaggaacaagattctcacagccacagtggacaatgccaatgtccttctgcagattgacaatgcccgtctggccgcggatgacttccgcaccaagtatgagacagagttgaacctgcgcatgagtgtggaagccgacatcaatggcctgcgcagggtgctggacgaactgaccctggccagagctgacctggagatgcagattgagagcctgaaggaggagctggcctacctgaagaagaaccacgaggaggagatgaatgccctgagaggccaggtgggtggagatgtcaatgtggagatggacgctgcacctggcgtggacctgagccgcattctgaacgagatgcgtgaccagtatgagaagatggcagagaagaaccgcaaggatgccgaggaatggttcttcaccaagacagaggagctgaaccgcgaggtggccaccaacagcgagctggtgcagagcggcaagagcgagatctcggagctccggcgcaccatgcagaacctggagattgagctgcagtcccagctcagcatgaaagcatccctggagaacagcctggaggagaccaaaggtcgctactgcatgcagctggcccagatccaggagatgattggcagcgtggaggagcagctggcccagctccgctgcgagatggagcagcagaaccaggagtacaagatcctgctggacgtgaagacgcggctggagcaggagatcgccacctaccgccgcctgctggagggcgaggacgcccacctctcctcctcccagttctcctctggatcgcagtcatccagagatgtgacctcctccagccgccaaatccgcaccaaggtcatggatgtgcacgatggcaaggtggtgtccacccacgagcaggtccttcgcaccaagaactgaggctgcccagccccgctcaggcctaggaggccccccgtgtggacacagatcccactggaagatcccctctcctgcccaagcacttcacagctggaccctgcttcaccctcaccccctcctggcaatcaatacagcttcattatctgagttgcatacccgagcaccttctcttcactcagccaactgctcgctcgctcacctccctcctctgcaccatgaccacctgcagccgccagttcacctcctccagctccatgaagggctcctgcggcatcgggggcggcatcgggggcggctccagccgcatctcctccgtcctggccggagggtcctgccgcgcccccagcacctacgggggcggcctgtctgtctcatcctcccgcttctcctctgggggagcctgcgggctggggggcggctatggcggtggcttcagcagcagcagcagcagctttggtagtggctttgggggaggatatggtggtggccttggtgctggcttgggtggtggctttggtggtggctttgctggtggtgatgggcttctggtgggcagtgagaaggtgaccatgcagaacctcaatgaccgcctggcctcctacctggacaaggtgcgtgctctggaggaggccaacgccgacctggaagtgaagatccgtgactggtaccagaggcagcggcctgctgagatcaaagactacagtccctacttcaagaccattgaggacctgaggaacaagattctcacagccacagtggacaatgccaatgtccttctgcagattgacaatgcccgtctggccgcggatgacttccgcaccaagtatgagacagagttgaacctgcgcatgagtgtggaagccgacatcaatggcctgcgcagggtgctggacgaactgaccctggccagagctgacctggagatgcagattgagagcctgaaggaggagctggcctacctgaagaagaaccacgaggaggagatgaatgccctgagaggccaggtgggtggagatgtcaatgtggagatggacgctgcacctggcgtggacctgagccgcattctgaacgagatgcgtgaccagtatgagaagatggcagagaagaaccgcaaggatgccgaggaatggttcttcaccaagacagaggagctgaaccgcgaggtggccaccaacagcgagctggtgcagagcggcaagagcgagatctcggagctccggcgcaccatgcagaacctggagattgagctgcagtcccagctcagcatgaaagcatccctggagaacagcctggaggagaccaaaggtcgctactgcatgcagctggcccagatccaggagatgattggcagcgtggaggagcagctggcccagctccgctgcgagatggagcagcagaaccaggagtacaagatcctgctggacgtgaagacgcggctggagcaggagatcgccacctaccgccgcctgctggagggcgaggacgcccacctctcctcctcccagttctcctctggatcgcagtcatccagagatgtgacctcctccagccgccaaatccgcaccaaggtcatggatgtgcacgatggcaaggtggtgtccacccacgagcaggtccttcgcaccaagaactgaggctgcccagccccgctcaggcctaggaggccccccgtgtggacacagatcccactggaagatcccctctcctgcccaagcacttcacagctggaccctgcttcaccctcaccccctcctggcaatcaatacagcttcattatctgagttgcatacccgagcaccttctcttcactcagccaactgctcgctcgctcacctccctcctctgcaccatgaccacctgcagccgccagttcacctcctccagctccatgaagggctcctgcggcatcgggggcggcatcgggggcggctccagccgcatctcctccgtcctggccggagggtcctgccgcgcccccagcacctacgggggcggcctgtctgtctcatcctcccgcttctcctctgggggagcctgcgggctggggggcggctatggcggtggcttcagcagcagcagcagcagctttggtagtggctttgggggaggatatggtggtggccttggtgctggcttgggtggtggctttggtggtggctttgctggtggtgatgggcttctggtgggcagtgagaaggtgaccatgcagaacctcaatgaccgcctggcctcctacctggacaaggtgcgtgctctggaggaggccaacgccgacctggaagtgaagatccgtgactggtaccagaggcagcggcctgctgagatcaaagactacagtccctacttcaagaccattgaggacctgaggaacaagattctcacagccacagtggacaatgccaatgtccttctgcagattgacaatgcccgtctggccgcggatgacttccgcaccaagtatgagacagagttgaacctgcgcatgagtgtggaagccgacatcaatggcctgcgcagggtgctggacgaactgaccctggccagagctgacctggagatgcagattgagagcctgaaggaggagctggcctacctgaagaagaaccacgaggaggagatgaatgccctgagaggccaggtgggtggagatgtcaatgtggagatggacgctgcacctggcgtggacctgagccgcattctgaacgagatgcgtgaccagtatgagaagatggcagagaagaaccgcaaggatgccgaggaatggttcttcaccaagacagaggagctgaaccgcgaggtggccaccaacagcgagctggtgcagagcggcaagagcgagatctcggagctccggcgcaccatgcagaacctggagattgagctgcagtcccagctcagcatgaaagcatccctggagaacagcctggaggagaccaaaggtcgctactgcatgcagctggcccagatccaggagatgattggcagcgtggaggagcagctggcccagctccgctgcgagatggagcagcagaaccaggagtacaagatcctgctggacgtgaagacgcggctggagcaggagatcgccacctaccgccgcctgctggagggcgaggacgcccacctctcctcctcccagttctcctctggatcgcagtcatccagagatgtgacctcctccagccgccaaatccgcaccaaggtcatggatgtgcacgatggcaaggtggtgtccacccacgagcaggtccttcgcaccaagaactgaggctgcccagccccgctcaggcctaggaggccccccgtgtggacacagatcccactggaagatcccctctcctgcccaagcacttcacagctggaccctgcttcaccctcaccccctcctggcaatcaatacagcttcattatctgagttgcatacccgagcaccttctcttcactcagccaactgctcgctcgctcacctccctcctctgcaccatgaccacctgcagccgccagttcacctcctccagctccatgaagggctcctgcggcatcgggggcggcatcgggggcggctccagccgcatctcctccgtcctggccggagggtcctgccgcgcccccagcacctacgggggcggcctgtctgtctcatcctcccgcttctcctctgggggagcctgcgggctggggggcggctatggcggtggcttcagcagcagcagcagcagctttggtagtggctttgggggaggatatggtggtggccttggtgctggcttgggtggtggctttggtggtggctttgctggtggtgatgggcttctggtgggcagtgagaaggtgaccatgcagaacctcaatgaccgcctggcctcctacctggacaaggtgcgtgctctggaggaggccaacgccgacctggaagtgaagatccgtgactggtaccagaggcagcggcctgctgagatcaaagactacagtccctacttcaagaccattgaggacctgaggaacaagattctcacagccacagtggacaatgccaatgtccttctgcagattgacaatgcccgtctggccgcggatgacttccgcaccaagtatgagacagagttgaacctgcgcatgagtgtggaagccgacatcaatggcctgcgcagggtgctggacgaactgaccctggccagagctgacctggagatgcagattgagagcctgaaggaggagctggcctacctgaagaagaaccacgaggaggagatgaatgccctgagaggccaggtgggtggagatgtcaatgtggagatggacgctgcacctggcgtggacctgagccgcattctgaacgagatgcgtgaccagtatgagaagatggcagagaagaaccgcaaggatgccgaggaatggttcttcaccaagacagaggagctgaaccgcgaggtggccaccaacagcgagctggtgcagagcggcaagagcgagatctcggagctccggcgcaccatgcagaacctggagattgagctgcagtcccagctcagcatgaaagcatccctggagaacagcctggaggagaccaaaggtcgctactgcatgcagctggcccagatccaggagatgattggcagcgtggaggagcagctggcccagctccgctgcgagatggagcagcagaaccaggagtacaagatcctgctggacgtgaagacgcggctggagcaggagatcgccacctaccgccgcctgctggagggcgaggacgcccacctctcctcctcccagttctcctctggatcgcagtcatccagagatgtgacctcctccagccgccaaatccgcaccaaggtcatggatgtgcacgatggcaaggtggtgtccacccacgagcaggtccttcgcaccaagaactgaggctgcccagccccgctcaggcctaggaggccccccgtgtggacacagatcccactggaagatcccctctcctgcccaagcacttcacagctggaccctgcttcaccctcaccccctcctggcaatcaatacagcttcattatctgagttgcatacccgagcaccttctcttcactcagccaactgctcgctcgctcacctccctcctctgcaccatgaccacctgcagccgccagttcacctcctccagctccatgaagggctcctgcggcatcgggggcggcatcgggggcggctccagccgcatctcctccgtcctggccggagggtcctgccgcgcccccagcacctacgggggcggcctgtctgtctcatcctcccgcttctcctctgggggagcctgcgggctggggggcggctatggcggtggcttcagcagcagcagcagcagctttggtagtggctttgggggaggatatggtggtggccttggtgctggcttgggtggtggctttggtggtggctttgctggtggtgatgggcttctggtgggcagtgagaaggtgaccatgcagaacctcaatgaccgcctggcctcctacctggacaaggtgcgtgctctggaggaggccaacgccgacctggaagtgaagatccgtgactggtaccagaggcagcggcctgctgagatcaaagactacagtccctacttcaagaccattgaggacctgaggaacaagattctcacagccacagtggacaatgccaatgtccttctgcagattgacaatgcccgtctggccgcggatgacttccgcaccaagtatgagacagagttgaacctgcgcatgagtgtggaagccgacatcaatggcctgcgcagggtgctggacgaactgaccctggccagagctgacctggagatgcagattgagagcctgaaggaggagctggcctacctgaagaagaaccacgaggaggagatgaatgccctgagaggccaggtgggtggagatgtcaatgtggagatggacgctgcacctggcgtggacctgagccgcattctgaacgagatgcgtgaccagtatgagaagatggcagagaagaaccgcaaggatgccgaggaatggttcttcaccaagacagaggagctgaaccgcgaggtggccaccaacagcgagctggtgcagagcggcaagagcgagatctcggagctccggcgcaccatgcagaacctggagattgagctgcagtcccagctcagcatgaaagcatccctggagaacagcctggaggagaccaaaggtcgctactgcatgcagctggcccagatccaggagatgattggcagcgtggaggagcagctggcccagctccgctgcgagatggagcagcagaaccaggagtacaagatcctgctggacgtgaagacgcggctggagcaggagatcgccacctaccgccgcctgctggagggcgaggacgcccacctctcctcctcccagttctcctctggatcgcagtcatccagagatgtgacctcctccagccgccaaatccgcaccaaggtcatggatgtgcacgatggcaaggtggtgtccacccacgagcaggtccttcgcaccaagaactgaggctgcccagccccgctcaggcctaggaggccccccgtgtggacacagatcccactggaagatcccctctcctgcccaagcacttcacagctggaccctgcttcaccctcaccccctcctggcaatcaatacagcttcattatctgagttgcat

SEQ ID NO: 657 - DNA, 15846 bp, Homo sapiens; identical to SEQ ID NO: 656
  misc_feature (147)..(147): second gene starts at position 147

SEQ ID NO: 658 - DNA, 32765 bp, Homo sapiens
  misc_feature (873)..(873): second gene starts at position 873
cttaaaaaaaaccagggctccagagaatcagaacagccaccatcaccgcagggagtcaagggaggagggagattagagaaggagccagggagggtggcagggaggccacgtgatccgagtcccctcacccctttccttcccacaggtccctggccaaagatttatttctcttgacaaccaagggcctccgtctggatttccaaggaagaatttcctctgaagcaccggaacttgctactaccagcaccatgccctaccaatatccagcactgaccccggagcagaagaaggagctgtctgacatcgctcaccgcatcgtggcacctggcaagggcatcctggctgcagatgagtccactgggagcattgccaagcggctgcagtccattggcaccgagaacaccgaggagaaccggcgcttctaccgccagctgctgctgacagctgacgaccgcgtgaacccctgcattgggggtgtcatcctcttccatgagacactctaccagaaggcggatgatgggcgtcccttcccccaagttatcaaatccaagggcggtgttgtgggcatcaaggtagacaagggcgtggtccccctggcagggacaaatggcgagactaccacccaagggttggatgggctgtctgagcgctgtgcccagtacaagaaggacggagctgacttcgccaagtggcgttgtgtgctgaagattggggaacacaccccctcagccctcgccatcatggaaaatgccaatgttctggcccgttatgccagtatctgccagcagaatggcattgtgcccatcgtggagcctgagatcctccctgatggggaccatgacttgaagcgctgccagtatgtgaccgagaaggtgctggctgctgtctacaaggctctgagtgaccaccacatctacctggaaggcaccttgctgaagcccaacatggtcaccccaggccatgcttgcactcagaagttttctcatgaggagattgccatggcgaccgtcacagcgctgcgccgcacagtgccccccgctgtcactgggatcaccttcctgtctggaggccagagtgaggaggaggcgtccatcaacctcaatgccattaacaagtgccccctgctgaagccctgggccctgaccttctcctacggccgagccctgcaggcctctgccctgaaggcctggggcgggaagaaggagaacctgaaggctgcgcaggaggagtatgtcaagcgagccctggccaacagccttgcctgtcaaggaaagtacactccgagcggtcaggctggggctgctgccagcgagtccctcttcgtctctaaccacgcctattaagcggaggtgttcccaggctgcccccaacactccaggccctgccccctcccactcttgaagaggaggccgcctcctcggggctccaggctggcttgcccgcgctctttcttccctcgtgacagtggtgtgtggtgtcgtctgtgaatgctaagtccatcaccctttccggcacactgccaaataaacagctatttaagggggacttaaaaaaaaccagggctccagagaatcagaacagccaccatcaccgcagggagtcaagggaggagggagattagagaaggagccagggagggtggcagggaggccacgtgatccgagtcccctcacccctttccttcccacaggtccctggccaaagatttatttctcttgacaaccaagggcctccgtctggatttccaaggaagaatttcctctgaagcaccggaacttgctactaccagcaccatgccctaccaatatccagcactgaccccggagcagaagaaggagctgtctgacatcgctcaccgcatcgtggcacctggcaagggcatcctggctgcagatgagtccactgggagcattgccaagcggctgcagtccattggcaccgagaacaccgaggagaaccggcgcttctaccgccagctgctgctgacagctgacgaccgcgtgaacccctgcattgggggtgtcatcctcttccatgagacactctaccagaaggcggatgatgggcgtcccttcccccaagttatcaaatccaagggcggtgttgtgggcatcaaggtagacaagggcgtggtccccctggcagggacaaatggcgagactaccacccaagggttggatgggctgtctgagcgctgtgcccagtacaagaaggacggagctgacttcgccaagtggcgttgtgtgctgaagattggggaacacaccccctcagccctcgccatcatggaaaatgccaatgttctggcccgttatgccagtatctgccagcagaatggcattgtgcccatcgtggagcctgagatcctccctgatggggaccatgacttgaagcgctgccagtatgtgaccgagaaggtgctggctgctgtctacaaggctctgagtgaccaccacatctacctggaaggcaccttgctgaagcccaacatggtcaccccaggccatgcttgcactcagaagttttctcatgaggagattgccatggcgaccgtcacagcgctgcgccgcacagtgccccccgctgtcactgggatcaccttcctgtctggaggccagagtgaggaggaggcgtccatcaacctcaatgccattaacaagtgccccctgctgaagccctgggccctgaccttctcctacggccgagccctgcaggcctctgccctgaaggcctggggcgggaagaaggagaacctgaaggctgcgcaggaggagtatgtcaagcgagccctggccaacagccttgcctgtcaaggaaagtacactccgagcggtcaggctggggctgctgccagcgagtccctcttcgtctctaaccacgcctattaagcggaggtgttcccaggctgcccccaacactccaggccctgccccctcccactcttgaagaggaggccgcctcctcggggctccaggctggcttgcccgcgctctttcttccctcgtgacagtggtgtgtggtgtcgtctgtgaatgctaagtccatcaccctttccggcacactgccaaataaacagctatttaagggggacttaaaaaaaaccagggctccagagaatcagaacagccaccatcaccgcagggagtcaagggaggagggagattagagaaggagccagggagggtggcagggaggccacgtgatccgagtcccctcacccctttccttcccacaggtccctggccaaagatttatttctcttgacaaccaagggcctccgtctggatttccaaggaagaatttcctctgaagcaccggaacttgctactaccagcaccatgccctaccaatatccagcactgaccccggagcagaagaaggagctgtctgacatcgctcaccgcatcgtggcacctggcaagggcatcctggctgcagatgagtccactgggagcattgccaagcggctgcagtccattggcaccgagaacaccgaggagaaccggcgcttctaccgccagctgctgctgacagctgacgaccgcgtgaacccctgcattgggggtgtcatcctcttccatgagacactctaccagaaggcggatgatgggcgtcccttcccccaagttatcaaatccaagggcggtgttgtgggcatcaaggtagacaagggcgtggtccccctggcagggacaaatggcgagactaccacccaagggttggatgggctgtctgagcgctgtgcccagtacaagaaggacggagctgacttcgccaagtggcgttgtgtgctgaagattggggaacacaccccctcagccctcgccatcatggaaaatgccaatgttctggcccgttatgccagtatctgccagcagaatggcattgtgcccatcgtggagcctgagatcctccctgatggggaccatgacttgaagcgctgccagtatgtgaccgagaaggtgctggctgctgtctacaaggctctgagtgaccaccacatctacctggaaggcaccttgctgaagcccaacatggtcaccccaggccatgcttgcactcagaagttttctcatgaggagattgccatggcgaccgtcacagcgctgcgccgcacagtgccccccgctgtcactgggatcaccttcctgtctggaggccagagtgaggaggaggcgtccatcaacctcaatgccattaacaagtgccccctgctgaagccctgggccctgaccttctcctacggccgagccctgcaggcctctgccctgaaggcctggggcgggaagaaggagaacctgaaggctgcgcaggaggagtatgtcaagcgagccctggccaacagccttgcctgtcaaggaaagtacactccgagcggtcaggctggggctgctgccagcgagtccctcttcgtctctaaccacgcctattaagcggaggtgttcccaggctgcccccaacactccaggccctgccccctcccactcttgaagaggaggccgcctcctcggggctccaggctggcttgcccgcgctctttcttccctcgtgacagtggtgtgtggtgtcgtctgtgaatgctaagtccatcaccctttccggcacactgccaaataaacagctatttaagggggacttaaaaaaaaccagggctccagagaatcagaacagccaccatcaccgcagggagtcaagggaggagggagattagagaaggagccagggagggtggcagggaggccacgtgatccgagtcccctcacccctttccttcccacaggtccctggccaaagatttatttctcttgacaaccaagggcctccgtctggatttccaaggaagaatttcctctgaagcaccggaacttgctatggtgccggtagtggatttggtttcggcggtggagctggtggtggctttgggctcggtggcggagctggctttggaggtggcttcggtggccctggctttcctgtctgccctcctggaggtatccaagaggtcactgtcaaccagagtctcctgactcccctcaacctgcaaatcgaccccagcatccagagggtgaggaccgaggagcgcgagcagatcaagaccctcaacaataagtttgcctccttcatcgacaaggtgcggttcctggagcagcagaacaaggttctggacaccaagtggaccctgctgcaggagcagggcaccaagactgtgaggcagaacctggagccgttgttcgagcagtacatcaacaacctcaggaggcagctggacagcatcgtgggggaacggggccgcctggactcagagctgagaaacatgcaggacctggtggaagacttcaagaacaagtatgaggatgaaatcaacaagcgtaccactgctgagaatgagtttgtgatgctgaagaaggatgtagatgctgcctacatgaacaaggtggagctggaggccaaggttgatgcactgatggatgagattaacttcatgaagatgttctttgatgcggagctgtcccagatgcagacgcatgtctctgacacctcagtggtcctctccatggacaacaaccgcaacctggacctggatagcatcatcgctgaggtcaaggcccagtatgaggagattgccaaccgcagccggacagaagccgagtcctggtatcagaccaagtatgaggagctgcagcagacagctggccggcatggcgatgacctccgcaacaccaagcatgagatctctgagatgaaccggatgatccagaggctgagagccgagattgacaatgtcaagaaacagtgcgccaatctgcagaacgccattgcggatgccgagcagcgtggggagctggccctcaaggatgccaggaacaagctggccgagctggaggaggccctgcagaaggccaagcaggacatggcccggctgctgcgtgagtaccaggagctcatgaacaccaagctggccctggacgtggagatcgccacttaccgcaagctgctggagggcgaggaatgcagactcagtggagaaggagttggaccagtcaacatctctgttgtcacaagcagtgtttcctctggatatggcagtggcagtggctatggcggtggcctcggtggaggtcttggcggcggcctcggtggaggtcttgccggaggtagcagtggaagctactactccagcagcagtgggggtgtcggcctaggtggtgggctcagtgtggggggctctggcttcagtgcaagcagtggccgagggctgggggtgggctttggcagtggcgggggtagcagctccagcgtcaaatttgtctccaccacctcctcctcccggaagagcttcaagagctaagaacctgctgcaagtcactgccttccaagtgcagcaacccagcccatggagattgcctcttctaggcagttgctcaagccatgttttatccttttctggagagtagtctagaccaagccaattgcagaaccacattctttggttcccaggagagccccattcccagcccctggtctcccgtgccgcagttctatattctgcttcaaatcagccttcaggtttcccacagcatggcccctgctgacacgagaacccaaagttttcccaaatctaaatcatcaaaacagaatccccaccccaatcccaaattttgttttggttctaactacctccagaatgtgttcaataaaatgcttttataatataatcgacagctctctcgcccagcccagttctggaagggataaaaagggggcatcaccgttcctgggtaacagagccaccttctgcgtcctgctgagctctgttctctccagcacctcccaacccactagtgcctggttctcttgctccaccaggaacaagccaccatgtctcgccagtcaagtgtgtccttccggagcgggggcagtcgtagcttcagcaccgcctctgccatcaccccgtctgtctcccgcaccagcttcacctccgtgtcccggtccgggggtggcggtggtggtggcttcggcagggtcagccttgcgggtgcttgtggagtgggtggctatggcagccggagcctctacaacctggggggctccaagaggatatccatcagcactagtggtggcagcttcaggaaccggtttggtgctggtgctggaggcggctatggctttggaggtggtgccggtagtggatttggtttcggcggtggagctggtggtggctttgggctcggtggcggagctggctttggaggtggcttcggtggccctggctttcctgtctgccctcctggaggtatccaagaggtcactgtcaaccagagtctcctgactcccctcaacctgcaaatcgaccccagcatccagagggtgaggaccgaggagcgcgagcagatcaagaccctcaacaataagtttgcctccttcatcgacaaggtgcggttcctggagcagcagaacaaggttctggacaccaagtggaccctgctgcaggagcagggcaccaagactgtgaggcagaacctggagccgttgttcgagcagtacatcaacaacctcaggaggcagctggacagcatcgtgggggaacggggccgcctggactcagagctgagaaacatgcaggacctggtggaagacttcaagaacaagtatgaggatgaaatcaacaagcgtaccactgctgagaatgagtttgtgatgctgaagaaggatgtagatgctgcctacatgaacaaggtggagctggaggccaaggttgatgcactgatggatgagattaacttcatgaagatgttctttgatgcggagctgtcccagatgcagacgcatgtctctgacacctcagtggtcctctccatggacaacaaccgcaacctggacctggatagcatcatcgctgaggtcaaggcccagtatgaggagattgccaaccgcagccggacagaagccgagtcctggtatcagaccaagtatgaggagctgcagcagacagctggccggcatggcgatgacctccgcaacaccaagcatgagatctctgagatgaaccggatgatccagaggctgagagccgagattgacaatgtcaagaaacagtgcgccaatctgcagaacgccattgcggatgccgagcagcgtggggagctggccctcaaggatgccaggaacaagctggccgagctggaggaggccctgcagaaggccaagcaggacatggcccggctgctgcgtgagtaccaggagctcatgaacaccaagctggccctggacgtggagatcgccacttaccgcaagctgctggagggcgaggaatgcagactcagtggagaaggagttggaccagtcaacatctctgttgtcacaagcagtgtttcctctggatatggcagtggcagtggctatggcggtggcctcggtggaggtcttggcggcggcctcggtggaggtcttgccggaggtagcagtggaagctactactccagcagcagtgggggtgtcggcctaggtggtgggctcagtgtggggggctctggcttcagtgcaagcagtggccgagggctgggggtgggctttggcagtggcgggggtagcagctccagcgtcaaatttgtctccaccacctcctcctcccggaagagcttcaagagctaagaacctgctgcaagtcactgccttccaagtgcagcaacccagcccatggagattgcctcttctaggcagttgctcaagccatgttttatccttttctggagagtagtctagaccaagccaattgcagaaccacattctttggttcccaggagagccccattcccagcccctggtctcccgtgccgcagttctatattctgcttcaaatcagccttcaggtttcccacagcatggcccctgctgacacgagaacccaaagttttcccaaatctaaatcatcaaaacagaatccccaccccaatcccaaattttgttttggttctaactacctccagaatgtgttcaataaaatgcttttataatataatcgacagctctctcgcccagcccagttctggaagggataaaaagggggcatcaccgttcctgggtaacagagccaccttctgcgtcctgctgagctctgttctctccagcacctcccaacccactagtgcctggttctcttgctccaccaggaacaagccaccatgtctcgccagtcaagtgtgtccttccggagcgggggcagtcgtagcttcagcaccgcctctgccatcaccccgtctgtctcccgcaccagcttcacctccgtgtcccggtccgggggtggcggtggtggtggcttcggcagggtcagccttgcgggtgcttgtggagtgggtggctatggcagccggagcctctacaacctggggggctccaagaggatatccatcagcactagtggtggcagcttcaggaaccggtttggtgctggtgctggaggcggctatggctttggaggtggtgccggtagtggatttggtttcggcggtggagctggtggtggctttgggctcggtggcggagctggctttggaggtggcttcggtggccctggctttcctgtctgccctcctggaggtatccaagaggtcactgtcaaccagagtctcctgactcccctcaacctgcaaatcgaccccagcatccagagggtgaggaccgaggagcgcgagcagatcaagaccctcaacaataagtttgcctccttcatcgacaaggtgcggttcctggagcagcagaacaaggttctggacaccaagtggaccctgctgcaggagcagggcaccaagactgtgaggcagaacctggagccgttgttcgagcagtacatcaacaacctcaggaggcagctggacagcatcgtgggggaacggggccgcctggactcagagctgagaaacatgcaggacctggtggaagacttcaagaacaagtatgaggatgaaatcaacaagcgtaccactgctgagaatgagtttgtgatgctgaagaaggatgtagatgctgcctacatgaacaaggtggagctggaggccaaggttgatgcactgatggatgagattaacttcatgaagatgttctttgatgcggagctgtcccagatgcagacgcatgtctctgacacctcagtggtcctctccatggacaacaaccgcaacctggacctggatagcatcatcgctgaggtcaaggcccagtatgaggagattgccaaccgcagccggacagaagccgagtcctggtatcagaccaagtatgaggagctgcagcagacagctggccggcatggcgatgacctccgcaacaccaagcatgagatctctgagatgaaccggatgatccagaggctgagagccgagattgacaatgtcaagaaacagtgcgccaatctgcagaacgccattgcggatgccgagcagcgtggggagctggccctcaaggatgccaggaacaagctggccgagctggaggaggccctgcagaaggccaagcaggacatggcccggctgctgcgtgagtaccaggagctcatgaacaccaagctggccctggacgtggagatcgccacttaccgcaagctgctggagggcgaggaatgcagactcagtggagaaggagttggaccagtcaacatctctgttgtcacaagcagtgtttcctctggatatggcagtggcagtggctatggcggtggcctcggtggaggtcttggcggcggcctcggtggaggtcttgccggaggtagcagtggaagctactactccagcagcagtgggggtgtcggcctaggtggtgggctcagtgtggggggctctggcttcagtgcaagcagtggccgagggctgggggtgggctttggcagtggcgggggtagcagctccagcgtcaaatttgtctccaccacctcctcctcccggaagagcttcaagagctaagaacctgctgcaagtcactgccttccaagtgcagcaacccagcccatggagattgcctcttctaggcagttgctcaagccatgttttatccttttctggagagtagtctagaccaagccaattgcagaaccacattctttggttcccaggagagccccattcccagcccctggtctcccgtgccgcagttctatattctgcttcaaatcagccttcaggtttcccacagcatggcccctgctgacacgagaacccaaagttttcccaaatctaaatcatcaaaacagaatccccaccccaatcccaaattttgttttggttctaactacctccagaatgtgttcaataaaatgcttttataatataatcgacagctctctcgcccagcccagttctggaagggataaaaagggggcatcaccgttcctgggtaacagagccaccttctgcgtcctgctgagctctgttctctccagcacctcccaacccactagtgcctggttctcttgctccaccaggaacaagccaccatgtctcgccagtcaagtgtgtccttccggagcgggggcagtcgtagcttcagcaccgcctctgccatcaccccgtctgtctcccgcaccagcttcacctccgtgtcccggtccgggggtggcggtggtggtggcttcggcagggtcagccttgcgggtgcttgtggagtgggtggctatggcagccggagcctctacaacctggggggctccaagaggatatccatcagcactagtggtggcagcttcaggaaccggtttggtgctggtgctggaggcggctatggctttggaggtggtgccggtagtggatttggtttcggcggtggagctggtggtggctttgggctcggtggcggagctggctttggaggtggcttcggtggccctggctttcctgtctgccctcctggaggtatccaagaggtcactgtcaaccagagtctcctgactcccctcaacctgcaaatcgaccccagcatccagagggtgaggaccgaggagcgcgagcagatcaagaccctcaacaataagtttgcctccttcatcgacaaggtgcggttcctggagcagcagaacaaggttctggacaccaagtggaccctgctgcaggagcagggcaccaagactgtgaggcagaacctggagccgttgttcgagcagtacatcaacaacctcaggaggcagctggacagcatcgtgggggaacggggccgcctggactcagagctgagaaacatgcaggacctggtggaagacttcaagaacaagtatgaggatgaaatcaacaagcgtaccactgctgagaatgagtttgtgatgctgaagaaggatgtagatgctgcctacatgaacaaggtggagctggaggccaaggttgatgcactgatggatgagattaacttcatgaagatgttctttgatgcggagctgtcccagatgcagacgcatgtctctgacacctcagtggtcctctccatggacaacaaccgcaacctggacctggatagcatcatcgctgaggtcaaggcccagtatgaggagattgccaaccgcagccggacagaagccgagtcctggtatcagaccaagtatgaggagctgcagcagacagctggccggcatggcgatgacctccgcaacaccaagcatgagatctctgagatgaaccggatgatccagaggctgagagccgagattgacaatgtcaagaaacagtgcgccaatctgcagaacgccattgcggatgccgagcagcgtggggagctggccctcaaggatgccaggaacaagctggccgagctggaggaggccctgcagaaggccaagcaggacatggcccggctgctgcgtgagtaccaggagctcatgaacaccaagctggccctggacgtggagatcgccacttaccgcaagctgctggagggcgaggaatgcagactcagtggagaaggagttggaccagtcaacatctctgttgtcacaagcagtgtttcctctggatatggcagtggcagtggctatggcggtggcctcggtggaggtcttggcggcggcctcggtggaggtcttgccggaggtagcagtggaagctactactccagcagcagtgggggtgtcggcctaggtggtgggctcagtgtggggggctctggcttcagtgcaagcagtggccgagggctgggggtgggctttggcagtggcgggggtagcagctccagcgtcaaatttgtctccaccacctcctcctcccggaagagcttcaagagctaagaacctgctgcaagtcactgccttccaagtgcagcaacccagcccatggagattgcctcttctaggcagttgctcaagccatgttttatccttttctggagagtagtctagaccaagccaattgcagaaccacattctttggttcccaggagagccccattcccagcccctggtctcccgtgccgcagttctatattctgcttcaaatcagccttcaggtttcccacagcatggcccctgctgacacgagaacccaaagttttcccaaatctaaatcatcaaaacagaatccccaccccaatcccaaattttgttttggttctaactacctccagaatgtgttcaataaaatgcttttataatataatcgacagctctctcgcccagcccagttctggaagggataaaaagggggcatcaccgttcctgggtaacagagccaccttctgcgtcctgctgagctctgttctctccagcacctcccaacccactagtgcctggttctcttgctccaccaggaacaagccaccatgtctcgccagtcaagtgtgtccttccggagcgggggcagtcgtagcttcagcaccgcctctgccatcaccccgtctgtctcccgcaccagcttcacctccgtgtcccggtccgggggtggcggtggtggtggcttcggcagggtcagccttgcgggtgcttgtggagtgggtggctatggcagccggagcctctacaacctggggggctccaagaggatatccatcagcactagtggtggcagcttcaggaaccggtttggtgctggtgctggaggcggctatggctttggaggtggtgccggtagtggatttggtttcggcggtggagctggtggtggctttgggctcggtggcggagctggctttggaggtggcttcggtggccctggctttcctgtctgccctcctggaggtatccaagaggtcactgtcaaccagagtctcctgactcccctcaacctgcaaatcgaccccagcatccagagggtgaggaccgaggagcgcgagcagatcaagaccctcaacaataagtttgcctccttcatcgacaaggtgcggttcctggagcagcagaacaaggttctggacaccaagtggaccctgctgcaggagcagggcaccaagactgtgaggcagaacctggagccgttgttcgagcagtacatcaacaacctcaggaggcagctggacagcatcgtgggggaacggggccgcctggactcagagctgagaaacatgcaggacctggtggaagacttcaagaacaagtatgaggatgaaatcaacaagcgtaccactgctgagaatgagtttgtgatgctgaagaaggatgtagatgctgcctacatgaacaaggtggagctggaggccaaggttgatgcactgatggatgagattaacttcatgaagatgttctttgatgcggagctgtcccagatgcagacgcatgtctctgacacctcagtggtcctctccatggacaacaaccgcaacctggacctggatagcatcatcgctgaggtcaaggcccagtatgaggagattgccaaccgcagccggacagaagccgagtcctggtatcagaccaagtatgaggagctgcagcagacagctggccggcatggcgatgacctccgcaacaccaagcatgagatctctgagatgaaccggatgatccagaggctgagagccgagattgacaatgtcaagaaacagtgcgccaatctgcagaacgccattgcggatgccgagcagcgtggggagctggccctcaaggatgccaggaacaagctggccgagctggaggaggccctgcagaaggccaagcaggacatggcccggctgctgcgtgagtaccaggagctcatgaacaccaagctggccctggacgtggagatcgccacttaccgcaagctgctggagggcgaggaatgcagactcagtggagaaggagttggaccagtcaacatctctgttgtcacaagcagtgtttcctctggatatggcagtggcagtggctatggcggtggcctcggtggaggtcttggcggcggcctcggtggaggtcttgccggaggtagcagtggaagctactactccagcagcagtgggggtgtcggcctaggtggtgggctcagtgtggggggctctggcttcagtgcaagcagtggccgagggctgggggtgggctttggcagtggcgggggtagcagctccagcgtcaaatttgtctccaccacctcctcctcccggaagagcttcaagagctaagaacctgctgcaagtcactgccttccaagtgcagcaacccagcccatggagattgcctcttctaggcagttgctcaagccatgttttatccttttctggagagtagtctagaccaagccaattgcagaaccacattctttggttcccaggagagccccattcccagcccctggtctcccgtgccgcagttctatattctgcttcaaatcagccttcaggtttcccacagcatggcccctgctgacacgagaacccaaagttttcccaaatctaaatcatcaaaacagaatccccaccccaatcccaaattttgttttggttctaactacctccagaatgtgttcaataaaatgcttttataatataatcgacagctctctcgcccagcccagttctggaagggataaaaagggggcatcaccgttcctgggtaacagagccaccttctgcgtcctgctgagctctgttctctccagcacctcccaacccactagtgcctggttctcttgctccaccaggaacaagccaccatgtctcgccagtcaagtgtgtccttccggagcgggggcagtcgtagcttcagcaccgcctctgccatcaccccgtctgtctcccgcaccagcttcacctccgtgtcccggtccgggggtggcggtggtggtggcttcggcagggtcagccttgcgggtgcttgtggagtgggtggctatggcagccggagcctctacaacctggggggctccaagaggatatccatcagcactagtggtggcagcttcaggaaccggtttggtgctggtgctggaggcggctatggctttggaggtggtgccggtagtggatttggtttcggcggtggagctggtggtggctttgggctcggtggcggagctggctttggaggtggcttcggtggccctggctttcctgtctgccctcctggaggtatccaagaggtcactgtcaaccagagtctcctgactcccctcaacctgcaaatcgaccccagcatccagagggtgaggaccgaggagcgcgagcagatcaagaccctcaacaataagtttgcctccttcatcgacaaggtgcggttcctggagcagcagaacaaggttctggacaccaagtggaccctgctgcaggagcagggcaccaagactgtgaggcagaacctggagccgttgttcgagcagtacatcaacaacctcaggaggcagctggacagcatcgtgggggaacggggccgcctggactcagagctgagaaacatgcaggacctggtggaagacttcaagaacaagtatgaggatgaaatcaacaagcgtaccactgctgagaatgagtttgtgatgctgaagaaggatgtagatgctgcctacatgaacaaggtggagctggaggccaaggttgatgcactgatggatgagattaacttcatgaagatgttctttgatgcggagctgtcccagatgcagacgcatgtctctgacacctcagtggtcctctccatggacaacaaccgcaacctggacctggatagcatcatcgctgaggtcaaggcccagtatgaggagattgccaaccgcagccggacagaagccgagtcctggtatcagaccaagtatgaggagctgcagcagacagctggccggcatggcgatgacctccgcaacaccaagcatgagatctctgagatgaaccggatgatccagaggctgagagccgagattgacaatgtcaagaaacagtgcgccaatctgcagaacgccattgcggatgccgagcagcgtggggagctggccctcaaggatgccaggaacaagctggccgagctggaggaggccctgcagaaggccaagcaggacatggcccggctgctgcgtgagtaccaggagctcatgaacaccaagctggccctggacgtggagatcgccacttaccgcaagctgctggagggcgaggaatgcagactcagtggagaaggagttggaccagtcaacatctctgttgtcacaagcagtgtttcctctggatatggcagtggcagtggctatggcggtggcctcggtggaggtcttggcggcggcctcggtggaggtcttgccggaggtagcagtggaagctactactccagcagcagtgggggtgtcggcctaggtggtgggctcagtgtggggggctctggcttcagtgcaagcagtggccgagggctgggggtgggctttggcagtggcgggggtagcagctccagcgtcaaatttgtctccaccacctcctcctcccggaagagcttcaagagctaagaacctgctgcaagtcactgccttccaagtgcagcaacccagcccatggagattgcctcttctaggcagttgctcaagccatgttttatccttttctggagagtagtctagaccaagccaattgcagaaccacattctttggttcccaggagagccccattcccagcccctggtctcccgtgccgcagttctatattctgcttcaaatcagccttcaggtttcccacagcatggcccctgctgacacgagaacccaaagttttcccaaatctaaatcatcaaaacagaatccccaccccaatcccaaattttgttttggttctaactacctccagaatgtgttcaataaaatgcttttataatataatcgacagctctctcgcccagcccagttctggaagggataaaaagggggcatcaccgttcctgggtaacagagccaccttctgcgtcctgctgagctctgttctctccagcacctcccaacccactagtgcctggttctcttgctccaccaggaacaagccaccatgtctcgccagtcaagtgtgtccttccggagcgggggcagtcgtagcttcagcaccgcctctgccatcaccccgtctgtctcccgcaccagcttcacctccgtgtcccggtccgggggtggcggtggtggtggcttcggcagggtcagccttgcgggtgcttgtggagtgggtggctatggcagccggagcctctacaacctggggggctccaagaggatatccatcagcactagtggtggcagcttcaggaaccggtttggtgctggtgctggaggcggctatggctttggaggtggtgccggtagtggatttggtttcggcggtggagctggtggtggctttgggctcggtggcggagctggctttggaggtggcttcggtggccctggctttcctgtctgccctcctggaggtatccaagaggtcactgtcaaccagagtctcctgactcccctcaacctgcaaatcgaccccagcatccagagggtgaggaccgaggagcgcgagcagatcaagaccctcaacaataagtttgcctccttcatcgacaaggtgcggttcctggagcagcagaacaaggttctggacaccaagtggaccctgctgcaggagcagggcaccaagactgtgaggcagaacctggagccgttgttcgagcagtacatcaacaacctcaggaggcagctggacagcatcgtgggggaacggggccgcctggactcagagctgagaaacatgcaggacctggtggaagacttcaagaacaagtatgaggatgaaatcaacaagcgtaccactgctgagaatgagtttgtgatgctgaagaaggatgtagatgctgcctacatgaacaaggtggagctggaggccaaggttgatgcactgatggatgagattaacttcatgaagatgttctttgatgcggagctgtcccagatgcagacgcatgtctctgacacctcagtggtcctctccatggacaacaaccgcaacctggacctggatagcatcatcgctgaggtcaaggcccagtatgaggagattgccaaccgcagccggacagaagccgagtcctggtatcagaccaagtatgaggagctgcagcagacagctggccggcatggcgatgacctccgcaacaccaagcatgagatctctgagatgaaccggatgatccagaggctgagagccgagattgacaatgtcaagaaacagtgcgccaatctgcagaacgccattgcggatgccgagcagcgtggggagctggccctcaaggatgccaggaacaagctggccgagctggaggaggccctgcagaaggccaagcaggacatggcccggctgctgcgtgagtaccaggagctcatgaacaccaagctggccctggacgtggagatcgccacttaccgcaagctgctggagggcgaggaatgcagactcagtggagaaggagttggaccagtcaacatctctgttgtcacaagcagtgtttcctctggatatggcagtggcagtggctatggcggtggcctcggtggaggtcttggcggcggcctcggtggaggtcttgccggaggtagcagtggaagctactactccagcagcagtgggggtgtcggcctaggtggtgggctcagtgtggggggctctggcttcagtgcaagcagtggccgagggctgggggtgggctttggcagtggcgggggtagcagctccagcgtcaaatttgtctccaccacctcctcctcccggaagagcttcaagagctaagaacctgctgcaagtcactgccttccaagtgcagcaacccagcccatggagattgcctcttctaggcagttgctcaagccatgttttatccttttctggagagtagtctagaccaagccaattgcagaaccacattctttggttcccaggagagccccattcccagcccctggtctcccgtgccgcagttctatattctgcttcaaatcagccttcaggtttcccacagcatggcccctgctgacacgagaacccaaagttttcccaaatctaaatcatcaaaacagaatccccaccccaatcccaaattttgttttggttctaactacctccagaatgtgttcaataaaatgcttttataatataatcgacagctctctcgcccagcccagttctggaagggataaaaagggggcatcaccgttcctgggtaacagagccaccttctgcgtcctgctgagctctgttctctccagcacctcccaacccactagtgcctggttctcttgctccaccaggaacaagccaccatgtctcgccagtcaagtgtgtccttccggagcgggggcagtcgtagcttcagcaccgcctctgccatcaccccgtctgtctcccgcaccagcttcacctccgtgtcccggtccgggggtggcggtggtggtggcttcggcagggtcagccttgcgggtgcttgtggagtgggtggctatggcagccggagcctctacaacctggggggctccaagaggatatccatcagcactagtggtggcagcttcaggaaccggtttggtgctggtgctggaggcggctatggctttggaggtggtgccggtagtggatttggtttcggcggtggagctggtggtggctttgggctcggtggcggagctggctttggaggtggcttcggtggccctggctttcctgtctgccctcctggaggtatccaagaggtcactgtcaaccagagtctcctgactcccctcaacctgcaaatcgaccccagcatccagagggtgaggaccgaggagcgcgagcagatcaagaccctcaacaataagtttgcctccttcatcgacaaggtgcggttcctggagcagcagaacaaggttctggacaccaagtggaccctgctgcaggagcagggcaccaagactgtgaggcagaacctggagccgttgttcgagcagtacatcaacaacctcaggaggcagctggacagcatcgtgggggaacggggccgcctggactcagagctgagaaacatgcaggacctggtggaagacttcaagaacaagtatgaggatgaaatcaacaagcgtaccactgctgagaatgagtttgtgatgctgaagaaggatgtagatgctgcctacatgaacaaggtggagctggaggccaaggttgatgcactgatggatgagattaacttcatgaagatgttctttgatgcggagctgtcccagatgcagacgcatgtctctgacacctcagtggtcctctccatggacaacaaccgcaacctggacctggatagcatcatcgctgaggtcaaggcccagtatgaggagattgccaaccgcagccggacagaagccgagtcctggtatcagaccaagtatgaggagctgcagcagacagctggccggcatggcgatgacctccgcaacaccaagcatgagatctctgagatgaaccggatgatccagaggctgagagccgagattgacaatgtcaagaaacagtgcgccaatctgcagaacgccattgcggatgccgagcagcgtggggagctggccctcaaggatgccaggaacaagctggccgagctggaggaggccctgcagaaggccaagcaggacatggcccggctgctgcgtgagtaccaggagctcatgaacaccaagctggccctggacgtggagatcgccacttaccgcaagctgctggagggcgaggaatgcagactcagtggagaaggagttggaccagtcaacatctctgttgtcacaagcagtgtttcctctggatatggcagtggcagtggctatggcggtggcctcggtggaggtcttggcggcggcctcggtggaggtcttgccggaggtagcagtggaagctactactccagcagcagtgggggtgtcggcctaggtggtgggctcagtgtggggggctctggcttcagtgcaagcagtggccgagggctgggggtgggctttggcagtggcgggggtagcagctccagcgtcaaatttgtctccaccacctcctcctcccggaagagcttcaagagctaagaacctgctgcaagtcactgccttccaagtgcagcaacccagcccatggagattgcctcttctaggcagttgctcaagccatgttttatccttttctggagagtagtctagaccaagccaattgcagaaccacattctttggttcccaggagagccccattcccagcccctggtctcccgtgccgcagttctatattctgcttcaaatcagccttcaggtttcccacagcatggcccctgctgacacgagaacccaaagttttcccaaatctaaatcatcaaaacagaatccccaccccaatcccaaattttgttttggttctaactacctccagaatgtgttcaataaaatgcttttataatataatcgacagctctctcgcccagcccagttctggaagggataaaaagggggcatcaccgttcctgggtaacagagccaccttctgcgtcctgctgagctctgttctctccagcacctcccaacccactagtgcctggttctcttgctccaccaggaacaagccaccatgtctcgccagtcaagtgtgtccttccggagcgggggcagtcgtagcttcagcaccgcctctgccatcaccccgtctgtctcccgcaccagcttcacctccgtgtcccggtccgggggtggcggtggtggtggcttcggcagggtcagccttgcgggtgcttgtggagtgggtggctatggcagccggagcctctacaacctggggggctccaagaggatatccatcagcactagtggtggcagcttcaggaaccggtttggtgctggtgctggaggcggctatggctttggaggtggtgccggtagtggatttggtttcggcggtggagctggtggtggctttgggctcggtggcggagctggctttggaggtggcttcggtggccctggctttcctgtctgccctcctggaggtatccaagaggtcactgtcaaccagagtctcctgactcccctcaacctgcaaatcgaccccagcatccagagggtgaggaccgaggagcgcgagcagatcaagaccctcaacaataagtttgcctccttcatcgacaaggtgcggttcctggagcagcagaacaaggttctggacaccaagtggaccctgctgcaggagcagggcaccaagactgtgaggcagaacctggagccgttgttcgagcagtacatcaacaacctcaggaggcagctggacagcatcgtgggggaacggggccgcctggactcagagctgagaaacatgcaggacctggtggaagacttcaagaacaagtatgaggatgaaatcaacaagcgtaccactgctgagaatgagtttgtgatgctgaagaaggatgtagatgctgcctacatgaacaaggtggagctggaggccaaggttgatgcactgatggatgagattaacttcatgaagatgttctttgatgcggagctgtcccagatgcagacgcatgtctctgacacctcagtggtcctctccatggacaacaaccgcaacctggacctggatagcatcatcgctgaggtcaaggcccagtatgaggagattgccaaccgcagccggacagaagccgagtcctggtatcagaccaagtatgaggagctgcagcagacagctggccggcatggcgatgacctccgcaacaccaagcatgagatctctgagatgaaccggatgatccagaggctgagagccgagattgacaatgtcaagaaacagtgcgccaatctgcagaacgccattgcggatgccgagcagcgtggggagctggccctcaaggatgccaggaacaagctggccgagctggaggaggccctgcagaaggccaagcaggacatggcccggctgctgcgtgagtaccaggagctcatgaacaccaagctggccctggacgtggagatcgccacttaccgcaagctgctggagggcgaggaatgcagactcagtggagaaggagttggaccagtcaacatctctgttgtcacaagcagtgtttcctctggatatggcagtggcagtggctatggcggtggcctcggtggaggtcttggcggcggcctcggtggaggtcttgccggaggtagcagtggaagctactactccagcagcagtgggggtgtcggcctaggtggtgggctcagtgtggggggctctggcttcagtgcaagcagtggccgagggctgggggtgggctttggcagtggcgggggtagcagctccagcgtcaaatttgtctccaccacctcctcctcccggaagagcttcaagagctaagaacctgctgcaagtcactgccttccaagtgcagcaacccagcccatggagattgcctcttctaggcagttgctcaagccatgttttatccttttctggagagtagtctagaccaagccaattgcagaaccacattctttggttcccaggagagccccattcccagcccctggtctcccgtgccgcagttctatattctgcttcaaatcagccttcaggtttcccacagcatggcccctgctgacacgagaacccaaagttttcccaaatctaaatcatcaaaacagaatccccaccccaatcccaaattttgttttggttctaactacctccagaatgtgttcaataaaatgcttttataatataatcgacagctctctcgcccagcccagttctggaagggataaaaagggggcatcaccgttcctgggtaacagagccaccttctgcgtcctgctgagctctgttctctccagcacctcccaacccactagtgcctggttctcttgctccaccaggaacaagccaccatgtctcgccagtcaagtgtgtccttccggagcgggggcagtcgtagcttcagcaccgcctctgccatcaccccgtctgtctcccgcaccagcttcacctccgtgtcccggtccgggggtggcggtggtggtggcttcggcagggtcagccttgcgggtgcttgtggagtgggtggctatggcagccggagcctctacaacctggggggctccaagaggatatccatcagcactagtggtggcagcttcaggaaccggtttggtgctggtgctggaggcggctatggctttggaggtggtgccggtagtggatttggtttcggcggtggagctggtggtggctttgggctcggtggcggagctggctttggaggtggcttcggtggccctggctttcctgtctgccctcctggaggtatccaagaggtcactgtcaaccagagtctcctgactcccctcaacctgcaaatcgaccccagcatccagagggtgaggaccgaggagcgcgagcagatcaagaccctcaacaataagtttgcctccttcatcgacaaggtgcggttcctggagcagcagaacaaggttctggacaccaagtggaccctgctgcaggagcagggcaccaagactgtgaggcagaacctggagccgttgttcgagcagtacatcaacaacctcaggaggcagctggacagcatcgtgggggaacggggccgcctggactcagagctgagaaacatgcaggacctggtggaagacttcaagaacaagtatgaggatgaaatcaacaagcgtaccactgctgagaatgagtttgtgatgctgaagaaggatgtagatgctgcctacatgaacaaggtggagctggaggccaaggttgatgcactgatggatgagattaacttcatgaagatgttctttgatgcggagctgtcccagatgcagacgcatgtctctgacacctcagtggtcctctccatggacaacaaccgcaacctggacctggatagcatcatcgctgaggtcaaggcccagtatgaggagattgccaaccgcagccggacagaagccgagtcctggtatcagaccaagtatgaggagctgcagcagacagctggccggcatggcgatgacctccgcaacaccaagcatgagatctctgagatgaaccggatgatccagaggctgagagccgagattgacaatgtcaagaaacagtgcgccaatctgcagaacgccattgcggatgccgagcagcgtggggagctggccctcaaggatgccaggaacaagctggccgagctggaggaggccctgcagaaggccaagcaggacatggcccggctgctgcgtgagtaccaggagctcatgaacaccaagctggccctggacgtggagatcgccacttaccgcaagctgctggagggcgaggaatgcagactcagtggagaaggagttggaccagtcaacatctctgttgtcacaagcagtgtttcctctggatatggcagtggcagtggctatggcggtggcctcggtggaggtcttggcggcggcctcggtggaggtcttgccggaggtagcagtggaagctactactccagcagcagtgggggtgtcggcctaggtggtgggctcagtgtggggggctctggcttcagtgcaagcagtggccgagggctgggggtgggctttggcagtggcgggggtagcagctccagcgtcaaatttgtctccaccacctcctcctcccggaagagcttcaagagctaagaacctgctgcaagtcactgccttccaagtgcagcaacccagcccatggagattgcctcttctaggcagttgctcaagccatgttttatccttttctggagagtagtctagaccaagccaattgcagaaccacattctttggttcccaggagagccccattcccagcccctggtctcccgtgccgcagttctatattctgcttcaaatcagccttcaggtttcccacagcatggcccctgctgacacgagaacccaaagttttcccaaatctaaatcatcaaaacagaatccccaccccaatcccaaattttgttttggttctaactacctccagaatgtgttcaataaaatgcttttataatataatcgacagctctctcgcccagcccagttctggaagggataaaaagggggcatcaccgttcctgggtaacagagccaccttctgcgtcctgctgagctctgttctctccagcacctcccaacccactagtgcctggttctcttgctccaccaggaacaagccaccatgtctcgccagtcaagtgtgtccttccggagcgggggcagtcgtagcttcagcaccgcctctgccatcaccccgtctgtctcccgcaccagcttcacctccgtgtcccggtccgggggtggcggtggtggtggcttcggcagggtcagccttgcgggtgcttgtggagtgggtggctatggcagccggagcctctacaacctggggggctccaagaggatatccatcagcactagtggtggcagcttcaggaaccggtttggtgctggtgctggaggcggctatggctttggaggtggtgccggtagtggatttggtttcggcggtggagctggtggtggctttgggctcggtggcggagctggctttggaggtggcttcggtggccctggctttcctgtctgccctcctggaggtatccaagaggtcactgtcaaccagagtctcctgactcccctcaacctgcaaatcgaccccagcatccagagggtgaggaccgaggagcgcgagcagatcaagaccctcaacaataagtttgcctccttcatcgacaaggtgcggttcctggagcagcagaacaaggttctggacaccaagtggaccctgctgcaggagcagggcaccaagactgtgaggcagaacctggagccgttgttcgagcagtacatcaacaacctcaggaggcagctggacagcatcgtgggggaacggggccgcctggactcagagctgagaaacatgcaggacctggtggaagacttcaagaacaagtatgaggatgaaatcaacaagcgtaccactgctgagaatgagtttgtgatgctgaagaaggatgtagatgctgcctacatgaacaaggtggagctggaggccaaggttgatgcactgatggatgagattaacttcatgaagatgttctttgatgcggagctgtcccagatgcagacgcatgtctctgacacctcagtggtcctctccatggacaacaaccgcaacctggacctggatagcatcatcgctgaggtcaaggcccagtatgaggagattgccaaccgcagccggacagaagccgagtcctggtatcagaccaagtatgaggagctgcagcagacagctggccggcatggcgatgacctccgcaacaccaagcatgagatctctgagatgaaccggatgatccagaggctgagagccgagattgacaatgtcaagaaacagtgcgccaatctgcagaacgccattgcggatgccgagcagcgtggggagctggccctcaaggatgccaggaacaagctggccgagctggaggaggccctgcagaaggccaagcaggacatggcccggctgctgcgtgagtaccaggagctcatgaacaccaagctggccctggacgtggagatcgccacttaccgcaagctgctggagggcgaggaatgcagactcagtggagaaggagttggaccagtcaacatctctgttgtcacaagcagtgtttcctctggatatggcagtggcagtggctatggcggtggcctcggtggaggtcttggcggcggcctcggtggaggtcttgccggaggtagcagtggaagctactactccagcagcagtgggggtgtcggcctaggtggtgggctcagtgtggggggctctggcttcagtgcaagcagtggccgagggctgggggtgggctttggcagtggcgggggtagcagctccagcgtcaaatttgtctccaccacctcctcctcccggaagagcttcaagagctaagaacctgctgcaagtcactgccttccaagtgcagcaacccagcccatggagattgcctcttctaggcagttgctcaagccatgttttatccttttctggagagtagtctagaccaagccaattgcagaaccacattctttggttcccaggagagccccattcccagcccctggtctcccgtgccgcagttctatattctgcttcaaatcagccttcaggtttcccacagcatggcccctgctgacacgagaacccaaagttttcccaaatctaaatcatcaaaacagaatccccaccccaatcccaaattttgttttggttctaactacctccagaatgtgttcaataaaatgcttttataatataatcgacagctctctcgcccagcccagttctggaagggataaaaagggggcatcaccgttcctgggtaacagagccaccttctgcgtcctgctgagctctgttctctccagcacctcccaacccactagtgcctggttctcttgctccaccaggaacaagccaccatgtctcgccagtcaagtgtgtccttccggagcgggggcagtcgtagcttcagcaccgcctctgccatcaccccgtctgtctcccgcaccagcttcacctccgtgtcccggtccgggggtggcggtggtggtggcttcggcagggtcagccttgcgggtgcttgtggagtgggtggctatggcagccggagcctctacaacctggggggctccaagaggatatccatcagcactagtggtggcagcttcaggaaccggtttggtgctggtgctggaggcggctatggctttggaggtggtgccggtagtggatttggtttcggcggtggagctggtggtggctttgggctcggtggcggagctggctttggaggtggcttcggtggccctggctttcctgtctgccctcctggaggtatccaagaggtcactgtcaaccagagtctcctgactcccctcaacctgcaaatcgaccccagcatccagagggtgaggaccgaggagcgcgagcagatcaagaccctcaacaataagtttgcctccttcatcgacaaggtgcggttcctggagcagcagaacaaggttctggacaccaagtggaccctgctgcaggagcagggcaccaagactgtgaggcagaacctggagccgttgttcgagcagtacatcaacaacctcaggaggcagctggacagcatcgtgggggaacggggccgcctggactcagagctgagaaacatgcaggacctggtggaagacttcaagaacaagtatgaggatgaaatcaacaagcgtaccactgctgagaatgagtttgtgatgctgaagaaggatgtagatgctgcctacatgaacaaggtggagctggaggccaaggttgatgcactgatggatgagattaacttcatgaagatgttctttgatgcggagctgtcccagatgcagacgcatgtctctgacacctcagtggtcctctccatggacaacaaccgcaacctggacctggatagcatcatcgctgaggtcaaggcccagtatgaggagattgccaaccgcagccggacagaagccgagtcctggtatcagaccaagtatgaggagctgcagcagacagctggccggcatggcgatgacctccgcaacaccaagcatgagatctctgagatgaaccggatgatccagaggctgagagccgagattgacaatgtcaagaaacagtgcgccaatctgcagaacgccattgcggatgccgagcagcgtggggagctggccctcaaggatgccaggaacaagctggccgagctggaggaggccctgcagaaggccaagcaggacatggcccggctgctgcgtgagtaccaggagctcatgaacaccaagctggccctggacgtggagatcgccacttaccgcaagctgctggagggcgaggaatgcagactcagtggagaaggagttggaccagtcaacatctctgttgtcacaagcagtgtttcctctggatatggcagtggcagtggctatggcggtggcctcggtggaggtcttggcggcggcctcggtggaggtcttgccggaggtagcagtggaagctactactccagcagcagtgggggtgtcggcctaggtggtgggctcagtgtggggggctctggcttcagtgcaagcagtggccgagggctgggggtgggctttggcagtggcgggggtagcagctccagcgtcaaatttgtctccaccacctcctcctcccggaagagcttcaagagctaagaacctgctgcaagtcactgccttccaagtgcagcaacccagcccatggagattgcctcttctaggcagttgctcaagccatgttttatccttttctggagagtagtctagaccaagccaattgcagaaccacattctttggttcccaggagagccccattcccagcccctggtctcccgtgccgcagttctatattctgcttcaaatcagccttcaggtttcccacagcatggcccctgctgacacgagaacccaaagttttcccaaatctaaatcatcaaaacagaatccccaccccaatcccaaattttgttttggttctaactacctccagaatgtgttcaataaaatgcttttataatataatcgacagctctctcgcccagcccagttctggaagggataaaaagggggcatcaccgttcctgggtaacagagccaccttctgcgtcctgctgagctctgttctctccagcacctcccaacccactagtgcctggttctcttgctccaccaggaacaagccaccatgtctcgccagtcaagtgtgtccttccggagcgggggcagtcgtagcttcagcaccgcctctgccatcaccccgtctgtctcccgcaccagcttcacctccgtgtcccggtccgggggtggcggtggtggtggcttcggcagggtcagccttgcgggtgcttgtggagtgggtggctatggcagccggagcctctacaacctggggggctccaagaggatatccatcagcactagtggtggcagcttcaggaaccggtttggtgctggtgctggaggcggctatggctttggaggtggtgccggtagtggatttggtttcggcggtggagctggtggtggctttgggctcggtggcggagctggctttggaggtggcttcggtggccctggctttcctgtctgccctcctggaggtatccaagaggtcactgtcaaccagagtctcctgactcccctcaacctgcaaatcgaccccagcatccagagggtgaggaccgaggagcgcgagcagatcaagaccctcaacaataagtttgcctccttcatcgaca

SEQ ID NO: 659 - DNA, 32765 bp, Homo sapiens
  misc_feature (785)..(785): second gene starts at position 785
gtggtgcctttaaaaggccgggcgccgccttccgcctgcccgcctcctgcgccgccccttccgaggctaaatcggctgcgttcctctcggaacgcgccgcagaaggggtcctggtgacgagtcccgcgttctctccttgaatccactcgccagcccgccgccctctgccgccgcaccctgcacacccgcccctctcctgtgccaggaacttgctactaccagcaccatgccctaccaatatccagcactgaccccggagcagaagaaggagctgtctgacatcgctcaccgcatcgtggcacctggcaagggcatcctggctgcagatgagtccactgggagcattgccaagcggctgcagtccattggcaccgagaacaccgaggagaaccggcgcttctaccgccagctgctgctgacagctgacgaccgcgtgaacccctgcattgggggtgtcatcctcttccatgagacactctaccagaaggcggatgatgggcgtcccttcccccaagttatcaaatccaagggcggtgttgtgggcatcaaggtagacaagggcgtggtccccctggcagggacaaatggcgagactaccacccaagggttggatgggctgtctgagcgctgtgcccagtacaagaaggacggagctgacttcgccaagtggcgttgtgtgctgaagattggggaacacaccccctcagccctcgccatcatggaaaatgccaatgttctggcccgttatgccagtatctgccagcagaatggcattgtgcccatcgtggagcctgagatcctccctgatggggaccatgacttgaagcgctgccagtatgtgaccgagaaggtgctggctgctgtctacaaggctctgagtgaccaccacatctacctggaaggcaccttgctgaagcccaacatggtcaccccaggccatgcttgcactcagaagttttctcatgaggagattgccatggcgaccgtcacagcgctgcgccgcacagtgccccccgctgtcactgggatcaccttcctgtctggaggccagagtgaggaggaggcgtccatcaacctcaatgccattaacaagtgccccctgctgaagccctgggccctgaccttctcctacggccgagccctgcaggcctctgccctgaaggcctggggcgggaagaaggagaacctgaaggctgcgcaggaggagtatgtcaagcgagccctggccaacagccttgcctgtcaaggaaagtacactccgagcggtcaggctggggctgctgccagcgagtccctcttcgtctctaaccacgcctattaagcggaggtgttcccaggctgcccccaacactccaggccctgccccctcccactcttgaagaggaggccgcctcctcggggctccaggctggcttgcccgcgctctttcttccctcgtgacagtggtgtgtggtgtcgtctgtgaatgctaagtccatcaccctttccggcacactgccaaataaacagctatttaagggggagtggtgcctttaaaaggccgggcgccgccttccgcctgcccgcctcctgcgccgccccttccgaggctaaatcggctgcgttcctctcggaacgcgccgcagaaggggtcctggtgacgagtcccgcgttctctccttgaatccactcgccagcccgccgccctctgccgccgcaccctgcacacccgcccctctcctgtgccaggaacttgctactaccagcaccatgccctaccaatatccagcactgaccccggagcagaagaaggagctgtctgacatcgctcaccgcatcgtggcacctggcaagggcatcctggctgcagatgagtccactgggagcattgccaagcggctgcagtccattggcaccgagaacaccgaggagaaccggcgcttctaccgccagctgctgctgacagctgacgaccgcgtgaacccctgcattgggggtgtcatcctcttccatgagacactctaccagaaggcggatgatgggcgtcccttcccccaagttatcaaatccaagggcggtgttgtgggcatcaaggtagacaagggcgtggtccccctggcagggacaaatggcgagactaccacccaagggttggatgggctgtctgagcgctgtgcccagtacaagaaggacggagctgacttcgccaagtggcgttgtgtgctgaagattggggaacacaccccctcagccctcgccatcatggaaaatgccaatgttctggcccgttatgccagtatctgccagcagaatggcattgtgcccatcgtggagcctgagatcctccctgatggggaccatgacttgaagcgctgccagtatgtgaccgagaaggtgctggctgctgtctacaaggctctgagtgaccaccacatctacctggaaggcaccttgctgaagcccaacatggtcaccccaggccatgcttgcactcagaagttttctcatgaggagattgccatggcgaccgtcacagcgctgcgccgcacagtgccccccgctgtcactgggatcaccttcctgtctggaggccagagtgaggaggaggcgtccatcaacctcaatgccattaacaagtgccccctgctgaagccctgggccctgaccttctcctacggccgagccctgcaggcctctgccctgaaggcctggggcgggaagaaggagaacctgaaggctgcgcaggaggagtatgtcaagcgagccctggccaacagccttgcctgtcaaggaaagtacactccgagcggtcaggctggggctgctgccagcgagtccctcttcgtctctaaccacgcctattaagcggaggtgttcccaggctgcccccaacactccaggccctgccccctcccactcttgaagaggaggccgcctcctcggggctccaggctggcttgcccgcgctctttcttccctcgtgacagtggtgtgtggtgtcgtctgtgaatgctaagtccatcaccctttccggcacactgccaaataaacagctatttaagggggagtggtgcctttaaaaggccgggcgccgccttccgcctgcccgcctcctgcgccgccccttccgaggctaaatcggctgcgttcctctcggaacgcgccgcagaaggggtcctggtgacgagtcccgcgttctctccttgaatccactcgccagcccgccgccctctgccgccgcaccctgcacacccgcccctctcctgtgccaggaacttgctactaccagcaccatgccctaccaatatccagcactgaccccggagcagaagaaggagctgtctgacatcgctcaccgcatcgtggcacctggcaagggcatcctggctgcagatgagtccactgggagcattgccaagcggctgcagtccattggcaccgagaacaccgaggagaaccggcgcttctaccgccagctgctgctgacagctgacgaccgcgtgaacccctgcattgggggtgtcatcctcttccatgagacactctaccagaaggcggatgatgggcgtcccttcccccaagttatcaaatccaagggcggtgttgtgggcatcaaggtagacaagggcgtggtccccctggcagggacaaatggcgagactaccacccaagggttggatgggctgtctgagcgctgtgcccagtacaagaaggacggagctgacttcgccaagtggcgttgtgtgctgaagattggggaacacaccccctcagccctcgccatcatggaaaatgccaatgttctggcccgttatgccagtatctgccagcagaatggcattgtgcccatcgtggagcctgagatcctccctgatggggaccatgacttgaagcgctgccagtatgtgaccgagaaggtgctggctgctgtctacaaggctctgagtgaccaccacatctacctggaaggcaccttgctgaagcccaacatggtcaccccaggccatgcttgcactcagaagttttctcatgaggagattgccatggcgaccgtcacagcgctgcgccgcacagtgccccccgctgtcactgggatcaccttcctgtctggaggccagagtgaggaggaggcgtccatcaacctcaatgccattaacaagtgccccctgctgaagccctgggccctgaccttctcctacggccgagccctgcaggcctctgccctgaaggcctggggcgggaagaaggagaacctgaaggctgcgcaggaggagtatgtcaagcgagccctggccaacagccttgcctgtcaaggaaagtacactccgagcggtcaggctggggctgctgccagcgagtccctcttcgtctctaaccacgcctattaagcggaggtgttcccaggctgcccccaacactccaggccctgccccctcccactcttgaagaggaggccgcctcctcggggctccaggctggcttgcccgcgctctttcttccctcgtgacagtggtgtgtggtgtcgtctgtgaatgctaagtccatcaccctttccggcacactgccaaataaacagctatttaagggggagtggtgcctttaaaaggccgggcgccgccttccgcctgcccgcctcctgcgccgccccttccgaggctaaatcggctgcgttcctctcggaacgcgccgcagaaggggtcctggtgacgagtcccgcgttctctccttgaatccactcgccagcccgccgccctctgccgccgcaccctgcacacccgcccctctcctgtgccaggaacttgctatggtgccggtagtggatttggtttcggcggtggagctggtggtggctttgggctcggtggcggagctggctttggaggtggcttcggtggccctggctttcctgtctgccctcctggaggtatccaagaggtcactgtcaaccagagtctcctgactcccctcaacctgcaaatcgaccccagcatccagagggtgaggaccgaggagcgcgagcagatcaagaccctcaacaataagtttgcctccttcatcgacaaggtgcggttcctggagcagcagaacaaggttctggacaccaagtggaccctgctgcaggagcagggcaccaagactgtgaggcagaacctggagccgttgttcgagcagtacatcaacaacctcaggaggcagctggacagcatcgtgggggaacggggccgcctggactcagagctgagaaacatgcaggacctggtggaagacttcaagaacaagtatgaggatgaaatcaacaagcgtaccactgctgagaatgagtttgtgatgctgaagaaggatgtagatgctgcctacatgaacaaggtggagctggaggccaaggttgatgcactgatggatgagattaacttcatgaagatgttctttgatgcggagctgtcccagatgcagacgcatgtctctgacacctcagtggtcctctccatggacaacaaccgcaacctggacctggatagcatcatcgctgaggtcaaggcccagtatgaggagattgccaaccgcagccggacagaagccgagtcctggtatcagaccaagtatgaggagctgcagcagacagctggccggcatggcgatgacctccgcaacaccaagcatgagatctctgagatgaaccggatgatccagaggctgagagccgagattgacaatgtcaagaaacagtgcgccaatctgcagaacgccattgcggatgccgagcagcgtggggagctggccctcaaggatgccaggaacaagctggccgagctggaggaggccctgcagaaggccaagcaggacatggcccggctgctgcgtgagtaccaggagctcatgaacaccaagctggccctggacgtggagatcgccacttaccgcaagctgctggagggcgaggaatgcagactcagtggagaaggagttggaccagtcaacatctctgttgtcacaagcagtgtttcctctggatatggcagtggcagtggctatggcggtggcctcggtggaggtcttggcggcggcctcggtggaggtcttgccggaggtagcagtggaagctactactccagcagcagtgggggtgtcggcctaggtggtgggctcagtgtggggggctctggcttcagtgcaagcagtggccgagggctgggggtgggctttggcagtggcgggggtagcagctccagcgtcaaatttgtctccaccacctcctcctcccggaagagcttcaagagctaagaacctgctgcaagtcactgccttccaagtgcagcaacccagcccatggagattgcctcttctaggcagttgctcaagccatgttttatccttttctggagagtagtctagaccaagccaattgcagaaccacattctttggttcccaggagagccccattcccagcccctggtctcccgtgccgcagttctatattctgcttcaaatcagccttcaggtttcccacagcatggcccctgctgacacgagaacccaaagttttcccaaatctaaatcatcaaaacagaatccccaccccaatcccaaattttgttttggttctaactacctccagaatgtgttcaataaaatgcttttataatataatcgacagctctctcgcccagcccagttctggaagggataaaaagggggcatcaccgttcctgggtaacagagccaccttctgcgtcctgctgagctctgttctctccagcacctcccaacccactagtgcctggttctcttgctccaccaggaacaagccaccatgtctcgccagtcaagtgtgtccttccggagcgggggcagtcgtagcttcagcaccgcctctgccatcaccccgtctgtctcccgcaccagcttcacctccgtgtcccggtccgggggtggcggtggtggtggcttcggcagggtcagccttgcgggtgcttgtggagtgggtggctatggcagccggagcctctacaacctggggggctccaagaggatatccatcagcactagtggtggcagcttcaggaaccggtttggtgctggtgctggaggcggctatggctttggaggtggtgccggtagtggatttggtttcggcggtggagctggtggtggctttgggctcggtggcggagctggctttggaggtggcttcggtggccctggctttcctgtctgccctcctggaggtatccaagaggtcactgtcaaccagagtctcctgactcccctcaacctgcaaatcgaccccagcatccagagggtgaggaccgaggagcgcgagcagatcaagaccctcaacaataagtttgcctccttcatcgacaaggtgcggttcctggagcagcagaacaaggttctggacaccaagtggaccctgctgcaggagcagggcaccaagactgtgaggcagaacctggagccgttgttcgagcagtacatcaacaacctcaggaggcagctggacagcatcgtgggggaacggggccgcctggactcagagctgagaaacatgcaggacctggtggaagacttcaagaacaagtatgaggatgaaatcaacaagcgtaccactgctgagaatgagtttgtgatgctgaagaaggatgtagatgctgcctacatgaacaaggtggagctggaggccaaggttgatgcactgatggatgagattaacttcatgaagatgttctttgatgcggagctgtcccagatgcagacgcatgtctctgacacctcagtggtcctctccatggacaacaaccgcaacctggacctggatagcatcatcgctgaggtcaaggcccagtatgaggagattgccaaccgcagccggacagaagccgagtcctggtatcagaccaagtatgaggagctgcagcagacagctggccggcatggcgatgacctccgcaacaccaagcatgagatctctgagatgaaccggatgatccagaggctgagagccgagattgacaatgtcaagaaacagtgcgccaatctgcagaacgccattgcggatgccgagcagcgtggggagctggccctcaaggatgccaggaacaagctggccgagctggaggaggccctgcagaaggccaagcaggacatggcccggctgctgcgtgagtaccaggagctcatgaacaccaagctggccctggacgtggagatcgccacttaccgcaagctgctggagggcgaggaatgcagactcagtggagaaggagttggaccagtcaacatctctgttgtcacaagcagtgtttcctctggatatggcagtggcagtggctatggcggtggcctcggtggaggtcttggcggcggcctcggtggaggtcttgccggaggtagcagtggaagctactactccagcagcagtgggggtgtcggcctaggtggtgggctcagtgtggggggctctggcttcagtgcaagcagtggccgagggctgggggtgggctttggcagtggcgggggtagcagctccagcgtcaaatttgtctccaccacctcctcctcccggaagagcttcaagagctaagaacctgctgcaagtcactgccttccaagtgcagcaacccagcccatggagattgcctcttctaggcagttgctcaagccatgttttatccttttctggagagtagtctagaccaagccaattgcagaaccacattctttggttcccaggagagccccattcccagcccctggtctcccgtgccgcagttctatattctgcttcaaatcagccttcaggtttcccacagcatggcccctgctgacacgagaacccaaagttttcccaaatctaaatcatcaaaacagaatccccaccccaatcccaaattttgttttggttctaactacctccagaatgtgttcaataaaatgcttttataatataatcgacagctctctcgcccagcccagttctggaagggataaaaagggggcatcaccgttcctgggtaacagagccaccttctgcgtcctgctgagctctgttctctccagcacctcccaacccactagtgcctggttctcttgctccaccaggaacaagccaccatgtctcgccagtcaagtgtgtccttccggagcgggggcagtcgtagcttcagcaccgcctctgccatcaccccgtctgtctcccgcaccagcttcacctccgtgtcccggtccgggggtggcggtggtggtggcttcggcagggtcagccttgcgggtgcttgtggagtgggtggctatggcagccggagcctctacaacctggggggctccaagaggatatccatcagcactagtggtggcagcttcaggaaccggtttggtgctggtgctggaggcggctatggctttggaggtggtgccggtagtggatttggtttcggcggtggagctggtggtggctttgggctcggtggcggagctggctttggaggtggcttcggtggccctggctttcctgtctgccctcctggaggtatccaagaggtcactgtcaaccagagtctcctgactcccctcaacctgcaaatcgaccccagcatccagagggtgaggaccgaggagcgcgagcagatcaagaccctcaacaataagtttgcctccttcatcgacaaggtgcggttcctggagcagcagaacaaggttctggacaccaagtggaccctgctgcaggagcagggcaccaagactgtgaggcagaacctggagccgttgttcgagcagtacatcaacaacctcaggaggcagctggacagcatcgtgggggaacggggccgcctggactcagagctgagaaacatgcaggacctggtggaagacttcaagaacaagtatgaggatgaaatcaacaagcgtaccactgctgagaatgagtttgtgatgctgaagaaggatgtagatgctgcctacatgaacaaggtggagctggaggccaaggttgatgcactgatggatgagattaacttcatgaagatgttctttgatgcggagctgtcccagatgcagacgcatgtctctgacacctcagtggtcctctccatggacaacaaccgcaacctggacctggatagcatcatcgctgaggtcaaggcccagtatgaggagattgccaaccgcagccggacagaagccgagtcctggtatcagaccaagtatgaggagctgcagcagacagctggccggcatggcgatgacctccgcaacaccaagcatgagatctctgagatgaaccggatgatccagaggctgagagccgagattgacaatgtcaagaaacagtgcgccaatctgcagaacgccattgcggatgccgagcagcgtggggagctggccctcaaggatgccaggaacaagctggccgagctggaggaggccctgcagaaggccaagcaggacatggcccggctgctgcgtgagtaccaggagctcatgaacaccaagctggccctggacgtggagatcgccacttaccgcaagctgctggagggcgaggaatgcagactcagtggagaaggagttggaccagtcaacatctctgttgtcacaagcagtgtttcctctggatatggcagtggcagtggctatggcggtggcctcggtggaggtcttggcggcggcctcggtggaggtcttgccggaggtagcagtggaagctactactccagcagcagtgggggtgtcggcctaggtggtgggctcagtgtggggggctctggcttcagtgcaagcagtggccgagggctgggggtgggctttggcagtggcgggggtagcagctccagcgtcaaatttgtctccaccacctcctcctcccggaagagcttcaagagctaagaacctgctgcaagtcactgccttccaagtgcagcaacccagcccatggagattgcctcttctaggcagttgctcaagccatgttttatccttttctggagagtagtctagaccaagccaattgcagaaccacattctttggttcccaggagagccccattcccagcccctggtctcccgtgccgcagttctatattctgcttcaaatcagccttcaggtttcccacagcatggcccctgctgacacgagaacccaaagttttcccaaatctaaatcatcaaaacagaatccccaccccaatcccaaattttgttttggttctaactacctccagaatgtgttcaataaaatgcttttataatataatcgacagctctctcgcccagcccagttctggaagggataaaaagggggcatcaccgttcctgggtaacagagccaccttctgcgtcctgctgagctctgttctctccagcacctcccaacccactagtgcctggttctcttgctccaccaggaacaagccaccatgtctcgccagtcaagtgtgtccttccggagcgggggcagtcgtagcttcagcaccgcctctgccatcaccccgtctgtctcccgcaccagcttcacctccgtgtcccggtccgggggtggcggtggtggtggcttcggcagggtcagccttgcgggtgcttgtggagtgggtggctatggcagccggagcctctacaacctggggggctccaagaggatatccatcagcactagtggtggcagcttcaggaaccggtttggtgctggtgctggaggcggctatggctttggaggtggtgccggtagtggatttggtttcggcggtggagctggtggtggctttgggctcggtggcggagctggctttggaggtggcttcggtggccctggctttcctgtctgccctcctggaggtatccaagaggtcactgtcaaccagagtctcctgactcccctcaacctgcaaatcgaccccagcatccagagggtgaggaccgaggagcgcgagcagatcaagaccctcaacaataagtttgcctccttcatcgacaaggtgcggttcctggagcagcagaacaaggttctggacaccaagtggaccctgctgcaggagcagggcaccaagactgtgaggcagaacctggagccgttgttcgagcagtacatcaacaacctcaggaggcagctggacagcatcgtgggggaacggggccgcctggactcagagctgagaaacatgcaggacctggtggaagacttcaagaacaagtatgaggatgaaatcaacaagcgtaccactgctgagaatgagtttgtgatgctgaagaaggatgtagatgctgcctacatgaacaaggtggagctggaggccaaggttgatgcactgatggatgagattaacttcatgaagatgttctttgatgcggagctgtcccagatgcagacgcatgtctctgacacctcagtggtcctctccatggacaacaaccgcaacctggacctggatagcatcatcgctgaggtcaaggcccagtatgaggagattgccaaccgcagccggacagaagccgagtcctggtatcagaccaagtatgaggagctgcagcagacagctggccggcatggcgatgacctccgcaacaccaagcatgagatctctgagatgaaccggatgatccagaggctgagagccgagattgacaatgtcaagaaacagtgcgccaatctgcagaacgccattgcggatgccgagcagcgtggggagctggccctcaaggatgccaggaacaagctggccgagctggaggaggccctgcagaaggccaagcaggacatggcccggctgctgcgtgagtaccaggagctcatgaacaccaagctggccctggacgtggagatcgccacttaccgcaagctgctggagggcgaggaatgcagactcagtggagaaggagttggaccagtcaacatctctgttgtcacaagcagtgtttcctctggatatggcagtggcagtggctatggcggtggcctcggtggaggtcttggcggcggcctcggtggaggtcttgccggaggtagcagtggaagctactactccagcagcagtgggggtgtcggcctaggtggtgggctcagtgtggggggctctggcttcagtgcaagcagtggccgagggctgggggtgggctttggcagtggcgggggtagcagctccagcgtcaaatttgtctccaccacctcctcctcccggaagagcttcaagagctaagaacctgctgcaagtcactgccttccaagtgcagcaacccagcccatggagattgcctcttctaggcagttgctcaagccatgttttatccttttctggagagtagtctagaccaagccaattgcagaaccacattctttggttcccaggagagccccattcccagcccctggtctcccgtgccgcagttctatattctgcttcaaatcagccttcaggtttcccacagcatggcccctgctgacacgagaacccaaagttttcccaaatctaaatcatcaaaacagaatccccaccccaatcccaaattttgttttggttctaactacctccagaatgtgttcaataaaatgcttttataatataatcgacagctctctcgcccagcccagttctggaagggataaaaagggggcatcaccgttcctgggtaacagagccaccttctgcgtcctgctgagctctgttctctccagcacctcccaacccactagtgcctggttctcttgctccaccaggaacaagccaccatgtctcgccagtcaagtgtgtccttccggagcgggggcagtcgtagcttcagcaccgcctctgccatcaccccgtctgtctcccgcaccagcttcacctccgtgtcccggtccgggggtggcggtggtggtggcttcggcagggtcagccttgcgggtgcttgtggagtgggtggctatggcagccggagcctctacaacctggggggctccaagaggatatccatcagcactagtggtggcagcttcaggaaccggtttggtgctggtgctggaggcggctatggctttggaggtggtgccggtagtggatttggtttcggcggtggagctggtggtggctttgggctcggtggcggagctggctttggaggtggcttcggtggccctggctttcctgtctgccctcctggaggtatccaagaggtcactgtcaaccagagtctcctgactcccctcaacctgcaaatcgaccccagcatccagagggtgaggaccgaggagcgcgagcagatcaagaccctcaacaataagtttgcctccttcatcgacaaggtgcggttcctggagcagcagaacaaggttctggacaccaagtggaccctgctgcaggagcagggcaccaagactgtgaggcagaacctggagccgttgttcgagcagtacatcaacaacctcaggaggcagctggacagcatcgtgggggaacggggccgcctggactcagagctgagaaacatgcaggacctggtggaagacttcaagaacaagtatgaggatgaaatcaacaagcgtaccactgctgagaatgagtttgtgatgctgaagaaggatgtagatgctgcctacatgaacaaggtggagctggaggccaaggttgatgcactgatggatgagattaacttcatgaagatgttctttgatgcggagctgtcccagatgcagacgcatgtctctgacacctcagtggtcctctccatggacaacaaccgcaacctggacctggatagcatcatcgctgaggtcaaggcccagtatgaggagattgccaaccgcagccggacagaagccgagtcctggtatcagaccaagtatgaggagctgcagcagacagctggccggcatggcgatgacctccgcaacaccaagcatgagatctctgagatgaaccggatgatccagaggctgagagccgagattgacaatgtcaagaaacagtgcgccaatctgcagaacgccattgcggatgccgagcagcgtggggagctggccctcaaggatgccaggaacaagctggccgagctggaggaggccctgcagaaggccaagcaggacatggcccggctgctgcgtgagtaccaggagctcatgaacaccaagctggccctggacgtggagatcgccacttaccgcaagctgctggagggcgaggaatgcagactcagtggagaaggagttggaccagtcaacatctctgttgtcacaagcagtgtttcctctggatatggcagtggcagtggctatggcggtggcctcggtggaggtcttggcggcggcctcggtggaggtcttgccggaggtagcagtggaagctactactccagcagcagtgggggtgtcggcctaggtggtgggctcagtgtggggggctctggcttcagtgcaagcagtggccgagggctgggggtgggctttggcagtggcgggggtagcagctccagcgtcaaatttgtctccaccacctcctcctcccggaagagcttcaagagctaagaacctgctgcaagtcactgccttccaagtgcagcaacccagcccatggagattgcctcttctaggcagttgctcaagccatgttttatccttttctggagagtagtctagaccaagccaattgcagaaccacattctttggttcccaggagagccccattcccagcccctggtctcccgtgccgcagttctatattctgcttcaaatcagccttcaggtttcccacagcatggcccctgctgacacgagaacccaaagttttcccaaatctaaatcatcaaaacagaatccccaccccaatcccaaattttgttttggttctaactacctccagaatgtgttcaataaaatgcttttataatataatcgacagctctctcgcccagcccagttctggaagggataaaaagggggcatcaccgttcctgggtaacagagccaccttctgcgtcctgctgagctctgttctctccagcacctcccaacccactagtgcctggttctcttgctccaccaggaacaagccaccatgtctcgccagtcaagtgtgtccttccggagcgggggcagtcgtagcttcagcaccgcctctgccatcaccccgtctgtctcccgcaccagcttcacctccgtgtcccggtccgggggtggcggtggtggtggcttcggcagggtcagccttgcgggtgcttgtggagtgggtggctatggcagccggagcctctacaacctggggggctccaagaggatatccatcagcactagtggtggcagcttcaggaaccggtttggtgctggtgctggaggcggctatggctttggaggtggtgccggtagtggatttggtttcggcggtggagctggtggtggctttgggctcggtggcggagctggctttggaggtggcttcggtggccctggctttcctgtctgccctcctggaggtatccaagaggtcactgtcaaccagagtctcctgactcccctcaacctgcaaatcgaccccagcatccagagggtgaggaccgaggagcgcgagcagatcaagaccctcaacaataagtttgcctccttcatcgacaaggtgcggttcctggagcagcagaacaaggttctggacaccaagtggaccctgctgcaggagcagggcaccaagactgtgaggcagaacctggagccgttgttcgagcagtacatcaacaacctcaggaggcagctggacagcatcgtgggggaacggggccgcctggactcagagctgagaaacatgcaggacctggtggaagacttcaagaacaagtatgaggatgaaatcaacaagcgtaccactgctgagaatgagtttgtgatgctgaagaaggatgtagatgctgcctacatgaacaaggtggagctggaggccaaggttgatgcactgatggatgagattaacttcatgaagatgttctttgatgcggagctgtcccagatgcagacgcatgtctctgacacctcagtggtcctctccatggacaacaaccgcaacctggacctggatagcatcatcgctgaggtcaaggcccagtatgaggagattgccaaccgcagccggacagaagccgagtcctggtatcagaccaagtatgaggagctgcagcagacagctggccggcatggcgatgacctccgcaacaccaagcatgagatctctgagatgaaccggatgatccagaggctgagagccgagattgacaatgtcaagaaacagtgcgccaatctgcagaacgccattgcggatgccgagcagcgtggggagctggccctcaaggatgccaggaacaagctggccgagctggaggaggccctgcagaaggccaagcaggacatggcccggctgctgcgtgagtaccaggagctcatgaacaccaagctggccctggacgtggagatcgccacttaccgcaagctgctggagggcgaggaatgcagactcagtggagaaggagttggaccagtcaacatctctgttgtcacaagcagtgtttcctctggatatggcagtggcagtggctatggcggtggcctcggtggaggtcttggcggcggcctcggtggaggtcttgccggaggtagcagtggaagctactactccagcagcagtgggggtgtcggcctaggtggtgggctcagtgtggggggctctggcttcagtgcaagcagtggccgagggctgggggtgggctttggcagtggcgggggtagcagctccagcgtcaaatttgtctccaccacctcctcctcccggaagagcttcaagagctaagaacctgctgcaagtcactgccttccaagtgcagcaacccagcccatggagattgcctcttctaggcagttgctcaagccatgttttatccttttctggagagtagtctagaccaagccaattgcagaaccacattctttggttcccaggagagccccattcccagcccctggtctcccgtgccgcagttctatattctgcttcaaatcagccttcaggtttcccacagcatggcccctgctgacacgagaacccaaagttttcccaaatctaaatcatcaaaacagaatccccaccccaatcccaaattttgttttggttctaactacctccagaatgtgttcaataaaatgcttttataatataatcgacagctctctcgcccagcccagttctggaagggataaaaagggggcatcaccgttcctgggtaacagagccaccttctgcgtcctgctgagctctgttctctccagcacctcccaacccactagtgcctggttctcttgctccaccaggaacaagccaccatgtctcgccagtcaagtgtgtccttccggagcgggggcagtcgtagcttcagcaccgcctctgccatcaccccgtctgtctcccgcaccagcttcacctccgtgtcccggtccgggggtggcggtggtggtggcttcggcagggtcagccttgcgggtgcttgtggagtgggtggctatggcagccggagcctctacaacctggggggctccaagaggatatccatcagcactagtggtggcagcttcaggaaccggtttggtgctggtgctggaggcggctatggctttggaggtggtgccggtagtggatttggtttcggcggtggagctggtggtggctttgggctcggtggcggagctggctttggaggtggcttcggtggccctggctttcctgtctgccctcctggaggtatccaagaggtcactgtcaaccagagtctcctgactcccctcaacctgcaaatcgaccccagcatccagagggtgaggaccgaggagcgcgagcagatcaagaccctcaacaataagtttgcctccttcatcgacaaggtgcggttcctggagcagcagaacaaggttctggacaccaagtggaccctgctgcaggagcagggcaccaagactgtgaggcagaacctggagccgttgttcgagcagtacatcaacaacctcaggaggcagctggacagcatcgtgggggaacggggccgcctggactcagagctgagaaacatgcaggacctggtggaagacttcaagaacaagtatgaggatgaaatcaacaagcgtaccactgctgagaatgagtttgtgatgctgaagaaggatgtagatgctgcctacatgaacaaggtggagctggaggccaaggttgatgcactgatggatgagattaacttcatgaagatgttctttgatgcggagctgtcccagatgcagacgcatgtctctgacacctcagtggtcctctccatggacaacaaccgcaacctggacctggatagcatcatcgctgaggtcaaggcccagtatgaggagattgccaaccgcagccggacagaagccgagtcctggtatcagaccaagtatgaggagctgcagcagacagctggccggcatggcgatgacctccgcaacaccaagcatgagatctctgagatgaaccggatgatccagaggctgagagccgagattgacaatgtcaagaaacagtgcgccaatctgcagaacgccattgcggatgccgagcagcgtggggagctggccctcaaggatgccaggaacaagctggccgagctggaggaggccctgcagaaggccaagcaggacatggcccggctgctgcgtgagtaccaggagctcatgaacaccaagctggccctggacgtggagatcgccacttaccgcaagctgctggagggcgaggaatgcagactcagtggagaaggagttggaccagtcaacatctctgttgtcacaagcagtgtttcctctggatatggcagtggcagtggctatggcggtggcctcggtggaggtcttggcggcggcctcggtggaggtcttgccggaggtagcagtggaagctactactccagcagcagtgggggtgtcggcctaggtggtgggctcagtgtggggggctctggcttcagtgcaagcagtggccgagggctgggggtgggctttggcagtggcgggggtagcagctccagcgtcaaatttgtctccaccacctcctcctcccggaagagcttcaagagctaagaacctgctgcaagtcactgccttccaagtgcagcaacccagcccatggagattgcctcttctaggcagttgctcaagccatgttttatccttttctggagagtagtctagaccaagccaattgcagaaccacattctttggttcccaggagagccccattcccagcccctggtctcccgtgccgcagttctatattctgcttcaaatcagccttcaggtttcccacagcatggcccctgctgacacgagaacccaaagttttcccaaatctaaatcatcaaaacagaatccccaccccaatcccaaattttgttttggttctaactacctccagaatgtgttcaataaaatgcttttataatataatcgacagctctctcgcccagcccagttctggaagggataaaaagggggcatcaccgttcctgggtaacagagccaccttctgcgtcctgctgagctctgttctctccagcacctcccaacccactagtgcctggttctcttgctccaccaggaacaagccaccatgtctcgccagtcaagtgtgtccttccggagcgggggcagtcgtagcttcagcaccgcctctgccatcaccccgtctgtctcccgcaccagcttcacctccgtgtcccggtccgggggtggcggtggtggtggcttcggcagggtcagccttgcgggtgcttgtggagtgggtggctatggcagccggagcctctacaacctggggggctccaagaggatatccatcagcactagtggtggcagcttcaggaaccggtttggtgctggtgctggaggcggctatggctttggaggtggtgccggtagtggatttggtttcggcggtggagctggtggtggctttgggctcggtggcggagctggctttggaggtggcttcggtggccctggctttcctgtctgccctcctggaggtatccaagaggtcactgtcaaccagagtctcctgactcccctcaacctgcaaatcgaccccagcatccagagggtgaggaccgaggagcgcgagcagatcaagaccctcaacaataagtttgcctccttcatcgacaaggtgcggttcctggagcagcagaacaaggttctggacaccaagtggaccctgctgcaggagcagggcaccaagactgtgaggcagaacctggagccgttgttcgagcagtacatcaacaacctcaggaggcagctggacagcatcgtgggggaacggggccgcctggactcagagctgagaaacatgcaggacctggtggaagacttcaagaacaagtatgaggatgaaatcaacaagcgtaccactgctgagaatgagtttgtgatgctgaagaaggatgtagatgctgcctacatgaacaaggtggagctggaggccaaggttgatgcactgatggatgagattaacttcatgaagatgttctttgatgcggagctgtcccagatgcagacgcatgtctctgacacctcagtggtcctctccatggacaacaaccgcaacctggacctggatagcatcatcgctgaggtcaaggcccagtatgaggagattgccaaccgcagccggacagaagccgagtcctggtatcagaccaagtatgaggagctgcagcagacagctggccggcatggcgatgacctccgcaacaccaagcatgagatctctgagatgaaccggatgatccagaggctgagagccgagattgacaatgtcaagaaacagtgcgccaatctgcagaacgccattgcggatgccgagcagcgtggggagctggccctcaaggatgccaggaacaagctggccgagctggaggaggccctgcagaaggccaagcaggacatggcccggctgctgcgtgagtaccaggagctcatgaacaccaagctggccctggacgtggagatcgccacttaccgcaagctgctggagggcgaggaatgcagactcagtggagaaggagttggaccagtcaacatctctgttgtcacaagcagtgtttcctctggatatggcagtggcagtggctatggcggtggcctcggtggaggtcttggcggcggcctcggtggaggtcttgccggaggtagcagtggaagctactactccagcagcagtgggggtgtcggcctaggtggtgggctcagtgtggggggctctggcttcagtgcaagcagtggccgagggctgggggtgggctttggcagtggcgggggtagcagctccagcgtcaaatttgtctccaccacctcctcctcccggaagagcttcaagagctaagaacctgctgcaagtcactgccttccaagtgcagcaacccagcccatggagattgcctcttctaggcagttgctcaagccatgttttatccttttctggagagtagtctagaccaagccaattgcagaaccacattctttggttcccaggagagccccattcccagcccctggtctcccgtgccgcagttctatattctgcttcaaatcagccttcaggtttcccacagcatggcccctgctgacacgagaacccaaagttttcccaaatctaaatcatcaaaacagaatccccaccccaatcccaaattttgttttggttctaactacctccagaatgtgttcaataaaatgcttttataatataatcgacagctctctcgcccagcccagttctggaagggataaaaagggggcatcaccgttcctgggtaacagagccaccttctgcgtcctgctgagctctgttctctccagcacctcccaacccactagtgcctggttctcttgctccaccaggaacaagccaccatgtctcgccagtcaagtgtgtccttccggagcgggggcagtcgtagcttcagcaccgcctctgccatcaccccgtctgtctcccgcaccagcttcacctccgtgtcccggtccgggggtggcggtggtggtggcttcggcagggtcagccttgcgggtgcttgtggagtgggtggctatggcagccggagcctctacaacctggggggctccaagaggatatccatcagcactagtggtggcagcttcaggaaccggtttggtgctggtgctggaggcggctatggctttggaggtggtgccggtagtggatttggtttcggcggtggagctggtggtggctttgggctcggtggcggagctggctttggaggtggcttcggtggccctggctttcctgtctgccctcctggaggtatccaagaggtcactgtcaaccagagtctcctgactcccctcaacctgcaaatcgaccccagcatccagagggtgaggaccgaggagcgcgagcagatcaagaccctcaacaataagtttgcctccttcatcgacaaggtgcggttcctggagcagcagaacaaggttctggacaccaagtggaccctgctgcaggagcagggcaccaagactgtgaggcagaacctggagccgttgttcgagcagtacatcaacaacctcaggaggcagctggacagcatcgtgggggaacggggccgcctggactcagagctgagaaacatgcaggacctggtggaagacttcaagaacaagtatgaggatgaaatcaacaagcgtaccactgctgagaatgagtttgtgatgctgaagaaggatgtagatgctgcctacatgaacaaggtggagctggaggccaaggttgatgcactgatggatgagattaacttcatgaagatgttctttgatgcggagctgtcccagatgcagacgcatgtctctgacacctcagtggtcctctccatggacaacaaccgcaacctggacctggatagcatcatcgctgaggtcaaggcccagtatgaggagattgccaaccgcagccggacagaagccgagtcctggtatcagaccaagtatgaggagctgcagcagacagctggccggcatggcgatgacctccgcaacaccaagcatgagatctctgagatgaaccggatgatccagaggctgagagccgagattgacaatgtcaagaaacagtgcgccaatctgcagaacgccattgcggatgccgagcagcgtggggagctggccctcaaggatgccaggaacaagctggccgagctggaggaggccctgcagaaggccaagcaggacatggcccggctgctgcgtgagtaccaggagctcatgaacaccaagctggccctggacgtggagatcgccacttaccgcaagctgctggagggcgaggaatgcagactcagtggagaaggagttggaccagtcaacatctctgttgtcacaagcagtgtttcctctggatatggcagtggcagtggctatggcggtggcctcggtggaggtcttggcggcggcctcggtggaggtcttgccggaggtagcagtggaagctactactccagcagcagtgggggtgtcggcctaggtggtgggctcagtgtggggggctctggcttcagtgcaagcagtggccgagggctgggggtgggctttggcagtggcgggggtagcagctccagcgtcaaatttgtctccaccacctcctcctcccggaagagcttcaagagctaagaacctgctgcaagtcactgccttccaagtgcagcaacccagcccatggagattgcctcttctaggcagttgctcaagccatgttttatccttttctggagagtagtctagaccaagccaattgcagaaccacattctttggttcccaggagagccccattcccagcccctggtctcccgtgccgcagttctatattctgcttcaaatcagccttcaggtttcccacagcatggcccctgctgacacgagaacccaaagttttcccaaatctaaatcatcaaaacagaatccccaccccaatcccaaattttgttttggttctaactacctccagaatgtgttcaataaaatgcttttataatataatcgacagctctctcgcccagcccagttctggaagggataaaaagggggcatcaccgttcctgggtaacagagccaccttctgcgtcctgctgagctctgttctctccagcacctcccaacccactagtgcctggttctcttgctccaccaggaacaagccaccatgtctcgccagtcaagtgtgtccttccggagcgggggcagtcgtagcttcagcaccgcctctgccatcaccccgtctgtctcccgcaccagcttcacctccgtgtcccggtccgggggtggcggtggtggtggcttcggcagggtcagccttgcgggtgcttgtggagtgggtggctatggcagccggagcctctacaacctggggggctccaagaggatatccatcagcactagtggtggcagcttcaggaaccggtttggtgctggtgctggaggcggctatggctttggaggtggtgccggtagtggatttggtttcggcggtggagctggtggtggctttgggctcggtggcggagctggctttggaggtggcttcggtggccctggctttcctgtctgccctcctggaggtatccaagaggtcactgtcaaccagagtctcctgactcccctcaacctgcaaatcgaccccagcatccagagggtgaggaccgaggagcgcgagcagatcaagaccctcaacaataagtttgcctccttcatcgacaaggtgcggttcctggagcagcagaacaaggttctggacaccaagtggaccctgctgcaggagcagggcaccaagactgtgaggcagaacctggagccgttgttcgagcagtacatcaacaacctcaggaggcagctggacagcatcgtgggggaacggggccgcctggactcagagctgagaaacatgcaggacctggtggaagacttcaagaacaagtatgaggatgaaatcaacaagcgtaccactgctgagaatgagtttgtgatgctgaagaaggatgtagatgctgcctacatgaacaaggtggagctggaggccaaggttgatgcactgatggatgagattaacttcatgaagatgttctttgatgcggagctgtcccagatgcagacgcatgtctctgacacctcagtggtcctctccatggacaacaaccgcaacctggacctggatagcatcatcgctgaggtcaaggcccagtatgaggagattgccaaccgcagccggacagaagccgagtcctggtatcagaccaagtatgaggagctgcagcagacagctggccggcatggcgatgacctccgcaacaccaagcatgagatctctgagatgaaccggatgatccagaggctgagagccgagattgacaatgtcaagaaacagtgcgccaatctgcagaacgccattgcggatgccgagcagcgtggggagctggccctcaaggatgccaggaacaagctggccgagctggaggaggccctgcagaaggccaagcaggacatggcccggctgctgcgtgagtaccaggagctcatgaacaccaagctggccctggacgtggagatcgccacttaccgcaagctgctggagggcgaggaatgcagactcagtggagaaggagttggaccagtcaacatctctgttgtcacaagcagtgtttcctctggatatggcagtggcagtggctatggcggtggcctcggtggaggtcttggcggcggcctcggtggaggtcttgccggaggtagcagtggaagctactactccagcagcagtgggggtgtcggcctaggtggtgggctcagtgtggggggctctggcttcagtgcaagcagtggccgagggctgggggtgggctttggcagtggcgggggtagcagctccagcgtcaaatttgtctccaccacctcctcctcccggaagagcttcaagagctaagaacctgctgcaagtcactgccttccaagtgcagcaacccagcccatggagattgcctcttctaggcagttgctcaagccatgttttatccttttctggagagtagtctagaccaagccaattgcagaaccacattctttggttcccaggagagccccattcccagcccctggtctcccgtgccgcagttctatattctgcttcaaatcagccttcaggtttcccacagcatggcccctgctgacacgagaacccaaagttttcccaaatctaaatcatcaaaacagaatccccaccccaatcccaaattttgttttggttctaactacctccagaatgtgttcaataaaatgcttttataatataatcgacagctctctcgcccagcccagttctggaagggataaaaagggggcatcaccgttcctgggtaacagagccaccttctgcgtcctgctgagctctgttctctccagcacctcccaacccactagtgcctggttctcttgctccaccaggaacaagccaccatgtctcgccagtcaagtgtgtccttccggagcgggggcagtcgtagcttcagcaccgcctctgccatcaccccgtctgtctcccgcaccagcttcacctccgtgtcccggtccgggggtggcggtggtggtggcttcggcagggtcagccttgcgggtgcttgtggagtgggtggctatggcagccggagcctctacaacctggggggctccaagaggatatccatcagcactagtggtggcagcttcaggaaccggtttggtgctggtgctggaggcggctatggctttggaggtggtgccggtagtggatttggtttcggcggtggagctggtggtggctttgggctcggtggcggagctggctttggaggtggcttcggtggccctggctttcctgtctgccctcctggaggtatccaagaggtcactgtcaaccagagtctcctgactcccctcaacctgcaaatcgaccccagcatccagagggtgaggaccgaggagcgcgagcagatcaagaccctcaacaataagtttgcctccttcatcgacaaggtgcggttcctggagcagcagaacaaggttctggacaccaagtggaccctgctgcaggagcagggcaccaagactgtgaggcagaacctggagccgttgttcgagcagtacatcaacaacctcaggaggcagctggacagcatcgtgggggaacggggccgcctggactcagagctgagaaacatgcaggacctggtggaagacttcaagaacaagtatgaggatgaaatcaacaagcgtaccactgctgagaatgagtttgtgatgctgaagaaggatgtagatgctgcctacatgaacaaggtggagctggaggccaaggttgatgcactgatggatgagattaacttcatgaagatgttctttgatgcggagctgtcccagatgcagacgcatgtctctgacacctcagtggtcctctccatggacaacaaccgcaacctggacctggatagcatcatcgctgaggtcaaggcccagtatgaggagattgccaaccgcagccggacagaagccgagtcctggtatcagaccaagtatgaggagctgcagcagacagctggccggcatggcgatgacctccgcaacaccaagcatgagatctctgagatgaaccggatgatccagaggctgagagccgagattgacaatgtcaagaaacagtgcgccaatctgcagaacgccattgcggatgccgagcagcgtggggagctggccctcaaggatgccaggaacaagctggccgagctggaggaggccctgcagaaggccaagcaggacatggcccggctgctgcgtgagtaccaggagctcatgaacaccaagctggccctggacgtggagatcgccacttaccgcaagctgctggagggcgaggaatgcagactcagtggagaaggagttggaccagtcaacatctctgttgtcacaagcagtgtttcctctggatatggcagtggcagtggctatggcggtggcctcggtggaggtcttggcggcggcctcggtggaggtcttgccggaggtagcagtggaagctactactccagcagcagtgggggtgtcggcctaggtggtgggctcagtgtggggggctctggcttcagtgcaagcagtggccgagggctgggggtgggctttggcagtggcgggggtagcagctccagcgtcaaatttgtctccaccacctcctcctcccggaagagcttcaagagctaagaacctgctgcaagtcactgccttccaagtgcagcaacccagcccatggagattgcctcttctaggcagttgctcaagccatgttttatccttttctggagagtagtctagaccaagccaattgcagaaccacattctttggttcccaggagagccccattcccagcccctggtctcccgtgccgcagttctatattctgcttcaaatcagccttcaggtttcccacagcatggcccctgctgacacgagaacccaaagttttcccaaatctaaatcatcaaaacagaatccccaccccaatcccaaattttgttttggttctaactacctccagaatgtgttcaataaaatgcttttataatataatcgacagctctctcgcccagcccagttctggaagggataaaaagggggcatcaccgttcctgggtaacagagccaccttctgcgtcctgctgagctctgttctctccagcacctcccaacccactagtgcctggttctcttgctccaccaggaacaagccaccatgtctcgccagtcaagtgtgtccttccggagcgggggcagtcgtagcttcagcaccgcctctgccatcaccccgtctgtctcccgcaccagcttcacctccgtgtcccggtccgggggtggcggtggtggtggcttcggcagggtcagccttgcgggtgcttgtggagtgggtggctatggcagccggagcctctacaacctggggggctccaagaggatatccatcagcactagtggtggcagcttcaggaaccggtttggtgctggtgctggaggcggctatggctttggaggtggtgccggtagtggatttggtttcggcggtggagctggtggtggctttgggctcggtggcggagctggctttggaggtggcttcggtggccctggctttcctgtctgccctcctggaggtatccaagaggtcactgtcaaccagagtctcctgactcccctcaacctgcaaatcgaccccagcatccagagggtgaggaccgaggagcgcgagcagatcaagaccctcaacaataagtttgcctccttcatcgacaaggtgcggttcctggagcagcagaacaaggttctggacaccaagtggaccctgctgcaggagcagggcaccaagactgtgaggcagaacctggagccgttgttcgagcagtacatcaacaacctcaggaggcagctggacagcatcgtgggggaacggggccgcctggactcagagctgagaaacatgcaggacctggtggaagacttcaagaacaagtatgaggatgaaatcaacaagcgtaccactgctgagaatgagtttgtgatgctgaagaaggatgtagatgctgcctacatgaacaaggtggagctggaggccaaggttgatgcactgatggatgagattaacttcatgaagatgttctttgatgcggagctgtcccagatgcagacgcatgtctctgacacctcagtggtcctctccatggacaacaaccgcaacctggacctggatagcatcatcgctgaggtcaaggcccagtatgaggagattgccaaccgcagccggacagaagccgagtcctggtatcagaccaagtatgaggagctgcagcagacagctggccggcatggcgatgacctccgcaacaccaagcatgagatctctgagatgaaccggatgatccagaggctgagagccgagattgacaatgtcaagaaacagtgcgccaatctgcagaacgccattgcggatgccgagcagcgtggggagctggccctcaaggatgccaggaacaagctggccgagctggaggaggccctgcagaaggccaagcaggacatggcccggctgctgcgtgagtaccaggagctcatgaacaccaagctggccctggacgtggagatcgccacttaccgcaagctgctggagggcgaggaatgcagactcagtggagaaggagttggaccagtcaacatctctgttgtcacaagcagtgtttcctctggatatggcagtggcagtggctatggcggtggcctcggtggaggtcttggcggcggcctcggtggaggtcttgccggaggtagcagtggaagctactactccagcagcagtgggggtgtcggcctaggtggtgggctcagtgtggggggctctggcttcagtgcaagcagtggccgagggctgggggtgggctttggcagtggcgggggtagcagctccagcgtcaaatttgtctccaccacctcctcctcccggaagagcttcaagagctaagaacctgctgcaagtcactgccttccaagtgcagcaacccagcccatggagattgcctcttctaggcagttgctcaagccatgttttatccttttctggagagtagtctagaccaagccaattgcagaaccacattctttggttcccaggagagccccattcccagcccctggtctcccgtgccgcagttctatattctgcttcaaatcagccttcaggtttcccacagcatggcccctgctgacacgagaacccaaagttttcccaaatctaaatcatcaaaacagaatccccaccccaatcccaaattttgttttggttctaactacctccagaatgtgttcaataaaatgcttttataatataatcgacagctctctcgcccagcccagttctggaagggataaaaagggggcatcaccgttcctgggtaacagagccaccttctgcgtcctgctgagctctgttctctccagcacctcccaacccactagtgcctggttctcttgctccaccaggaacaagccaccatgtctcgccagtcaagtgtgtccttccggagcgggggcagtcgtagcttcagcaccgcctctgccatcaccccgtctgtctcccgcaccagcttcacctccgtgtcccggtccgggggtggcggtggtggtggcttcggcagggtcagccttgcgggtgcttgtggagtgggtggctatggcagccggagcctctacaacctggggggctccaagaggatatccatcagcactagtggtggcagcttcaggaaccggtttggtgctggtgctggaggcggctatggctttggaggtggtgccggtagtggatttggtttcggcggtggagctggtggtggctttgggctcggtggcggagctggctttggaggtggcttcggtggccctggctttcctgtctgccctcctggaggtatccaagaggtcactgtcaaccagagtctcctgactcccctcaacctgcaaatcgaccccagcatccagagggtgaggaccgaggagcgcgagcagatcaagaccctcaacaataagtttgcctccttcatcgacaaggtgcggttcctggagcagcagaacaaggttctggacaccaagtggaccctgctgcaggagcagggcaccaagactgtgaggcagaa

SEQ ID NO: 660 - DNA, 32765 bp, Homo sapiens
  misc_feature (497)..(497): second gene starts at position 497
aaaagggcaggggtcattagagaagatcggggacacatgtggggcgggcaggagctgccttataaccagcccgggaacccctagctcactcgctgctgaccaggctctgccggctccttcggcctcgccgcaggaacttgctactaccagcaccatgccctaccaatatccagcactgaccccggagcagaagaaggagctgtctgacatcgctcaccgcatcgtggcacctggcaagggcatcctggctgcagatgagtccactgggagcattgccaagcggctgcagtccattggcaccgagaacaccgaggagaaccggcgcttctaccgccagctgctgctgacagctgacgaccgcgtgaacccctgcattgggggtgtcatcctcttccatgagacactctaccagaaggcggatgatgggcgtcccttcccccaagttatcaaatccaagggcggtgttgtgggcatcaaggtagacaagggcgtggtccccctggcagggacaaatggcgagactaccacccaagggttggatgggctgtctgagcgctgtgcccagtacaagaaggacggagctgacttcgccaagtggcgttgtgtgctgaagattggggaacacaccccctcagccctcgccatcatggaaaatgccaatgttctggcccgttatgccagtatctgccagcagaatggcattgtgcccatcgtggagcctgagatcctccctgatggggaccatgacttgaagcgctgccagtatgtgaccgagaaggtgctggctgctgtctacaaggctctgagtgaccaccacatctacctggaaggcaccttgctgaagcccaacatggtcaccccaggccatgcttgcactcagaagttttctcatgaggagattgccatggcgaccgtcacagcgctgcgccgcacagtgccccccgctgtcactgggatcaccttcctgtctggaggccagagtgaggaggaggcgtccatcaacctcaatgccattaacaagtgccccctgctgaagccctgggccctgaccttctcctacggccgagccctgcaggcctctgccctgaaggcctggggcgggaagaaggagaacctgaaggctgcgcaggaggagtatgtcaagcgagccctggccaacagccttgcctgtcaaggaaagtacactccgagcggtcaggctggggctgctgccagcgagtccctcttcgtctctaaccacgcctattaagcggaggtgttcccaggctgcccccaacactccaggccctgccccctcccactcttgaagaggaggccgcctcctcggggctccaggctggcttgcccgcgctctttcttccctcgtgacagtggtgtgtggtgtcgtctgtgaatgctaagtccatcaccctttccggcacactgccaaataaacagctatttaagggggaaaaagggcaggggtcattagagaagatcggggacacatgtggggcgggcaggagctgccttataaccagcccgggaacccctagctcactcgctgctgaccaggctctgccggctccttcggcctcgccgcaggaacttgctactaccagcaccatgccctaccaatatccagcactgaccccggagcagaagaaggagctgtctgacatcgctcaccgcatcgtggcacctggcaagggcatcctggctgcagatgagtccactgggagcattgccaagcggctgcagtccattggcaccgagaacaccgaggagaaccggcgcttctaccgccagctgctgctgacagctgacgaccgcgtgaacccctgcattgggggtgtcatcctcttccatgagacactctaccagaaggcggatgatgggcgtcccttcccccaagttatcaaatccaagggcggtgttgtgggcatcaaggtagacaagggcgtggtccccctggcagggacaaatggcgagactaccacccaagggttggatgggctgtctgagcgctgtgcccagtacaagaaggacggagctgacttcgccaagtggcgttgtgtgctgaagattggggaacacaccccctcagccctcgccatcatggaaaatgccaatgttctggcccgttatgccagtatctgccagcagaatggcattgtgcccatcgtggagcctgagatcctccctgatggggaccatgacttgaagcgctgccagtatgtgaccgagaaggtgctggctgctgtctacaaggctctgagtgaccaccacatctacctggaaggcaccttgctgaagcccaacatggtcaccccaggccatgcttgcactcagaagttttctcatgaggagattgccatggcgaccgtcacagcgctgcgccgcacagtgccccccgctgtcactgggatcaccttcctgtctggaggccagagtgaggaggaggcgtccatcaacctcaatgccattaacaagtgccccctgctgaagccctgggccctgaccttctcctacggccgagccctgcaggcctctgccctgaaggcctggggcgggaagaaggagaacctgaaggctgcgcaggaggagtatgtcaagcgagccctggccaacagccttgcctgtcaaggaaagtacactccgagcggtcaggctggggctgctgccagcgagtccctcttcgtctctaaccacgcctattaagcggaggtgttcccaggctgcccccaacactccaggccctgccccctcccactcttgaagaggaggccgcctcctcggggctccaggctggcttgcccgcgctctttcttccctcgtgacagtggtgtgtggtgtcgtctgtgaatgctaagtccatcaccctttccggcacactgccaaataaacagctatttaagggggaaaaagggcaggggtcattagagaagatcggggacacatgtggggcgggcaggagctgccttataaccagcccgggaacccctagctcactcgctgctgaccaggctctgccggctccttcggcctcgccgcaggaacttgctactaccagcaccatgccctaccaatatccagcactgaccccggagcagaagaaggagctgtctgacatcgctcaccgcatcgtggcacctggcaagggcatcctggctgcagatgagtccactgggagcattgccaagcggctgcagtccattggcaccgagaacaccgaggagaaccggcgcttctaccgccagctgctgctgacagctgacgaccgcgtgaacccctgcattgggggtgtcatcctcttccatgagacactctaccagaaggcggatgatgggcgtcccttcccccaagttatcaaatccaagggcggtgttgtgggcatcaaggtagacaagggcgtggtccccctggcagggacaaatggcgagactaccacccaagggttggatgggctgtctgagcgctgtgcccagtacaagaaggacggagctgacttcgccaagtggcgttgtgtgctgaagattggggaacacaccccctcagccctcgccatcatggaaaatgccaatgttctggcccgttatgccagtatctgccagcagaatggcattgtgcccatcgtggagcctgagatcctccctgatggggaccatgacttgaagcgctgccagtatgtgaccgagaaggtgctggctgctgtctacaaggctctgagtgaccaccacatctacctggaaggcaccttgctgaagcccaacatggtcaccccaggccatgcttgcactcagaagttttctcatgaggagattgccatggcgaccgtcacagcgctgcgccgcacagtgccccccgctgtcactgggatcaccttcctgtctggaggccagagtgaggaggaggcgtccatcaacctcaatgccattaacaagtgccccctgctgaagccctgggccctgaccttctcctacggccgagccctgcaggcctctgccctgaaggcctggggcgggaagaaggagaacctgaaggctgcgcaggaggagtatgtcaagcgagccctggccaacagccttgcctgtcaaggaaagtacactccgagcggtcaggctggggctgctgccagcgagtccctcttcgtctctaaccacgcctattaagcggaggtgttcccaggctgcccccaacactccaggccctgccccctcccactcttgaagaggaggccgcctcctcggggctccaggctggcttgcccgcgctctttcttccctcgtgacagtggtgtgtggtgtcgtctgtgaatgctaagtccatcaccctttccggcacactgccaaataaacagctatttaagggggaaaaagggcaggggtcattagagaagatcggggacacatgtggggcgggcaggagctgccttataaccagcccgggaacccctagctcactcgctgctgaccaggctctgccggctccttcggcctcgccgcaggaacttgctatggtgccggtagtggatttggtttcggcggtggagctggtggtggctttgggctcggtggcggagctggctttggaggtggcttcggtggccctggctttcctgtctgccctcctggaggtatccaagaggtcactgtcaaccagagtctcctgactcccctcaacctgcaaatcgaccccagcatccagagggtgaggaccgaggagcgcgagcagatcaagaccctcaacaataagtttgcctccttcatcgacaaggtgcggttcctggagcagcagaacaaggttctggacaccaagtggaccctgctgcaggagcagggcaccaagactgtgaggcagaacctggagccgttgttcgagcagtacatcaacaacctcaggaggcagctggacagcatcgtgggggaacggggccgcctggactcagagctgagaaacatgcaggacctggtggaagacttcaagaacaagtatgaggatgaaatcaacaagcgtaccactgctgagaatgagtttgtgatgctgaagaaggatgtagatgctgcctacatgaacaaggtggagctggaggccaaggttgatgcactgatggatgagattaacttcatgaagatgttctttgatgcggagctgtcccagatgcagacgcatgtctctgacacctcagtggtcctctccatggacaacaaccgcaacctggacctggatagcatcatcgctgaggtcaaggcccagtatgaggagattgccaaccgcagccggacagaagccgagtcctggtatcagaccaagtatgaggagctgcagcagacagctggccggcatggcgatgacctccgcaacaccaagcatgagatctctgagatgaaccggatgatccagaggctgagagccgagattgacaatgtcaagaaacagtgcgccaatctgcagaacgccattgcggatgccgagcagcgtggggagctggccctcaaggatgccaggaacaagctggccgagctggaggaggccctgcagaaggccaagcaggacatggcccggctgctgcgtgagtaccaggagctcatgaacaccaagctggccctggacgtggagatcgccacttaccgcaagctgctggagggcgaggaatgcagactcagtggagaaggagttggaccagtcaacatctctgttgtcacaagcagtgtttcctctggatatggcagtggcagtggctatggcggtggcctcggtggaggtcttggcggcggcctcggtggaggtcttgccggaggtagcagtggaagctactactccagcagcagtgggggtgtcggcctaggtggtgggctcagtgtggggggctctggcttcagtgcaagcagtggccgagggctgggggtgggctttggcagtggcgggggtagcagctccagcgtcaaatttgtctccaccacctcctcctcccggaagagcttcaagagctaagaacctgctgcaagtcactgccttccaagtgcagcaacccagcccatggagattgcctcttctaggcagttgctcaagccatgttttatccttttctggagagtagtctagaccaagccaattgcagaaccacattctttggttcccaggagagccccattcccagcccctggtctcccgtgccgcagttctatattctgcttcaaatcagccttcaggtttcccacagcatggcccctgctgacacgagaacccaaagttttcccaaatctaaatcatcaaaacagaatccccaccccaatcccaaattttgttttggttctaactacctccagaatgtgttcaataaaatgcttttataatataatcgacagctctctcgcccagcccagttctggaagggataaaaagggggcatcaccgttcctgggtaacagagccaccttctgcgtcctgctgagctctgttctctccagcacctcccaacccactagtgcctggttctcttgctccaccaggaacaagccaccatgtctcgccagtcaagtgtgtccttccggagcgggggcagtcgtagcttcagcaccgcctctgccatcaccccgtctgtctcccgcaccagcttcacctccgtgtcccggtccgggggtggcggtggtggtggcttcggcagggtcagccttgcgggtgcttgtggagtgggtggctatggcagccggagcctctacaacctggggggctccaagaggatatccatcagcactagtggtggcagcttcaggaaccggtttggtgctggtgctggaggcggctatggctttggaggtggtgccggtagtggatttggtttcggcggtggagctggtggtggctttgggctcggtggcggagctggctttggaggtggcttcggtggccctggctttcctgtctgccctcctggaggtatccaagaggtcactgtcaaccagagtctcctgactcccctcaacctgcaaatcgaccccagcatccagagggtgaggaccgaggagcgcgagcagatcaagaccctcaacaataagtttgcctccttcatcgacaaggtgcggttcctggagcagcagaacaaggttctggacaccaagtggaccctgctgcaggagcagggcaccaagactgtgaggcagaacctggagccgttgttcgagcagtacatcaacaacctcaggaggcagctggacagcatcgtgggggaacggggccgcctggactcagagctgagaaacatgcaggacctggtggaagacttcaagaacaagtatgaggatgaaatcaacaagcgtaccactgctgagaatgagtttgtgatgctgaagaaggatgtagatgctgcctacatgaacaaggtggagctggaggccaaggttgatgcactgatggatgagattaacttcatgaagatgttctttgatgcggagctgtcccagatgcagacgcatgtctctgacacctcagtggtcctctccatggacaacaaccgcaacctggacctggatagcatcatcgctgaggtcaaggcccagtatgaggagattgccaaccgcagccggacagaagccgagtcctggtatcagaccaagtatgaggagctgcagcagacagctggccggcatggcgatgacctccgcaacaccaagcatgagatctctgagatgaaccggatgatccagaggctgagagccgagattgacaatgtcaagaaacagtgcgccaatctgcagaacgccattgcggatgccgagcagcgtggggagctggccctcaaggatgccaggaacaagctggccgagctggaggaggccctgcagaaggccaagcaggacatggcccggctgctgcgtgagtaccaggagctcatgaacaccaagctggccctggacgtggagatcgccacttaccgcaagctgctggagggcgaggaatgcagactcagtggagaaggagttggaccagtcaacatctctgttgtcacaagcagtgtttcctctggatatggcagtggcagtggctatggcggtggcctcggtggaggtcttggcggcggcctcggtggaggtcttgccggaggtagcagtggaagctactactccagcagcagtgggggtgtcggcctaggtggtgggctcagtgtggggggctctggcttcagtgcaagcagtggccgagggctgggggtgggctttggcagtggcgggggtagcagctccagcgtcaaatttgtctccaccacctcctcctcccggaagagcttcaagagctaagaacctgctgcaagtcactgccttccaagtgcagcaacccagcccatggagattgcctcttctaggcagttgctcaagccatgttttatccttttctggagagtagtctagaccaagccaattgcagaaccacattctttggttcccaggagagccccattcccagcccctggtctcccgtgccgcagttctatattctgcttcaaatcagccttcaggtttcccacagcatggcccctgctgacacgagaacccaaagttttcccaaatctaaatcatcaaaacagaatccccaccccaatcccaaattttgttttggttctaactacctccagaatgtgttcaataaaatgcttttataatataatcgacagctctctcgcccagcccagttctggaagggataaaaagggggcatcaccgttcctgggtaacagagccaccttctgcgtcctgctgagctctgttctctccagcacctcccaacccactagtgcctggttctcttgctccaccaggaacaagccaccatgtctcgccagtcaagtgtgtccttccggagcgggggcagtcgtagcttcagcaccgcctctgccatcaccccgtctgtctcccgcaccagcttcacctccgtgtcccggtccgggggtggcggtggtggtggcttcggcagggtcagccttgcgggtgcttgtggagtgggtggctatggcagccggagcctctacaacctggggggctccaagaggatatccatcagcactagtggtggcagcttcaggaaccggtttggtgctggtgctggaggcggctatggctttggaggtggtgccggtagtggatttggtttcggcggtggagctggtggtggctttgggctcggtggcggagctggctttggaggtggcttcggtggccctggctttcctgtctgccctcctggaggtatccaagaggtcactgtcaaccagagtctcctgactcccctcaacctgcaaatcgaccccagcatccagagggtgaggaccgaggagcgcgagcagatcaagaccctcaacaataagtttgcctccttcatcgacaaggtgcggttcctggagcagcagaacaaggttctggacaccaagtggaccctgctgcaggagcagggcaccaagactgtgaggcagaacctggagccgttgttcgagcagtacatcaacaacctcaggaggcagctggacagcatcgtgggggaacggggccgcctggactcagagctgagaaacatgcaggacctggtggaagacttcaagaacaagtatgaggatgaaatcaacaagcgtaccactgctgagaatgagtttgtgatgctgaagaaggatgtagatgctgcctacatgaacaaggtggagctggaggccaaggttgatgcactgatggatgagattaacttcatgaagatgttctttgatgcggagctgtcccagatgcagacgcatgtctctgacacctcagtggtcctctccatggacaacaaccgcaacctggacctggatagcatcatcgctgaggtcaaggcccagtatgaggagattgccaaccgcagccggacagaagccgagtcctggtatcagaccaagtatgaggagctgcagcagacagctggccggcatggcgatgacctccgcaacaccaagcatgagatctctgagatgaaccggatgatccagaggctgagagccgagattgacaatgtcaagaaacagtgcgccaatctgcagaacgccattgcggatgccgagcagcgtggggagctggccctcaaggatgccaggaacaagctggccgagctggaggaggccctgcagaaggccaagcaggacatggcccggctgctgcgtgagtaccaggagctcatgaacaccaagctggccctggacgtggagatcgccacttaccgcaagctgctggagggcgaggaatgcagactcagtggagaaggagttggaccagtcaacatctctgttgtcacaagcagtgtttcctctggatatggcagtggcagtggctatggcggtggcctcggtggaggtcttggcggcggcctcggtggaggtcttgccggaggtagcagtggaagctactactccagcagcagtgggggtgtcggcctaggtggtgggctcagtgtggggggctctggcttcagtgcaagcagtggccgagggctgggggtgggctttggcagtggcgggggtagcagctccagcgtcaaatttgtctccaccacctcctcctcccggaagagcttcaagagctaagaacctgctgcaagtcactgccttccaagtgcagcaacccagcccatggagattgcctcttctaggcagttgctcaagccatgttttatccttttctggagagtagtctagaccaagccaattgcagaaccacattctttggttcccaggagagccccattcccagcccctggtctcccgtgccgcagttctatattctgcttcaaatcagccttcaggtttcccacagcatggcccctgctgacacgagaacccaaagttttcccaaatctaaatcatcaaaacagaatccccaccccaatcccaaattttgttttggttctaactacctccagaatgtgttcaataaaatgcttttataatataatcgacagctctctcgcccagcccagttctggaagggataaaaagggggcatcaccgttcctgggtaacagagccaccttctgcgtcctgctgagctctgttctctccagcacctcccaacccactagtgcctggttctcttgctccaccaggaacaagccaccatgtctcgccagtcaagtgtgtccttccggagcgggggcagtcgtagcttcagcaccgcctctgccatcaccccgtctgtctcccgcaccagcttcacctccgtgtcccggtccgggggtggcggtggtggtggcttcggcagggtcagccttgcgggtgcttgtggagtgggtggctatggcagccggagcctctacaacctggggggctccaagaggatatccatcagcactagtggtggcagcttcaggaaccggtttggtgctggtgctggaggcggctatggctttggaggtggtgccggtagtggatttggtttcggcggtggagctggtggtggctttgggctcggtggcggagctggctttggaggtggcttcggtggccctggctttcctgtctgccctcctggaggtatccaagaggtcactgtcaaccagagtctcctgactcccctcaacctgcaaatcgaccccagcatccagagggtgaggaccgaggagcgcgagcagatcaagaccctcaacaataagtttgcctccttcatcgacaaggtgcggttcctggagcagcagaacaaggttctggacaccaagtggaccctgctgcaggagcagggcaccaagactgtgaggcagaacctggagccgttgttcgagcagtacatcaacaacctcaggaggcagctggacagcatcgtgggggaacggggccgcctggactcagagctgagaaacatgcaggacctggtggaagacttcaagaacaagtatgaggatgaaatcaacaagcgtaccactgctgagaatgagtttgtgatgctgaagaaggatgtagatgctgcctacatgaacaaggtggagctggaggccaaggttgatgcactgatggatgagattaacttcatgaagatgttctttgatgcggagctgtcccagatgcagacgcatgtctctgacacctcagtggtcctctccatggacaacaaccgcaacctggacctggatagcatcatcgctgaggtcaaggcccagtatgaggagattgccaaccgcagccggacagaagccgagtcctggtatcagaccaagtatgaggagctgcagcagacagctggccggcatggcgatgacctccgcaacaccaagcatgagatctctgagatgaaccggatgatccagaggctgagagccgagattgacaatgtcaagaaacagtgcgccaatctgcagaacgccattgcggatgccgagcagcgtggggagctggccctcaaggatgccaggaacaagctggccgagctggaggaggccctgcagaaggccaagcaggacatggcccggctgctgcgtgagtaccaggagctcatgaacaccaagctggccctggacgtggagatcgccacttaccgcaagctgctggagggcgaggaatgcagactcagtggagaaggagttggaccagtcaacatctctgttgtcacaagcagtgtttcctctggatatggcagtggcagtggctatggcggtggcctcggtggaggtcttggcggcggcctcggtggaggtcttgccggaggtagcagtggaagctactactccagcagcagtgggggtgtcggcctaggtggtgggctcagtgtggggggctctggcttcagtgcaagcagtggccgagggctgggggtgggctttggcagtggcgggggtagcagctccagcgtcaaatttgtctccaccacctcctcctcccggaagagcttcaagagctaagaacctgctgcaagtcactgccttccaagtgcagcaacccagcccatggagattgcctcttctaggcagttgctcaagccatgttttatccttttctggagagtagtctagaccaagccaattgcagaaccacattctttggttcccaggagagccccattcccagcccctggtctcccgtgccgcagttctatattctgcttcaaatcagccttcaggtttcccacagcatggcccctgctgacacgagaacccaaagttttcccaaatctaaatcatcaaaacagaatccccaccccaatcccaaattttgttttggttctaactacctccagaatgtgttcaataaaatgcttttataatataatcgacagctctctcgcccagcccagttctggaagggataaaaagggggcatcaccgttcctgggtaacagagccaccttctgcgtcctgctgagctctgttctctccagcacctcccaacccactagtgcctggttctcttgctccaccaggaacaagccaccatgtctcgccagtcaagtgtgtccttccggagcgggggcagtcgtagcttcagcaccgcctctgccatcaccccgtctgtctcccgcaccagcttcacctccgtgtcccggtccgggggtggcggtggtggtggcttcggcagggtcagccttgcgggtgcttgtggagtgggtggctatggcagccggagcctctacaacctggggggctccaagaggatatccatcagcactagtggtggcagcttcaggaaccggtttggtgctggtgctggaggcggctatggctttggaggtggtgccggtagtggatttggtttcggcggtggagctggtggtggctttgggctcggtggcggagctggctttggaggtggcttcggtggccctggctttcctgtctgccctcctggaggtatccaagaggtcactgtcaaccagagtctcctgactcccctcaacctgcaaatcgaccccagcatccagagggtgaggaccgaggagcgcgagcagatcaagaccctcaacaataagtttgcctccttcatcgacaaggtgcggttcctggagcagcagaacaaggttctggacaccaagtggaccctgctgcaggagcagggcaccaagactgtgaggcagaacctggagccgttgttcgagcagtacatcaacaacctcaggaggcagctggacagcatcgtgggggaacggggccgcctggactcagagctgagaaacatgcaggacctggtggaagacttcaagaacaagtatgaggatgaaatcaacaagcgtaccactgctgagaatgagtttgtgatgctgaagaaggatgtagatgctgcctacatgaacaaggtggagctggaggccaaggttgatgcactgatggatgagattaacttcatgaagatgttctttgatgcggagctgtcccagatgcagacgcatgtctctgacacctcagtggtcctctccatggacaacaaccgcaacctggacctggatagcatcatcgctgaggtcaaggcccagtatgaggagattgccaaccgcagccggacagaagccgagtcctggtatcagaccaagtatgaggagctgcagcagacagctggccggcatggcgatgacctccgcaacaccaagcatgagatctctgagatgaaccggatgatccagaggctgagagccgagattgacaatgtcaagaaacagtgcgccaatctgcagaacgccattgcggatgccgagcagcgtggggagctggccctcaaggatgccaggaacaagctggccgagctggaggaggccctgcagaaggccaagcaggacatggcccggctgctgcgtgagtaccaggagctcatgaacaccaagctggccctggacgtggagatcgccacttaccgcaagctgctggagggcgaggaatgcagactcagtggagaaggagttggaccagtcaacatctctgttgtcacaagcagtgtttcctctggatatggcagtggcagtggctatggcggtggcctcggtggaggtcttggcggcggcctcggtggaggtcttgccggaggtagcagtggaagctactactccagcagcagtgggggtgtcggcctaggtggtgggctcagtgtggggggctctggcttcagtgcaagcagtggccgagggctgggggtgggctttggcagtggcgggggtagcagctccagcgtcaaatttgtctccaccacctcctcctcccggaagagcttcaagagctaagaacctgctgcaagtcactgccttccaagtgcagcaacccagcccatggagattgcctcttctaggcagttgctcaagccatgttttatccttttctggagagtagtctagaccaagccaattgcagaaccacattctttggttcccaggagagccccattcccagcccctggtctcccgtgccgcagttctatattctgcttcaaatcagccttcaggtttcccacagcatggcccctgctgacacgagaacccaaagttttcccaaatctaaatcatcaaaacagaatccccaccccaatcccaaattttgttttggttctaactacctccagaatgtgttcaataaaatgcttttataatataatcgacagctctctcgcccagcccagttctggaagggataaaaagggggcatcaccgttcctgggtaacagagccaccttctgcgtcctgctgagctctgttctctccagcacctcccaacccactagtgcctggttctcttgctccaccaggaacaagccaccatgtctcgccagtcaagtgtgtccttccggagcgggggcagtcgtagcttcagcaccgcctctgccatcaccccgtctgtctcccgcaccagcttcacctccgtgtcccggtccgggggtggcggtggtggtggcttcggcagggtcagccttgcgggtgcttgtggagtgggtggctatggcagccggagcctctacaacctggggggctccaagaggatatccatcagcactagtggtggcagcttcaggaaccggtttggtgctggtgctggaggcggctatggctttggaggtggtgccggtagtggatttggtttcggcggtggagctggtggtggctttgggctcggtggcggagctggctttggaggtggcttcggtggccctggctttcctgtctgccctcctggaggtatccaagaggtcactgtcaaccagagtctcctgactcccctcaacctgcaaatcgaccccagcatccagagggtgaggaccgaggagcgcgagcagatcaagaccctcaacaataagtttgcctccttcatcgacaaggtgcggttcctggagcagcagaacaaggttctggacaccaagtggaccctgctgcaggagcagggcaccaagactgtgaggcagaacctggagccgttgttcgagcagtacatcaacaacctcaggaggcagctggacagcatcgtgggggaacggggccgcctggactcagagctgagaaacatgcaggacctggtggaagacttcaagaacaagtatgaggatgaaatcaacaagcgtaccactgctgagaatgagtttgtgatgctgaagaaggatgtagatgctgcctacatgaacaaggtggagctggaggccaaggttgatgcactgatggatgagattaacttcatgaagatgttctttgatgcggagctgtcccagatgcagacgcatgtctctgacacctcagtggtcctctccatggacaacaaccgcaacctggacctggatagcatcatcgctgaggtcaaggcccagtatgaggagattgccaaccgcagccggacagaagccgagtcctggtatcagaccaagtatgaggagctgcagcagacagctggccggcatggcgatgacctccgcaacaccaagcatgagatctctgagatgaaccggatgatccagaggctgagagccgagattgacaatgtcaagaaacagtgcgccaatctgcagaacgccattgcggatgccgagcagcgtggggagctggccctcaaggatgccaggaacaagctggccgagctggaggaggccctgcagaaggccaagcaggacatggcccggctgctgcgtgagtaccaggagctcatgaacaccaagctggccctggacgtggagatcgccacttaccgcaagctgctggagggcgaggaatgcagactcagtggagaaggagttggaccagtcaacatctctgttgtcacaagcagtgtttcctctggatatggcagtggcagtggctatggcggtggcctcggtggaggtcttggcggcggcctcggtggaggtcttgccggaggtagcagtggaagctactactccagcagcagtgggggtgtcggcctaggtggtgggctcagtgtggggggctctggcttcagtgcaagcagtggccgagggctgggggtgggctttggcagtggcgggggtagcagctccagcgtcaaatttgtctccaccacctcctcctcccggaagagcttcaagagctaagaacctgctgcaagtcactgccttccaagtgcagcaacccagcccatggagattgcctcttctaggcagttgctcaagccatgttttatccttttctggagagtagtctagaccaagccaattgcagaaccacattctttggttcccaggagagccccattcccagcccctggtctcccgtgccgcagttctatattctgcttcaaatcagccttcaggtttcccacagcatggcccctgctgacacgagaacccaaagttttcccaaatctaaatcatcaaaacagaatccccaccccaatcccaaattttgttttggttctaactacctccagaatgtgttcaataaaatgcttttataatataatcgacagctctctcgcccagcccagttctggaagggataaaaagggggcatcaccgttcctgggtaacagagccaccttctgcgtcctgctgagctctgttctctccagcacctcccaacccactagtgcctggttctcttgctccaccaggaacaagccaccatgtctcgccagtcaagtgtgtccttccggagcgggggcagtcgtagcttcagcaccgcctctgccatcaccccgtctgtctcccgcaccagcttcacctccgtgtcccggtccgggggtggcggtggtggtggcttcggcagggtcagccttgcgggtgcttgtggagtgggtggctatggcagccggagcctctacaacctggggggctccaagaggatatccatcagcactagtggtggcagcttcaggaaccggtttggtgctggtgctggaggcggctatggctttggaggtggtgccggtagtggatttggtttcggcggtggagctggtggtggctttgggctcggtggcggagctggctttggaggtggcttcggtggccctggctttcctgtctgccctcctggaggtatccaagaggtcactgtcaaccagagtctcctgactcccctcaacctgcaaatcgaccccagcatccagagggtgaggaccgaggagcgcgagcagatcaagaccctcaacaataagtttgcctccttcatcgacaaggtgcggttcctggagcagcagaacaaggttctggacaccaagtggaccctgctgcaggagcagggcaccaagactgtgaggcagaacctggagccgttgttcgagcagtacatcaacaacctcaggaggcagctggacagcatcgtgggggaacggggccgcctggactcagagctgagaaacatgcaggacctggtggaagacttcaagaacaagtatgaggatgaaatcaacaagcgtaccactgctgagaatgagtttgtgatgctgaagaaggatgtagatgctgcctacatgaacaaggtggagctggaggccaaggttgatgcactgatggatgagattaacttcatgaagatgttctttgatgcggagctgtcccagatgcagacgcatgtctctgacacctcagtggtcctctccatggacaacaaccgcaacctggacctggatagcatcatcgctgaggtcaaggcccagtatgaggagattgccaaccgcagccggacagaagccgagtcctggtatcagaccaagtatgaggagctgcagcagacagctggccggcatggcgatgacctccgcaacaccaagcatgagatctctgagatgaaccggatgatccagaggctgagagccgagattgacaatgtcaagaaacagtgcgccaatctgcagaacgccattgcggatgccgagcagcgtggggagctggccctcaaggatgccaggaacaagctggccgagctggaggaggccctgcagaaggccaagcaggacatggcccggctgctgcgtgagtaccaggagctcatgaacaccaagctggccctggacgtggagatcgccacttaccgcaagctgctggagggcgaggaatgcagactcagtggagaaggagttggaccagtcaacatctctgttgtcacaagcagtgtttcctctggatatggcagtggcagtggctatggcggtggcctcggtggaggtcttggcggcggcctcggtggaggtcttgccggaggtagcagtggaagctactactccagcagcagtgggggtgtcggcctaggtggtgggctcagtgtggggggctctggcttcagtgcaagcagtggccgagggctgggggtgggctttggcagtggcgggggtagcagctccagcgtcaaatttgtctccaccacctcctcctcccggaagagcttcaagagctaagaacctgctgcaagtcactgccttccaagtgcagcaacccagcccatggagattgcctcttctaggcagttgctcaagccatgttttatccttttctggagagtagtctagaccaagccaattgcagaaccacattctttggttcccaggagagccccattcccagcccctggtctcccgtgccgcagttctatattctgcttcaaatcagccttcaggtttcccacagcatggcccctgctgacacgagaacccaaagttttcccaaatctaaatcatcaaaacagaatccccaccccaatcccaaattttgttttggttctaactacctccagaatgtgttcaataaaatgcttttataatataatcgacagctctctcgcccagcccagttctggaagggataaaaagggggcatcaccgttcctgggtaacagagccaccttctgcgtcctgctgagctctgttctctccagcacctcccaacccactagtgcctggttctcttgctccaccaggaacaagccaccatgtctcgccagtcaagtgtgtccttccggagcgggggcagtcgtagcttcagcaccgcctctgccatcaccccgtctgtctcccgcaccagcttcacctccgtgtcccggtccgggggtggcggtggtggtggcttcggcagggtcagccttgcgggtgcttgtggagtgggtggctatggcagccggagcctctacaacctggggggctccaagaggatatccatcagcactagtggtggcagcttcaggaaccggtttggtgctggtgctggaggcggctatggctttggaggtggtgccggtagtggatttggtttcggcggtggagctggtggtggctttgggctcggtggcggagctggctttggaggtggcttcggtggccctggctttcctgtctgccctcctggaggtatccaagaggtcactgtcaaccagagtctcctgactcccctcaacctgcaaatcgaccccagcatccagagggtgaggaccgaggagcgcgagcagatcaagaccctcaacaataagtttgcctccttcatcgacaaggtgcggttcctggagcagcagaacaaggttctggacaccaagtggaccctgctgcaggagcagggcaccaagactgtgaggcagaacctggagccgttgttcgagcagtacatcaacaacctcaggaggcagctggacagcatcgtgggggaacggggccgcctggactcagagctgagaaacatgcaggacctggtggaagacttcaagaacaagtatgaggatgaaatcaacaagcgtaccactgctgagaatgagtttgtgatgctgaagaaggatgtagatgctgcctacatgaacaaggtggagctggaggccaaggttgatgcactgatggatgagattaacttcatgaagatgttctttgatgcggagctgtcccagatgcagacgcatgtctctgacacctcagtggtcctctccatggacaacaaccgcaacctggacctggatagcatcatcgctgaggtcaaggcccagtatgaggagattgccaaccgcagccggacagaagccgagtcctggtatcagaccaagtatgaggagctgcagcagacagctggccggcatggcgatgacctccgcaacaccaagcatgagatctctgagatgaaccggatgatccagaggctgagagccgagattgacaatgtcaagaaacagtgcgccaatctgcagaacgccattgcggatgccgagcagcgtggggagctggccctcaaggatgccaggaacaagctggccgagctggaggaggccctgcagaaggccaagcaggacatggcccggctgctgcgtgagtaccaggagctcatgaacaccaagctggccctggacgtggagatcgccacttaccgcaagctgctggagggcgaggaatgcagactcagtggagaaggagttggaccagtcaacatctctgttgtcacaagcagtgtttcctctggatatggcagtggcagtggctatggcggtggcctcggtggaggtcttggcggcggcctcggtggaggtcttgccggaggtagcagtggaagctactactccagcagcagtgggggtgtcggcctaggtggtgggctcagtgtggggggctctggcttcagtgcaagcagtggccgagggctgggggtgggctttggcagtggcgggggtagcagctccagcgtcaaatttgtctccaccacctcctcctcccggaagagcttcaagagctaagaacctgctgcaagtcactgccttccaagtgcagcaacccagcccatggagattgcctcttctaggcagttgctcaagccatgttttatccttttctggagagtagtctagaccaagccaattgcagaaccacattctttggttcccaggagagccccattcccagcccctggtctcccgtgccgcagttctatattctgcttcaaatcagccttcaggtttcccacagcatggcccctgctgacacgagaacccaaagttttcccaaatctaaatcatcaaaacagaatccccaccccaatcccaaattttgttttggttctaactacctccagaatgtgttcaataaaatgcttttataatataatcgacagctctctcgcccagcccagttctggaagggataaaaagggggcatcaccgttcctgggtaacagagccaccttctgcgtcctgctgagctctgttctctccagcacctcccaacccactagtgcctggttctcttgctccaccaggaacaagccaccatgtctcgccagtcaagtgtgtccttccggagcgggggcagtcgtagcttcagcaccgcctctgccatcaccccgtctgtctcccgcaccagcttcacctccgtgtcccggtccgggggtggcggtggtggtggcttcggcagggtcagccttgcgggtgcttgtggagtgggtggctatggcagccggagcctctacaacctggggggctccaagaggatatccatcagcactagtggtggcagcttcaggaaccggtttggtgctggtgctggaggcggctatggctttggaggtggtgccggtagtggatttggtttcggcggtggagctggtggtggctttgggctcggtggcggagctggctttggaggtggcttcggtggccctggctttcctgtctgccctcctggaggtatccaagaggtcactgtcaaccagagtctcctgactcccctcaacctgcaaatcgaccccagcatccagagggtgaggaccgaggagcgcgagcagatcaagaccctcaacaataagtttgcctccttcatcgacaaggtgcggttcctggagcagcagaacaaggttctggacaccaagtggaccctgctgcaggagcagggcaccaagactgtgaggcagaacctggagccgttgttcgagcagtacatcaacaacctcaggaggcagctggacagcatcgtgggggaacggggccgcctggactcagagctgagaaacatgcaggacctggtggaagacttcaagaacaagtatgaggatgaaatcaacaagcgtaccactgctgagaatgagtttgtgatgctgaagaaggatgtagatgctgcctacatgaacaaggtggagctggaggccaaggttgatgcactgatggatgagattaacttcatgaagatgttctttgatgcggagctgtcccagatgcagacgcatgtctctgacacctcagtggtcctctccatggacaacaaccgcaacctggacctggatagcatcatcgctgaggtcaaggcccagtatgaggagattgccaaccgcagccggacagaagccgagtcctggtatcagaccaagtatgaggagctgcagcagacagctggccggcatggcgatgacctccgcaacaccaagcatgagatctctgagatgaaccggatgatccagaggctgagagccgagattgacaatgtcaagaaacagtgcgccaatctgcagaacgccattgcggatgccgagcagcgtggggagctggccctcaaggatgccaggaacaagctggccgagctggaggaggccctgcagaaggccaagcaggacatggcccggctgctgcgtgagtaccaggagctcatgaacaccaagctggccctggacgtggagatcgccacttaccgcaagctgctggagggcgaggaatgcagactcagtggagaaggagttggaccagtcaacatctctgttgtcacaagcagtgtttcctctggatatggcagtggcagtggctatggcggtggcctcggtggaggtcttggcggcggcctcggtggaggtcttgccggaggtagcagtggaagctactactccagcagcagtgggggtgtcggcctaggtggtgggctcagtgtggggggctctggcttcagtgcaagcagtggccgagggctgggggtgggctttggcagtggcgggggtagcagctccagcgtcaaatttgtctccaccacctcctcctcccggaagagcttcaagagctaagaacctgctgcaagtcactgccttccaagtgcagcaacccagcccatggagattgcctcttctaggcagttgctcaagccatgttttatccttttctggagagtagtctagaccaagccaattgcagaaccacattctttggttcccaggagagccccattcccagcccctggtctcccgtgccgcagttctatattctgcttcaaatcagccttcaggtttcccacagcatggcccctgctgacacgagaacccaaagttttcccaaatctaaatcatcaaaacagaatccccaccccaatcccaaattttgttttggttctaactacctccagaatgtgttcaataaaatgcttttataatataatcgacagctctctcgcccagcccagttctggaagggataaaaagggggcatcaccgttcctgggtaacagagccaccttctgcgtcctgctgagctctgttctctccagcacctcccaacccactagtgcctggttctcttgctccaccaggaacaagccaccatgtctcgccagtcaagtgtgtccttccggagcgggggcagtcgtagcttcagcaccgcctctgccatcaccccgtctgtctcccgcaccagcttcacctccgtgtcccggtccgggggtggcggtggtggtggcttcggcagggtcagccttgcgggtgcttgtggagtgggtggctatggcagccggagcctctacaacctggggggctccaagaggatatccatcagcactagtggtggcagcttcaggaaccggtttggtgctggtgctggaggcggctatggctttggaggtggtgccggtagtggatttggtttcggcggtggagctggtggtggctttgggctcggtggcggagctggctttggaggtggcttcggtggccctggctttcctgtctgccctcctggaggtatccaagaggtcactgtcaaccagagtctcctgactcccctcaacctgcaaatcgaccccagcatccagagggtgaggaccgaggagcgcgagcagatcaagaccctcaacaataagtttgcctccttcatcgacaaggtgcggttcctggagcagcagaacaaggttctggacaccaagtggaccctgctgcaggagcagggcaccaagactgtgaggcagaacctggagccgttgttcgagcagtacatcaacaacctcaggaggcagctggacagcatcgtgggggaacggggccgcctggactcagagctgagaaacatgcaggacctggtggaagacttcaagaacaagtatgaggatgaaatcaacaagcgtaccactgctgagaatgagtttgtgatgctgaagaaggatgtagatgctgcctacatgaacaaggtggagctggaggccaaggttgatgcactgatggatgagattaacttcatgaagatgttctttgatgcggagctgtcccagatgcagacgcatgtctctgacacctcagtggtcctctccatggacaacaaccgcaacctggacctggatagcatcatcgctgaggtcaaggcccagtatgaggagattgccaaccgcagccggacagaagccgagtcctggtatcagaccaagtatgaggagctgcagcagacagctggccggcatggcgatgacctccgcaacaccaagcatgagatctctgagatgaaccggatgatccagaggctgagagccgagattgacaatgtcaagaaacagtgcgccaatctgcagaacgccattgcggatgccgagcagcgtggggagctggccctcaaggatgccaggaacaagctggccgagctggaggaggccctgcagaaggccaagcaggacatggcccggctgctgcgtgagtaccaggagctcatgaacaccaagctggccctggacgtggagatcgccacttaccgcaagctgctggagggcgaggaatgcagactcagtggagaaggagttggaccagtcaacatctctgttgtcacaagcagtgtttcctctggatatggcagtggcagtggctatggcggtggcctcggtggaggtcttggcggcggcctcggtggaggtcttgccggaggtagcagtggaagctactactccagcagcagtgggggtgtcggcctaggtggtgggctcagtgtggggggctctggcttcagtgcaagcagtggccgagggctgggggtgggctttggcagtggcgggggtagcagctccagcgtcaaatttgtctccaccacctcctcctcccggaagagcttcaagagctaagaacctgctgcaagtcactgccttccaagtgcagcaacccagcccatggagattgcctcttctaggcagttgctcaagccatgttttatccttttctggagagtagtctagaccaagccaattgcagaaccacattctttggttcccaggagagccccattcccagcccctggtctcccgtgccgcagttctatattctgcttcaaatcagccttcaggtttcccacagcatggcccctgctgacacgagaacccaaagttttcccaaatctaaatcatcaaaacagaatccccaccccaatcccaaattttgttttggttctaactacctccagaatgtgttcaataaaatgcttttataatataatcgacagctctctcgcccagcccagttctggaagggataaaaagggggcatcaccgttcctgggtaacagagccaccttctgcgtcctgctgagctctgttctctccagcacctcccaacccactagtgcctggttctcttgctccaccaggaacaagccaccatgtctcgccagtcaagtgtgtccttccggagcgggggcagtcgtagcttcagcaccgcctctgccatcaccccgtctgtctcccgcaccagcttcacctccgtgtcccggtccgggggtggcggtggtggtggcttcggcagggtcagccttgcgggtgcttgtggagtgggtggctatggcagccggagcctctacaacctggggggctccaagaggatatccatcagcactagtggtggcagcttcaggaaccggtttggtgctggtgctggaggcggctatggctttggaggtggtgccggtagtggatttggtttcggcggtggagctggtggtggctttgggctcggtggcggagctggctttggaggtggcttcggtggccctggctttcctgtctgccctcctggaggtatccaagaggtcactgtcaaccagagtctcctgactcccctcaacctgcaaatcgaccccagcatccagagggtgaggaccgaggagcgcgagcagatcaagaccctcaacaataagtttgcctccttcatcgacaaggtgcggttcctggagcagcagaacaaggttctggacaccaagtggaccctgctgcaggagcagggcaccaagactgtgaggcagaacctggagccgttgttcgagcagtacatcaacaacctcaggaggcagctggacagcatcgtgggggaacggggccgcctggactcagagctgagaaacatgcaggacctggtggaagacttcaagaacaagtatgaggatgaaatcaacaagcgtaccactgctgagaatgagtttgtgatgctgaagaaggatgtagatgctgcctacatgaacaaggtggagctggaggccaaggttgatgcactgatggatgagattaacttcatgaagatgttctttgatgcggagctgtcccagatgcagacgcatgtctctgacacctcagtggtcctctccatggacaacaaccgcaacctggacctggatagcatcatcgctgaggtcaaggcccagtatgaggagattgccaaccgcagccggacagaagccgagtcctggtatcagaccaagtatgaggagctgcagcagacagctggccggcatggcgatgacctccgcaacaccaagcatgagatctctgagatgaaccggatgatccagaggctgagagccgagattgacaatgtcaagaaacagtgcgccaatctgcagaacgccattgcggatgccgagcagcgtggggagctggccctcaaggatgccaggaacaagctggccgagctggaggaggccctgcagaaggccaagcaggacatggcccggctgctgcgtgagtaccaggagctcatgaacaccaagctggccctggacgtggagatcgccacttaccgcaagctgctggagggcgaggaatgcagactcagtggagaaggagttggaccagtcaacatctctgttgtcacaagcagtgtttcctctggatatggcagtggcagtggctatggcggtggcctcggtggaggtcttggcggcggcctcggtggaggtcttgccggaggtagcagtggaagctactactccagcagcagtgggggtgtcggcctaggtggtgggctcagtgtggggggctctggcttcagtgcaagcagtggccgagggctgggggtgggctttggcagtggcgggggtagcagctccagcgtcaaatttgtctccaccacctcctcctcccggaagagcttcaagagctaagaacctgctgcaagtcactgccttccaagtgcagcaacccagcccatggagattgcctcttctaggcagttgctcaagccatgttttatccttttctggagagtagtctagaccaagccaattgcagaaccacattctttggttcccaggagagccccattcccagcccctggtctcccgtgccgcagttctatattctgcttcaaatcagccttcaggtttcccacagcatggcccctgctgacacgagaacccaaagttttcccaaatctaaatcatcaaaacagaatccccaccccaatcccaaattttgttttggttctaactacctccagaatgtgttcaataaaatgcttttataatataatcgacagctctctcgcccagcccagttctggaagggataaaaagggggcatcaccgttcctgggtaacagagccaccttctgcgtcctgctgagctctgttctctccagcacctcccaacccactagtgcctggttctcttgctccaccaggaacaagccaccatgtctcgccagtcaagtgtgtccttccggagcgggggcagtcgtagcttcagcaccgcctctgccatcaccccgtctgtctcccgcaccagcttcacctccgtgtcccggtccgggggtggcggtggtggtggcttcggcagggtcagccttgcgggtgcttgtggagtgggtggctatggcagccggagcctctacaacctggggggctccaagaggatatccatcagcactagtggtggcagcttcaggaaccggtttggtgctggtgctggaggcggctatggctttggaggtggtgccggtagtggatttggtttcggcggtggagctggtggtggctttgggctcggtggcggagctggctttggaggtggcttcggtggccctggctttcctgtctgccctcctggaggtatccaagaggtcactgtcaaccagagtctcctgactcccctcaacctgcaaatcgaccccagcatccagagggtgaggaccgaggagcgcgagcagatcaagaccctcaacaataagtttgcctccttcatcgacaaggtgcggttcctggagcagcagaacaaggttctggacaccaagtggaccctgctgcaggagcagggcaccaagactgtgaggcagaacctggagccgttgttcgagcagtacatcaacaacctcaggaggcagctggacagcatcgtgggggaacggggccgcctggactcagagctgagaaacatgcaggacctggtggaagacttcaagaacaagtatgaggatgaaatcaacaagcgtaccactgctgagaatgagtttgtgatgctgaagaaggatgtagatgctgcctacatgaacaaggtggagctggaggccaaggttgatgcactgatggatgagattaacttcatgaagatgttctttgatgcggagctgtcccagatgcagacgcatgtctctgacacctcagtggtcctctccatggacaacaaccgcaacctggacctggatagcatcatcgctgaggtcaaggcccagtatgaggagattgccaaccgcagccggacagaagccgagtcctggtatcagaccaagtatgaggagctgcagcagacagctggccggcatggcgatgacctccgcaacaccaagcatgagatctctgagatgaaccggatgatccagaggctgagagccgagattgacaatgtcaagaaacagtgcgccaatctgcagaacgccattgcggatgccgagcagcgtggggagctggccctcaaggatgccaggaacaagctggccgagctggaggaggccctgcagaaggccaagcaggacatggcccggctgctgcgtgagtaccaggagctcatgaacaccaagctggccctggacgtggagatcgccacttaccgcaagctgctggagggcgaggaatgcagactcagtggagaaggagttggaccagtcaacatctctgttgtcacaagcagtgtttcctctggatatggcagtggcagtggctatggcggtggcctcggtggaggtcttggcggcggcctcggtggaggtcttgccggaggtagcagtggaagctactactccagcagcagtgggggtgtcggcctaggtggtgggctcagtgtggggggctctggcttcagtgcaagcagtggccgagggctgggggtgggctttggcagtggcgggggtagcagctccagcgtcaaatttgtctccaccacctcctcctcccggaagagcttcaagagctaagaacctgctgcaagtcactgccttccaagtgcagcaacccagcccatggagattgcctcttctaggcagttgctcaagccatgttttatccttttctggagagtagtctagaccaagccaattgcagaaccacattctttggttcccaggagagccccattcccagcccctggtctcccgtgccgcagttctatattctgcttcaaatcagccttcaggtttcccacagcatggcccctgctgacacgagaacccaaagttttcccaaatctaaatcatcaaaacagaatccccaccccaatcccaaattttgttttggttctaactacctccagaatgtgttcaataaaatgcttttataatataatcgacagctctctcgcccagcccagttctggaagggataaaaagggggcatcaccgttcctgggtaacagagccaccttctgcgtcctgctgagctctgttctctccagcacctcccaacccactagtgcctggttctcttgctccaccaggaacaagccaccatgtctcgccagtcaagtgtgtccttccggagcgggggcagtcgtagcttcagcaccgcctctgccatcaccccgtctgtctcccgcaccagcttcacctccgtgtcccggtccgggggtggcggtggtggtggcttcggcagggtcagccttgcgggtgcttgtggagtgggtggctatggcagccggagcctctacaacctggggggctccaagaggatatccatcagcactagtggtggcagcttcaggaaccggtttggtgctggtgctggaggcggctatggctttggaggtggtgccggtagtggatttggtttcggcggtggagctggtggtggctttgggctcggtggcggagctggctttggaggtggcttcggtggccctggctttcctgtctgccctcctggaggtatccaagaggtcactgtcaaccagagtctcctgactcccctcaacctgcaaatcgaccccagcatccagagggtgaggaccgaggagcgcgagcagatcaagaccctcaacaataagtttgcctccttcatcgacaaggtgcggttcctggagcagcagaacaaggttctggacaccaagtggaccctgctgcaggagcagggcaccaagactgtgaggcagaacctggagccgttgttcgagcagtacatcaacaacctcaggaggcagctggacagcatcgtgggggaacggggccgcctggactcagagctgagaaacatgcaggacctggtggaagacttcaagaacaagtatgaggatgaaatcaacaagcgtaccactgctgagaatgagtttgtgatgctgaagaaggatgtagatgctgcctacatgaacaaggtggagctggaggccaaggttgatgcactgatggatgagattaacttcatgaagatgttctttgatgcgga

SEQ ID NO: 661 - DNA, 32765 bp, Homo sapiens
  misc_feature (909)..(909): second gene starts at position 909
cctagcttggcgcggaatccgtgaattgcccgcggcccgagggtgcagctcccggactgactggctctgcccttccccatggacgcctcctctagcccgtggaatccaaccccggctcctgtcagcagccctcccctgctgctccccatccctgccatcgtcttcatcgctgtgggcatctatttgttgctgctgggtctagtcctgctgactaggaactgcctgctggcccagggctgctgcgcggacggtagctccccctgcaggaagcaaggttcctccgggcccccagactgctgctggacctgtgcagaagcctgcaactttcctctgcctagcccggcccacttcctggatgcttgctgcccccagcccaccagagctgactgggcacctcgctgcccccgctgctgcccactctgcgactgtgcctgtacgtgccagctccccgactgccagagcctcaactgtctctgcttcgagatcaagctccgatgaggacccagggcccctgccctctggggagcggccagcccccagggcccatgtgccctcctccctgaagagcctttccccacgccactggaaccacagatggcctgccgagcacccaggcctgggaactggaagtggcagcgcagggcctggctccctgcagggcaggactcttggccggctggacggcagctcctctggagggccagaaaagagaggggctagtgctcgggcaggtgccctggcttcccttcccctccacacgtcaacgattctatttgaagttgggcaggggggtggcgctgctcaccacacacaagtgttataggaggagtctggcccttgagtaccgggtacgcaggggtgcctcaaccacactccgtccacggactctccgttattttaggaggtccctggccaaagatttatttctcttgacaaccaagggcctccgtctggatttccaaggaagaatttcctctgaagcaccggaacttgctactaccagcaccatgccctaccaatatccagcactgaccccggagcagaagaaggagctgtctgacatcgctcaccgcatcgtggcacctggcaagggcatcctggctgcagatgagtccactgggagcattgccaagcggctgcagtccattggcaccgagaacaccgaggagaaccggcgcttctaccgccagctgctgctgacagctgacgaccgcgtgaacccctgcattgggggtgtcatcctcttccatgagacactctaccagaaggcggatgatgggcgtcccttcccccaagttatcaaatccaagggcggtgttgtgggcatcaaggtagacaagggcgtggtccccctggcagggacaaatggcgagactaccacccaagggttggatgggctgtctgagcgctgtgcccagtacaagaaggacggagctgacttcgccaagtggcgttgtgtgctgaagattggggaacacaccccctcagccctcgccatcatggaaaatgccaatgttctggcccgttatgccagtatctgccagcagaatggcattgtgcccatcgtggagcctgagatcctccctgatggggaccatgacttgaagcgctgccagtatgtgaccgagaaggtgctggctgctgtctacaaggctctgagtgaccaccacatctacctggaaggcaccttgctgaagcccaacatggtcaccccaggccatgcttgcactcagaagttttctcatgaggagattgccatggcgaccgtcacagcgctgcgccgcacagtgccccccgctgtcactgggatcaccttcctgtctggaggccagagtgaggaggaggcgtccatcaacctcaatgccattaacaagtgccccctgctgaagccctgggccctgaccttctcctacggccgagccctgcaggcctctgccctgaaggcctggggcgggaagaaggagaacctgaaggctgcgcaggaggagtatgtcaagcgagccctggccaacagccttgcctgtcaaggaaagtacactccgagcggtcaggctggggctgctgccagcgagtccctcttcgtctctaaccacgcctattaagcggaggtgttcccaggctgcccccaacactccaggccctgccccctcccactcttgaagaggaggccgcctcctcggggctccaggctggcttgcccgcgctctttcttccctcgtgacagtggtgtgtggtgtcgtctgtgaatgctaagtccatcaccctttccggcacactgccaaataaacagctatttaagggggacctagcttggcgcggaatccgtgaattgcccgcggcccgagggtgcagctcccggactgactggctctgcccttccccatggacgcctcctctagcccgtggaatccaaccccggctcctgtcagcagccctcccctgctgctccccatccctgccatcgtcttcatcgctgtgggcatctatttgttgctgctgggtctagtcctgctgactaggaactgcctgctggcccagggctgctgcgcggacggtagctccccctgcaggaagcaaggttcctccgggcccccagactgctgctggacctgtgcagaagcctgcaactttcctctgcctagcccggcccacttcctggatgcttgctgcccccagcccaccagagctgactgggcacctcgctgcccccgctgctgcccactctgcgactgtgcctgtacgtgccagctccccgactgccagagcctcaactgtctctgcttcgagatcaagctccgatgaggacccagggcccctgccctctggggagcggccagcccccagggcccatgtgccctcctccctgaagagcctttccccacgccactggaaccacagatggcctgccgagcacccaggcctgggaactggaagtggcagcgcagggcctggctccctgcagggcaggactcttggccggctggacggcagctcctctggagggccagaaaagagaggggctagtgctcgggcaggtgccctggcttcccttcccctccacacgtcaacgattctatttgaagttgggcaggggggtggcgctgctcaccacacacaagtgttataggaggagtctggcccttgagtaccgggtacgcaggggtgcctcaaccacactccgtccacggactctccgttattttaggaggtccctggccaaagatttatttctcttgacaaccaagggcctccgtctggatttccaaggaagaatttcctctgaagcaccggaacttgctactaccagcaccatgccctaccaatatccagcactgaccccggagcagaagaaggagctgtctgacatcgctcaccgcatcgtggcacctggcaagggcatcctggctgcagatgagtccactgggagcattgccaagcggctgcagtccattggcaccgagaacaccgaggagaaccggcgcttctaccgccagctgctgctgacagctgacgaccgcgtgaacccctgcattgggggtgtcatcctcttccatgagacactctaccagaaggcggatgatgggcgtcccttcccccaagttatcaaatccaagggcggtgttgtgggcatcaaggtagacaagggcgtggtccccctggcagggacaaatggcgagactaccacccaagggttggatgggctgtctgagcgctgtgcccagtacaagaaggacggagctgacttcgccaagtggcgttgtgtgctgaagattggggaacacaccccctcagccctcgccatcatggaaaatgccaatgttctggcccgttatgccagtatctgccagcagaatggcattgtgcccatcgtggagcctgagatcctccctgatggggaccatgacttgaagcgctgccagtatgtgaccgagaaggtgctggctgctgtctacaaggctctgagtgaccaccacatctacctggaaggcaccttgctgaagcccaacatggtcaccccaggccatgcttgcactcagaagttttctcatgaggagattgccatggcgaccgtcacagcgctgcgccgcacagtgccccccgctgtcactgggatcaccttcctgtctggaggccagagtgaggaggaggcgtccatcaacctcaatgccattaacaagtgccccctgctgaagccctgggccctgaccttctcctacggccgagccctgcaggcctctgccctgaaggcctggggcgggaagaaggagaacctgaaggctgcgcaggaggagtatgtcaagcgagccctggccaacagccttgcctgtcaaggaaagtacactccgagcggtcaggctggggctgctgccagcgagtccctcttcgtctctaaccacgcctattaagcggaggtgttcccaggctgcccccaacactccaggccctgccccctcccactcttgaagaggaggccgcctcctcggggctccaggctggcttgcccgcgctctttcttccctcgtgacagtggtgtgtggtgtcgtctgtgaatgctaagtccatcaccctttccggcacactgccaaataaacagctatttaagggggacctagcttggcgcggaatccgtgaattgcccgcggcccgagggtgcagctcccggactgactggctctgcccttccccatggacgcctcctctagcccgtggaatccaaccccggctcctgtcagcagccctcccctgctgctccccatccctgccatcgtcttcatcgctgtgggcatctatttgttgctgctgggtctagtcctgctgactaggaactgcctgctggcccagggctgctgcgcggacggtagctccccctgcaggaagcaaggttcctccgggcccccagactgctgctggacctgtgcagaagcctgcaactttcctctgcctagcccggcccacttcctggatgcttgctgcccccagcccaccagagctgactgggcacctcgctgcccccgctgctgcccactctgcgactgtgcctgtacgtgccagctccccgactgccagagcctcaactgtctctgcttcgagatcaagctccgatgaggacccagggcccctgccctctggggagcggccagcccccagggcccatgtgccctcctccctgaagagcctttccccacgccactggaaccacagatggcctgccgagcacccaggcctgggaactggaagtggcagcgcagggcctggctccctgcagggcaggactcttggccggctggacggcagctcctctggagggccagaaaagagaggggctagtgctcgggcaggtgccctggcttcccttcccctccacacgtcaacgattctatttgaagttgggcaggggggtggcgctgctcaccacacacaagtgttataggaggagtctggcccttgagtaccgggtacgcaggggtgcctcaaccacactccgtccacggactctccgttattttaggaggtccctggccaaagatttatttctcttgacaaccaagggcctccgtctggatttccaaggaagaatttcctctgaagcaccggaacttgctactaccagcaccatgccctaccaatatccagcactgaccccggagcagaagaaggagctgtctgacatcgctcaccgcatcgtggcacctggcaagggcatcctggctgcagatgagtccactgggagcattgccaagcggctgcagtccattggcaccgagaacaccgaggagaaccggcgcttctaccgccagctgctgctgacagctgacgaccgcgtgaacccctgcattgggggtgtcatcctcttccatgagacactctaccagaaggcggatgatgggcgtcccttcccccaagttatcaaatccaagggcggtgttgtgggcatcaaggtagacaagggcgtggtccccctggcagggacaaatggcgagactaccacccaagggttggatgggctgtctgagcgctgtgcccagtacaagaaggacggagctgacttcgccaagtggcgttgtgtgctgaagattggggaacacaccccctcagccctcgccatcatggaaaatgccaatgttctggcccgttatgccagtatctgccagcagaatggcattgtgcccatcgtggagcctgagatcctccctgatggggaccatgacttgaagcgctgccagtatgtgaccgagaaggtgctggctgctgtctacaaggctctgagtgaccaccacatctacctggaaggcaccttgctgaagcccaacatggtcaccccaggccatgcttgcactcagaagttttctcatgaggagattgccatggcgaccgtcacagcgctgcgccgcacagtgccccccgctgtcactgggatcaccttcctgtctggaggccagagtgaggaggaggcgtccatcaacctcaatgccattaacaagtgccccctgctgaagccctgggccctgaccttctcctacggccgagccctgcaggcctctgccctgaaggcctggggcgggaagaaggagaacctgaaggctgcgcaggaggagtatgtcaagcgagccctggccaacagccttgcctgtcaaggaaagtacactccgagcggtcaggctggggctgctgccagcgagtccctcttcgtctctaaccacgcctattaagcggaggtgttcccaggctgcccccaacactccaggccctgccccctcccactcttgaagaggaggccgcctcctcggggctccaggctggcttgcccgcgctctttcttccctcgtgacagtggtgtgtggtgtcgtctgtgaatgctaagtccatcaccctttccggcacactgccaaataaacagctatttaagggggacctagcttggcgcggaatccgtgaattgcccgcggcccgagggtgcagctcccggactgactggctctgcccttccccatggacgcctcctctagcccgtggaatccaaccccggctcctgtcagcagccctcccctgctgctccccatccctgccatcgtcttcatcgctgtgggcatctatttgttgctgctgggtctagtcctgctgactaggaactgcctgctggcccagggctgctgcgcggacggtagctccccctgcaggaagcaaggttcctccgggcccccagactgctgctggacctgtgcagaagcctgcaactttcctctgcctagcccggcccacttcctggatgcttgctgcccccagcccaccagagctgactgggcacctcgctgcccccgctgctgcccactctgcgactgtgcctgtacgtgccagctccccgactgccagagcctcaactgtctctgcttcgagatcaagctccgatgaggacccagggcccctgccctctggggagcggccagcccccagggcccatgtgccctcctccctgaagagcctttccccacgccactggaaccacagatggcctgccgagcacccaggcctgggaactggaagtggcagcgcagggcctggctccctgcagggcaggactcttggccggctggacggcagctcctctggagggccagaaaagagaggggctagtgctcgggcaggtgccctggcttcccttcccctccacacgtcaacgattctatttgaagttgggcaggggggtggcgctgctcaccacacacaagtgttataggaggagtctggcccttgagtaccgggtacgcaggggtgcctcaaccacactccgtccacggactctccgttattttaggaggtccctggccaaagatttatttctcttgacaaccaagggcctccgtctggatttccaaggaagaatttcctctgaagcaccggaacttgctatggtgccggtagtggatttggtttcggcggtggagctggtggtggctttgggctcggtggcggagctggctttggaggtggcttcggtggccctggctttcctgtctgccctcctggaggtatccaagaggtcactgtcaaccagagtctcctgactcccctcaacctgcaaatcgaccccagcatccagagggtgaggaccgaggagcgcgagcagatcaagaccctcaacaataagtttgcctccttcatcgacaaggtgcggttcctggagcagcagaacaaggttctggacaccaagtggaccctgctgcaggagcagggcaccaagactgtgaggcagaacctggagccgttgttcgagcagtacatcaacaacctcaggaggcagctggacagcatcgtgggggaacggggccgcctggactcagagctgagaaacatgcaggacctggtggaagacttcaagaacaagtatgaggatgaaatcaacaagcgtaccactgctgagaatgagtttgtgatgctgaagaaggatgtagatgctgcctacatgaacaaggtggagctggaggccaaggttgatgcactgatggatgagattaacttcatgaagatgttctttgatgcggagctgtcccagatgcagacgcatgtctctgacacctcagtggtcctctccatggacaacaaccgcaacctggacctggatagcatcatcgctgaggtcaaggcccagtatgaggagattgccaaccgcagccggacagaagccgagtcctggtatcagaccaagtatgaggagctgcagcagacagctggccggcatggcgatgacctccgcaacaccaagcatgagatctctgagatgaaccggatgatccagaggctgagagccgagattgacaatgtcaagaaacagtgcgccaatctgcagaacgccattgcggatgccgagcagcgtggggagctggccctcaaggatgccaggaacaagctggccgagctggaggaggccctgcagaaggccaagcaggacatggcccggctgctgcgtgagtaccaggagctcatgaacaccaagctggccctggacgtggagatcgccacttaccgcaagctgctggagggcgaggaatgcagactcagtggagaaggagttggaccagtcaacatctctgttgtcacaagcagtgtttcctctggatatggcagtggcagtggctatggcggtggcctcggtggaggtcttggcggcggcctcggtggaggtcttgccggaggtagcagtggaagctactactccagcagcagtgggggtgtcggcctaggtggtgggctcagtgtggggggctctggcttcagtgcaagcagtggccgagggctgggggtgggctttggcagtggcgggggtagcagctccagcgtcaaatttgtctccaccacctcctcctcccggaagagcttcaagagctaagaacctgctgcaagtcactgccttccaagtgcagcaacccagcccatggagattgcctcttctaggcagttgctcaagccatgttttatccttttctggagagtagtctagaccaagccaattgcagaaccacattctttggttcccaggagagccccattcccagcccctggtctcccgtgccgcagttctatattctgcttcaaatcagccttcaggtttcccacagcatggcccctgctgacacgagaacccaaagttttcccaaatctaaatcatcaaaacagaatccccaccccaatcccaaattttgttttggttctaactacctccagaatgtgttcaataaaatgcttttataatataatcgacagctctctcgcccagcccagttctggaagggataaaaagggggcatcaccgttcctgggtaacagagccaccttctgcgtcctgctgagctctgttctctccagcacctcccaacccactagtgcctggttctcttgctccaccaggaacaagccaccatgtctcgccagtcaagtgtgtccttccggagcgggggcagtcgtagcttcagcaccgcctctgccatcaccccgtctgtctcccgcaccagcttcacctccgtgtcccggtccgggggtggcggtggtggtggcttcggcagggtcagccttgcgggtgcttgtggagtgggtggctatggcagccggagcctctacaacctggggggctccaagaggatatccatcagcactagtggtggcagcttcaggaaccggtttggtgctggtgctggaggcggctatggctttggaggtggtgccggtagtggatttggtttcggcggtggagctggtggtggctttgggctcggtggcggagctggctttggaggtggcttcggtggccctggctttcctgtctgccctcctggaggtatccaagaggtcactgtcaaccagagtctcctgactcccctcaacctgcaaatcgaccccagcatccagagggtgaggaccgaggagcgcgagcagatcaagaccctcaacaataagtttgcctccttcatcgacaaggtgcggttcctggagcagcagaacaaggttctggacaccaagtggaccctgctgcaggagcagggcaccaagactgtgaggcagaacctggagccgttgttcgagcagtacatcaacaacctcaggaggcagctggacagcatcgtgggggaacggggccgcctggactcagagctgagaaacatgcaggacctggtggaagacttcaagaacaagtatgaggatgaaatcaacaagcgtaccactgctgagaatgagtttgtgatgctgaagaaggatgtagatgctgcctacatgaacaaggtggagctggaggccaaggttgatgcactgatggatgagattaacttcatgaagatgttctttgatgcggagctgtcccagatgcagacgcatgtctctgacacctcagtggtcctctccatggacaacaaccgcaacctggacctggatagcatcatcgctgaggtcaaggcccagtatgaggagattgccaaccgcagccggacagaagccgagtcctggtatcagaccaagtatgaggagctgcagcagacagctggccggcatggcgatgacctccgcaacaccaagcatgagatctctgagatgaaccggatgatccagaggctgagagccgagattgacaatgtcaagaaacagtgcgccaatctgcagaacgccattgcggatgccgagcagcgtggggagctggccctcaaggatgccaggaacaagctggccgagctggaggaggccctgcagaaggccaagcaggacatggcccggctgctgcgtgagtaccaggagctcatgaacaccaagctggccctggacgtggagatcgccacttaccgcaagctgctggagggcgaggaatgcagactcagtggagaaggagttggaccagtcaacatctctgttgtcacaagcagtgtttcctctggatatggcagtggcagtggctatggcggtggcctcggtggaggtcttggcggcggcctcggtggaggtcttgccggaggtagcagtggaagctactactccagcagcagtgggggtgtcggcctaggtggtgggctcagtgtggggggctctggcttcagtgcaagcagtggccgagggctgggggtgggctttggcagtggcgggggtagcagctccagcgtcaaatttgtctccaccacctcctcctcccggaagagcttcaagagctaagaacctgctgcaagtcactgccttccaagtgcagcaacccagcccatggagattgcctcttctaggcagttgctcaagccatgttttatccttttctggagagtagtctagaccaagccaattgcagaaccacattctttggttcccaggagagccccattcccagcccctggtctcccgtgccgcagttctatattctgcttcaaatcagccttcaggtttcccacagcatggcccctgctgacacgagaacccaaagttttcccaaatctaaatcatcaaaacagaatccccaccccaatcccaaattttgttttggttctaactacctccagaatgtgttcaataaaatgcttttataatataatcgacagctctctcgcccagcccagttctggaagggataaaaagggggcatcaccgttcctgggtaacagagccaccttctgcgtcctgctgagctctgttctctccagcacctcccaacccactagtgcctggttctcttgctccaccaggaacaagccaccatgtctcgccagtcaagtgtgtccttccggagcgggggcagtcgtagcttcagcaccgcctctgccatcaccccgtctgtctcccgcaccagcttcacctccgtgtcccggtccgggggtggcggtggtggtggcttcggcagggtcagccttgcgggtgcttgtggagtgggtggctatggcagccggagcctctacaacctggggggctccaagaggatatccatcagcactagtggtggcagcttcaggaaccggtttggtgctggtgctggaggcggctatggctttggaggtggtgccggtagtggatttggtttcggcggtggagctggtggtggctttgggctcggtggcggagctggctttggaggtggcttcggtggccctggctttcctgtctgccctcctggaggtatccaagaggtcactgtcaaccagagtctcctgactcccctcaacctgcaaatcgaccccagcatccagagggtgaggaccgaggagcgcgagcagatcaagaccctcaacaataagtttgcctccttcatcgacaaggtgcggttcctggagcagcagaacaaggttctggacaccaagtggaccctgctgcaggagcagggcaccaagactgtgaggcagaacctggagccgttgttcgagcagtacatcaacaacctcaggaggcagctggacagcatcgtgggggaacggggccgcctggactcagagctgagaaacatgcaggacctggtggaagacttcaagaacaagtatgaggatgaaatcaacaagcgtaccactgctgagaatgagtttgtgatgctgaagaaggatgtagatgctgcctacatgaacaaggtggagctggaggccaaggttgatgcactgatggatgagattaacttcatgaagatgttctttgatgcggagctgtcccagatgcagacgcatgtctctgacacctcagtggtcctctccatggacaacaaccgcaacctggacctggatagcatcatcgctgaggtcaaggcccagtatgaggagattgccaaccgcagccggacagaagccgagtcctggtatcagaccaagtatgaggagctgcagcagacagctggccggcatggcgatgacctccgcaacaccaagcatgagatctctgagatgaaccggatgatccagaggctgagagccgagattgacaatgtcaagaaacagtgcgccaatctgcagaacgccattgcggatgccgagcagcgtggggagctggccctcaaggatgccaggaacaagctggccgagctggaggaggccctgcagaaggccaagcaggacatggcccggctgctgcgtgagtaccaggagctcatgaacaccaagctggccctggacgtggagatcgccacttaccgcaagctgctggagggcgaggaatgcagactcagtggagaaggagttggaccagtcaacatctctgttgtcacaagcagtgtttcctctggatatggcagtggcagtggctatggcggtggcctcggtggaggtcttggcggcggcctcggtggaggtcttgccggaggtagcagtggaagctactactccagcagcagtgggggtgtcggcctaggtggtgggctcagtgtggggggctctggcttcagtgcaagcagtggccgagggctgggggtgggctttggcagtggcgggggtagcagctccagcgtcaaatttgtctccaccacctcctcctcccggaagagcttcaagagctaagaacctgctgcaagtcactgccttccaagtgcagcaacccagcccatggagattgcctcttctaggcagttgctcaagccatgttttatccttttctggagagtagtctagaccaagccaattgcagaaccacattctttggttcccaggagagccccattcccagcccctggtctcccgtgccgcagttctatattctgcttcaaatcagccttcaggtttcccacagcatggcccctgctgacacgagaacccaaagttttcccaaatctaaatcatcaaaacagaatccccaccccaatcccaaattttgttttggttctaactacctccagaatgtgttcaataaaatgcttttataatataatcgacagctctctcgcccagcccagttctggaagggataaaaagggggcatcaccgttcctgggtaacagagccaccttctgcgtcctgctgagctctgttctctccagcacctcccaacccactagtgcctggttctcttgctccaccaggaacaagccaccatgtctcgccagtcaagtgtgtccttccggagcgggggcagtcgtagcttcagcaccgcctctgccatcaccccgtctgtctcccgcaccagcttcacctccgtgtcccggtccgggggtggcggtggtggtggcttcggcagggtcagccttgcgggtgcttgtggagtgggtggctatggcagccggagcctctacaacctggggggctccaagaggatatccatcagcactagtggtggcagcttcaggaaccggtttggtgctggtgctggaggcggctatggctttggaggtggtgccggtagtggatttggtttcggcggtggagctggtggtggctttgggctcggtggcggagctggctttggaggtggcttcggtggccctggctttcctgtctgccctcctggaggtatccaagaggtcactgtcaaccagagtctcctgactcccctcaacctgcaaatcgaccccagcatccagagggtgaggaccgaggagcgcgagcagatcaagaccctcaacaataagtttgcctccttcatcgacaaggtgcggttcctggagcagcagaacaaggttctggacaccaagtggaccctgctgcaggagcagggcaccaagactgtgaggcagaacctggagccgttgttcgagcagtacatcaacaacctcaggaggcagctggacagcatcgtgggggaacggggccgcctggactcagagctgagaaacatgcaggacctggtggaagacttcaagaacaagtatgaggatgaaatcaacaagcgtaccactgctgagaatgagtttgtgatgctgaagaaggatgtagatgctgcctacatgaacaaggtggagctggaggccaaggttgatgcactgatggatgagattaacttcatgaagatgttctttgatgcggagctgtcccagatgcagacgcatgtctctgacacctcagtggtcctctccatggacaacaaccgcaacctggacctggatagcatcatcgctgaggtcaaggcccagtatgaggagattgccaaccgcagccggacagaagccgagtcctggtatcagaccaagtatgaggagctgcagcagacagctggccggcatggcgatgacctccgcaacaccaagcatgagatctctgagatgaaccggatgatccagaggctgagagccgagattgacaatgtcaagaaacagtgcgccaatctgcagaacgccattgcggatgccgagcagcgtggggagctggccctcaaggatgccaggaacaagctggccgagctggaggaggccctgcagaaggccaagcaggacatggcccggctgctgcgtgagtaccaggagctcatgaacaccaagctggccctggacgtggagatcgccacttaccgcaagctgctggagggcgaggaatgcagactcagtggagaaggagttggaccagtcaacatctctgttgtcacaagcagtgtttcctctggatatggcagtggcagtggctatggcggtggcctcggtggaggtcttggcggcggcctcggtggaggtcttgccggaggtagcagtggaagctactactccagcagcagtgggggtgtcggcctaggtggtgggctcagtgtggggggctctggcttcagtgcaagcagtggccgagggctgggggtgggctttggcagtggcgggggtagcagctccagcgtcaaatttgtctccaccacctcctcctcccggaagagcttcaagagctaagaacctgctgcaagtcactgccttccaagtgcagcaacccagcccatggagattgcctcttctaggcagttgctcaagccatgttttatccttttctggagagtagtctagaccaagccaattgcagaaccacattctttggttcccaggagagccccattcccagcccctggtctcccgtgccgcagttctatattctgcttcaaatcagccttcaggtttcccacagcatggcccctgctgacacgagaacccaaagttttcccaaatctaaatcatcaaaacagaatccccaccccaatcccaaattttgttttggttctaactacctccagaatgtgttcaataaaatgcttttataatataatcgacagctctctcgcccagcccagttctggaagggataaaaagggggcatcaccgttcctgggtaacagagccaccttctgcgtcctgctgagctctgttctctccagcacctcccaacccactagtgcctggttctcttgctccaccaggaacaagccaccatgtctcgccagtcaagtgtgtccttccggagcgggggcagtcgtagcttcagcaccgcctctgccatcaccccgtctgtctcccgcaccagcttcacctccgtgtcccggtccgggggtggcggtggtggtggcttcggcagggtcagccttgcgggtgcttgtggagtgggtggctatggcagccggagcctctacaacctggggggctccaagaggatatccatcagcactagtggtggcagcttcaggaaccggtttggtgctggtgctggaggcggctatggctttggaggtggtgccggtagtggatttggtttcggcggtggagctggtggtggctttgggctcggtggcggagctggctttggaggtggcttcggtggccctggctttcctgtctgccctcctggaggtatccaagaggtcactgtcaaccagagtctcctgactcccctcaacctgcaaatcgaccccagcatccagagggtgaggaccgaggagcgcgagcagatcaagaccctcaacaataagtttgcctccttcatcgacaaggtgcggttcctggagcagcagaacaaggttctggacaccaagtggaccctgctgcaggagcagggcaccaagactgtgaggcagaacctggagccgttgttcgagcagtacatcaacaacctcaggaggcagctggacagcatcgtgggggaacggggccgcctggactcagagctgagaaacatgcaggacctggtggaagacttcaagaacaagtatgaggatgaaatcaacaagcgtaccactgctgagaatgagtttgtgatgctgaagaaggatgtagatgctgcctacatgaacaaggtggagctggaggccaaggttgatgcactgatggatgagattaacttcatgaagatgttctttgatgcggagctgtcccagatgcagacgcatgtctctgacacctcagtggtcctctccatggacaacaaccgcaacctggacctggatagcatcatcgctgaggtcaaggcccagtatgaggagattgccaaccgcagccggacagaagccgagtcctggtatcagaccaagtatgaggagctgcagcagacagctggccggcatggcgatgacctccgcaacaccaagcatgagatctctgagatgaaccggatgatccagaggctgagagccgagattgacaatgtcaagaaacagtgcgccaatctgcagaacgccattgcggatgccgagcagcgtggggagctggccctcaaggatgccaggaacaagctggccgagctggaggaggccctgcagaaggccaagcaggacatggcccggctgctgcgtgagtaccaggagctcatgaacaccaagctggccctggacgtggagatcgccacttaccgcaagctgctggagggcgaggaatgcagactcagtggagaaggagttggaccagtcaacatctctgttgtcacaagcagtgtttcctctggatatggcagtggcagtggctatggcggtggcctcggtggaggtcttggcggcggcctcggtggaggtcttgccggaggtagcagtggaagctactactccagcagcagtgggggtgtcggcctaggtggtgggctcagtgtggggggctctggcttcagtgcaagcagtggccgagggctgggggtgggctttggcagtggcgggggtagcagctccagcgtcaaatttgtctccaccacctcctcctcccggaagagcttcaagagctaagaacctgctgcaagtcactgccttccaagtgcagcaacccagcccatggagattgcctcttctaggcagttgctcaagccatgttttatccttttctggagagtagtctagaccaagccaattgcagaaccacattctttggttcccaggagagccccattcccagcccctggtctcccgtgccgcagttctatattctgcttcaaatcagccttcaggtttcccacagcatggcccctgctgacacgagaacccaaagttttcccaaatctaaatcatcaaaacagaatccccaccccaatcccaaattttgttttggttctaactacctccagaatgtgttcaataaaatgcttttataatataatcgacagctctctcgcccagcccagttctggaagggataaaaagggggcatcaccgttcctgggtaacagagccaccttctgcgtcctgctgagctctgttctctccagcacctcccaacccactagtgcctggttctcttgctccaccaggaacaagccaccatgtctcgccagtcaagtgtgtccttccggagcgggggcagtcgtagcttcagcaccgcctctgccatcaccccgtctgtctcccgcaccagcttcacctccgtgtcccggtccgggggtggcggtggtggtggcttcggcagggtcagccttgcgggtgcttgtggagtgggtggctatggcagccggagcctctacaacctggggggctccaagaggatatccatcagcactagtggtggcagcttcaggaaccggtttggtgctggtgctggaggcggctatggctttggaggtggtgccggtagtggatttggtttcggcggtggagctggtggtggctttgggctcggtggcggagctggctttggaggtggcttcggtggccctggctttcctgtctgccctcctggaggtatccaagaggtcactgtcaaccagagtctcctgactcccctcaacctgcaaatcgaccccagcatccagagggtgaggaccgaggagcgcgagcagatcaagaccctcaacaataagtttgcctccttcatcgacaaggtgcggttcctggagcagcagaacaaggttctggacaccaagtggaccctgctgcaggagcagggcaccaagactgtgaggcagaacctggagccgttgttcgagcagtacatcaacaacctcaggaggcagctggacagcatcgtgggggaacggggccgcctggactcagagctgagaaacatgcaggacctggtggaagacttcaagaacaagtatgaggatgaaatcaacaagcgtaccactgctgagaatgagtttgtgatgctgaagaaggatgtagatgctgcctacatgaacaaggtggagctggaggccaaggttgatgcactgatggatgagattaacttcatgaagatgttctttgatgcggagctgtcccagatgcagacgcatgtctctgacacctcagtggtcctctccatggacaacaaccgcaacctggacctggatagcatcatcgctgaggtcaaggcccagtatgaggagattgccaaccgcagccggacagaagccgagtcctggtatcagaccaagtatgaggagctgcagcagacagctggccggcatggcgatgacctccgcaacaccaagcatgagatctctgagatgaaccggatgatccagaggctgagagccgagattgacaatgtcaagaaacagtgcgccaatctgcagaacgccattgcggatgccgagcagcgtggggagctggccctcaaggatgccaggaacaagctggccgagctggaggaggccctgcagaaggccaagcaggacatggcccggctgctgcgtgagtaccaggagctcatgaacaccaagctggccctggacgtggagatcgccacttaccgcaagctgctggagggcgaggaatgcagactcagtggagaaggagttggaccagtcaacatctctgttgtcacaagcagtgtttcctctggatatggcagtggcagtggctatggcggtggcctcggtggaggtcttggcggcggcctcggtggaggtcttgccggaggtagcagtggaagctactactccagcagcagtgggggtgtcggcctaggtggtgggctcagtgtggggggctctggcttcagtgcaagcagtggccgagggctgggggtgggctttggcagtggcgggggtagcagctccagcgtcaaatttgtctccaccacctcctcctcccggaagagcttcaagagctaagaacctgctgcaagtcactgccttccaagtgcagcaacccagcccatggagattgcctcttctaggcagttgctcaagccatgttttatccttttctggagagtagtctagaccaagccaattgcagaaccacattctttggttcccaggagagccccattcccagcccctggtctcccgtgccgcagttctatattctgcttcaaatcagccttcaggtttcccacagcatggcccctgctgacacgagaacccaaagttttcccaaatctaaatcatcaaaacagaatccccaccccaatcccaaattttgttttggttctaactacctccagaatgtgttcaataaaatgcttttataatataatcgacagctctctcgcccagcccagttctggaagggataaaaagggggcatcaccgttcctgggtaacagagccaccttctgcgtcctgctgagctctgttctctccagcacctcccaacccactagtgcctggttctcttgctccaccaggaacaagccaccatgtctcgccagtcaagtgtgtccttccggagcgggggcagtcgtagcttcagcaccgcctctgccatcaccccgtctgtctcccgcaccagcttcacctccgtgtcccggtccgggggtggcggtggtggtggcttcggcagggtcagccttgcgggtgcttgtggagtgggtggctatggcagccggagcctctacaacctggggggctccaagaggatatccatcagcactagtggtggcagcttcaggaaccggtttggtgctggtgctggaggcggctatggctttggaggtggtgccggtagtggatttggtttcggcggtggagctggtggtggctttgggctcggtggcggagctggctttggaggtggcttcggtggccctggctttcctgtctgccctcctggaggtatccaagaggtcactgtcaaccagagtctcctgactcccctcaacctgcaaatcgaccccagcatccagagggtgaggaccgaggagcgcgagcagatcaagaccctcaacaataagtttgcctccttcatcgacaaggtgcggttcctggagcagcagaacaaggttctggacaccaagtggaccctgctgcaggagcagggcaccaagactgtgaggcagaacctggagccgttgttcgagcagtacatcaacaacctcaggaggcagctggacagcatcgtgggggaacggggccgcctggactcagagctgagaaacatgcaggacctggtggaagacttcaagaacaagtatgaggatgaaatcaacaagcgtaccactgctgagaatgagtttgtgatgctgaagaaggatgtagatgctgcctacatgaacaaggtggagctggaggccaaggttgatgcactgatggatgagattaacttcatgaagatgttctttgatgcggagctgtcccagatgcagacgcatgtctctgacacctcagtggtcctctccatggacaacaaccgcaacctggacctggatagcatcatcgctgaggtcaaggcccagtatgaggagattgccaaccgcagccggacagaagccgagtcctggtatcagaccaagtatgaggagctgcagcagacagctggccggcatggcgatgacctccgcaacaccaagcatgagatctctgagatgaaccggatgatccagaggctgagagccgagattgacaatgtcaagaaacagtgcgccaatctgcagaacgccattgcggatgccgagcagcgtggggagctggccctcaaggatgccaggaacaagctggccgagctggaggaggccctgcagaaggccaagcaggacatggcccggctgctgcgtgagtaccaggagctcatgaacaccaagctggccctggacgtggagatcgccacttaccgcaagctgctggagggcgaggaatgcagactcagtggagaaggagttggaccagtcaacatctctgttgtcacaagcagtgtttcctctggatatggcagtggcagtggctatggcggtggcctcggtggaggtcttggcggcggcctcggtggaggtcttgccggaggtagcagtggaagctactactccagcagcagtgggggtgtcggcctaggtggtgggctcagtgtggggggctctggcttcagtgcaagcagtggccgagggctgggggtgggctttggcagtggcgggggtagcagctccagcgtcaaatttgtctccaccacctcctcctcccggaagagcttcaagagctaagaacctgctgcaagtcactgccttccaagtgcagcaacccagcccatggagattgcctcttctaggcagttgctcaagccatgttttatccttttctggagagtagtctagaccaagccaattgcagaaccacattctttggttcccaggagagccccattcccagcccctggtctcccgtgccgcagttctatattctgcttcaaatcagccttcaggtttcccacagcatggcccctgctgacacgagaacccaaagttttcccaaatctaaatcatcaaaacagaatccccaccccaatcccaaattttgttttggttctaactacctccagaatgtgttcaataaaatgcttttataatataatcgacagctctctcgcccagcccagttctggaagggataaaaagggggcatcaccgttcctgggtaacagagccaccttctgcgtcctgctgagctctgttctctccagcacctcccaacccactagtgcctggttctcttgctccaccaggaacaagccaccatgtctcgccagtcaagtgtgtccttccggagcgggggcagtcgtagcttcagcaccgcctctgccatcaccccgtctgtctcccgcaccagcttcacctccgtgtcccggtccgggggtggcggtggtggtggcttcggcagggtcagccttgcgggtgcttgtggagtgggtggctatggcagccggagcctctacaacctggggggctccaagaggatatccatcagcactagtggtggcagcttcaggaaccggtttggtgctggtgctggaggcggctatggctttggaggtggtgccggtagtggatttggtttcggcggtggagctggtggtggctttgggctcggtggcggagctggctttggaggtggcttcggtggccctggctttcctgtctgccctcctggaggtatccaagaggtcactgtcaaccagagtctcctgactcccctcaacctgcaaatcgaccccagcatccagagggtgaggaccgaggagcgcgagcagatcaagaccctcaacaataagtttgcctccttcatcgacaaggtgcggttcctggagcagcagaacaaggttctggacaccaagtggaccctgctgcaggagcagggcaccaagactgtgaggcagaacctggagccgttgttcgagcagtacatcaacaacctcaggaggcagctggacagcatcgtgggggaacggggccgcctggactcagagctgagaaacatgcaggacctggtggaagacttcaagaacaagtatgaggatgaaatcaacaagcgtaccactgctgagaatgagtttgtgatgctgaagaaggatgtagatgctgcctacatgaacaaggtggagctggaggccaaggttgatgcactgatggatgagattaacttcatgaagatgttctttgatgcggagctgtcccagatgcagacgcatgtctctgacacctcagtggtcctctccatggacaacaaccgcaacctggacctggatagcatcatcgctgaggtcaaggcccagtatgaggagattgccaaccgcagccggacagaagccgagtcctggtatcagaccaagtatgaggagctgcagcagacagctggccggcatggcgatgacctccgcaacaccaagcatgagatctctgagatgaaccggatgatccagaggctgagagccgagattgacaatgtcaagaaacagtgcgccaatctgcagaacgccattgcggatgccgagcagcgtggggagctggccctcaaggatgccaggaacaagctggccgagctggaggaggccctgcagaaggccaagcaggacatggcccggctgctgcgtgagtaccaggagctcatgaacaccaagctggccctggacgtggagatcgccacttaccgcaagctgctggagggcgaggaatgcagactcagtggagaaggagttggaccagtcaacatctctgttgtcacaagcagtgtttcctctggatatggcagtggcagtggctatggcggtggcctcggtggaggtcttggcggcggcctcggtggaggtcttgccggaggtagcagtggaagctactactccagcagcagtgggggtgtcggcctaggtggtgggctcagtgtggggggctctggcttcagtgcaagcagtggccgagggctgggggtgggctttggcagtggcgggggtagcagctccagcgtcaaatttgtctccaccacctcctcctcccggaagagcttcaagagctaagaacctgctgcaagtcactgccttccaagtgcagcaacccagcccatggagattgcctcttctaggcagttgctcaagccatgttttatccttttctggagagtagtctagaccaagccaattgcagaaccacattctttggttcccaggagagccccattcccagcccctggtctcccgtgccgcagttctatattctgcttcaaatcagccttcaggtttcccacagcatggcccctgctgacacgagaacccaaagttttcccaaatctaaatcatcaaaacagaatccccaccccaatcccaaattttgttttggttctaactacctccagaatgtgttcaataaaatgcttttataatataatcgacagctctctcgcccagcccagttctggaagggataaaaagggggcatcaccgttcctgggtaacagagccaccttctgcgtcctgctgagctctgttctctccagcacctcccaacccactagtgcctggttctcttgctccaccaggaacaagccaccatgtctcgccagtcaagtgtgtccttccggagcgggggcagtcgtagcttcagcaccgcctctgccatcaccccgtctgtctcccgcaccagcttcacctccgtgtcccggtccgggggtggcggtggtggtggcttcggcagggtcagccttgcgggtgcttgtggagtgggtggctatggcagccggagcctctacaacctggggggctccaagaggatatccatcagcactagtggtggcagcttcaggaaccggtttggtgctggtgctggaggcggctatggctttggaggtggtgccggtagtggatttggtttcggcggtggagctggtggtggctttgggctcggtggcggagctggctttggaggtggcttcggtggccctggctttcctgtctgccctcctggaggtatccaagaggtcactgtcaaccagagtctcctgactcccctcaacctgcaaatcgaccccagcatccagagggtgaggaccgaggagcgcgagcagatcaagaccctcaacaataagtttgcctccttcatcgacaaggtgcggttcctggagcagcagaacaaggttctggacaccaagtggaccctgctgcaggagcagggcaccaagactgtgaggcagaacctggagccgttgttcgagcagtacatcaacaacctcaggaggcagctggacagcatcgtgggggaacggggccgcctggactcagagctgagaaacatgcaggacctggtggaagacttcaagaacaagtatgaggatgaaatcaacaagcgtaccactgctgagaatgagtttgtgatgctgaagaaggatgtagatgctgcctacatgaacaaggtggagctggaggccaaggttgatgcactgatggatgagattaacttcatgaagatgttctttgatgcggagctgtcccagatgcagacgcatgtctctgacacctcagtggtcctctccatggacaacaaccgcaacctggacctggatagcatcatcgctgaggtcaaggcccagtatgaggagattgccaaccgcagccggacagaagccgagtcctggtatcagaccaagtatgaggagctgcagcagacagctggccggcatggcgatgacctccgcaacaccaagcatgagatctctgagatgaaccggatgatccagaggctgagagccgagattgacaatgtcaagaaacagtgcgccaatctgcagaacgccattgcggatgccgagcagcgtggggagctggccctcaaggatgccaggaacaagctggccgagctggaggaggccctgcagaaggccaagcaggacatggcccggctgctgcgtgagtaccaggagctcatgaacaccaagctggccctggacgtggagatcgccacttaccgcaagctgctggagggcgaggaatgcagactcagtggagaaggagttggaccagtcaacatctctgttgtcacaagcagtgtttcctctggatatggcagtggcagtggctatggcggtggcctcggtggaggtcttggcggcggcctcggtggaggtcttgccggaggtagcagtggaagctactactccagcagcagtgggggtgtcggcctaggtggtgggctcagtgtggggggctctggcttcagtgcaagcagtggccgagggctgggggtgggctttggcagtggcgggggtagcagctccagcgtcaaatttgtctccaccacctcctcctcccggaagagcttcaagagctaagaacctgctgcaagtcactgccttccaagtgcagcaacccagcccatggagattgcctcttctaggcagttgctcaagccatgttttatccttttctggagagtagtctagaccaagccaattgcagaaccacattctttggttcccaggagagccccattcccagcccctggtctcccgtgccgcagttctatattctgcttcaaatcagccttcaggtttcccacagcatggcccctgctgacacgagaacccaaagttttcccaaatctaaatcatcaaaacagaatccccaccccaatcccaaattttgttttggttctaactacctccagaatgtgttcaataaaatgcttttataatataatcgacagctctctcgcccagcccagttctggaagggataaaaagggggcatcaccgttcctgggtaacagagccaccttctgcgtcctgctgagctctgttctctccagcacctcccaacccactagtgcctggttctcttgctccaccaggaacaagccaccatgtctcgccagtcaagtgtgtccttccggagcgggggcagtcgtagcttcagcaccgcctctgccatcaccccgtctgtctcccgcaccagcttcacctccgtgtcccggtccgggggtggcggtggtggtggcttcggcagggtcagccttgcgggtgcttgtggagtgggtggctatggcagccggagcctctacaacctggggggctccaagaggatatccatcagcactagtggtggcagcttcaggaaccggtttggtgctggtgctggaggcggctatggctttggaggtggtgccggtagtggatttggtttcggcggtggagctggtggtggctttgggctcggtggcggagctggctttggaggtggcttcggtggccctggctttcctgtctgccctcctggaggtatccaagaggtcactgtcaaccagagtctcctgactcccctcaacctgcaaatcgaccccagcatccagagggtgaggaccgaggagcgcgagcagatcaagaccctcaacaataagtttgcctccttcatcgacaaggtgcggttcctggagcagcagaacaaggttctggacaccaagtggaccctgctgcaggagcagggcaccaagactgtgaggcagaacctggagccgttgttcgagcagtacatcaacaacctcaggaggcagctggacagcatcgtgggggaacggggccgcctggactcagagctgagaaacatgcaggacctggtggaagacttcaagaacaagtatgaggatgaaatcaacaagcgtaccactgctgagaatgagtttgtgatgctgaagaaggatgtagatgctgcctacatgaacaaggtggagctggaggccaaggttgatgcactgatggatgagattaacttcatgaagatgttctttgatgcggagctgtcccagatgcagacgcatgtctctgacacctcagtggtcctctccatggacaacaaccgcaacctggacctggatagcatcatcgctgaggtcaaggcccagtatgaggagattgccaaccgcagccggacagaagccgagtcctggtatcagaccaagtatgaggagctgcagcagacagctggccggcatggcgatgacctccgcaacaccaagcatgagatctctgagatgaaccggatgatccagaggctgagagccgagattgacaatgtcaagaaacagtgcgccaatctgcagaacgccattgcggatgccgagcagcgtggggagctggccctcaaggatgccaggaacaagctggccgagctggaggaggccctgcagaaggccaagcaggacatggcccggctgctgcgtgagtaccaggagctcatgaacaccaagctggccctggacgtggagatcgccacttaccgcaagctgctggagggcgaggaatgcagactcagtggagaaggagttggaccagtcaacatctctgttgtcacaagcagtgtttcctctggatatggcagtggcagtggctatggcggtggcctcggtggaggtcttggcggcggcctcggtggaggtcttgccggaggtagcagtggaagctactactccagcagcagtgggggtgtcggcctaggtggtgggctcagtgtggggggctctggcttcagtgcaagcagtggccgagggctgggggtgggctttggcagtggcgggggtagcagctccagcgtcaaatttgtctccaccacctcctcctcccggaagagcttcaagagctaagaacctgctgcaagtcactgccttccaagtgcagcaacccagcccatggagattgcctcttctaggcagttgctcaagccatgttttatccttttctggagagtagtctagaccaagccaattgcagaaccacattctttggttcccaggagagccccattcccagcccctggtctcccgtgccgcagttctatattctgcttcaaatcagccttcaggtttcccacagcatggcccctgctgacacgagaacccaaagttttcccaaatctaaatcatcaaaacagaatccccaccccaatcccaaattttgttttggttctaactacctccagaatgtgttcaataaaatgcttttataatataatcgacagctctctcgcccagcccagttctggaagggataaaaagggggcatcaccgttcctgggtaacagagccaccttctgcgtcctgctgagctctgttctctccagcacctcccaacccactagtgcctggttctcttgctccaccaggaacaagccaccatgtctcgccagtcaagtgtgtccttccggagcgggggcagtcgtagcttcagcaccgcctctgccatcaccccgtctgtctcccgcaccagcttcacctccgtgtcccggtccgggggtggcggtggtggtggcttcggcagggtcagccttgcgggtgcttgtggagtgggtggctatggcagccggagcctctacaacctggggggctccaagaggatatccatcagcactagtggtggcagcttcaggaaccggtttggtgctggtgctggaggcggctatggctttggaggtggtgccggtagtggatttggtttcggcggtggagctggtggtggctttgggctcggtggcggagctggctttggaggtggcttcggtggccctggctttcctgtctgccctcctggaggtatccaagaggtcactgtcaaccagagtctcctgactcccctcaacctgcaaatcgaccccagcatccagagggtgaggaccgaggagcgcgagcagatcaagaccctcaacaataagtttgcctccttcatcgacaaggtgcggttcctggagcagcagaacaaggttctggacaccaagtggaccctgctgcaggagcagggcaccaagactgtgaggcagaacctggagccgttgttcgagcagtacatcaacaacctcaggaggcagctggacagcatcgtgggggaacggggccgcctggactcagagctgagaaacatgcaggacctggtggaagacttcaagaacaagtatgaggatgaaatcaacaagcgtaccactgctgagaatgagtttgtgatgctgaagaaggatgtagatgctgcctacatgaacaaggtggagctggaggccaaggttgatgcactgatggatgagattaacttcatgaagatgttctttgatgcggagctgtcccagatgcagacgcatgtctctgacacctcagtggtcctctccatggacaacaaccgcaacctggacctggatagcatcatcgctgaggtcaaggcccagtatgaggagattgccaaccgcagccggacagaagccgagtcctggtatcagaccaagtatgaggagctgcagcagacagctggccggcatggcgatgacctccgcaacaccaagcatgagatctctgagatgaaccggatgatccagaggctgagagccgagattgacaatgtcaagaaacagtgcgccaatctgcagaacgccattgcggatgccgagcagcgtggggagctggccctcaaggatgccaggaacaagctggccgagctggaggaggccctgcagaaggccaagcaggacatggcccggctgctgcgtgagtaccaggagctcatgaacaccaagctggccctggacgtggagatcgccacttaccgcaagctgctggagggcgaggaatgcagactcagtggagaaggagttggaccagtcaacatctctgttgtcacaagcagtgtttcctctggatatggcagtggcagtggctatggcggtggcctcggtggaggtcttggcggcggcctcggtggaggtcttgccggaggtagcagtggaagctactactccagcagcagtgggggtgtcggcctaggtggtgggctcagtgtggggggctctggcttcagtgcaagcagtggccgagggctgggggtgggctttggcagtggcgggggtagcagctccagcgtcaaatttgtctccaccacctcctcctcccggaagagcttcaagagctaagaacctgctgcaagtcactgccttccaagtgcagcaacccagcccatggagattgcctcttctaggcagttgctcaagccatgttttatccttttctggagagtagtctagaccaagccaattgcagaaccacattctttggttcccaggagagccccattcccagcccctggtctcccgtgccgcagttctatattctgcttcaaatcagccttcaggtttcccacagcatggcccctgctgacacgagaacccaaagttttcccaaatctaaatcatcaaaacagaatccccaccccaatcccaaattttgttttggttctaactacctccagaatgtgttcaataaa

SEQ ID NO: 662 - DNA, 32765 bp, Homo sapiens
  misc_feature (869)..(869): second gene starts at position 869
atgatgttccgagaccaggtgggcatcctcgctggctggttcaaaggctggaatgagtgtgagcagacagtggccctcctgtcacttctgaaacgggtcacccgtacccaggcccgcttcctgcagctctgcctggagcactcactggcggactgcaatgacatccacctgctggagtcggaggccaacagtgctgccatcgtcagccagtggcagcaggagtccaaagagaaggtggtgtccctcctgctgtcccaccttcccctgcttcagccaggcaacacagaggccaagtcggagtacatgaggctactgcagaaagtgctggcctactcaatcgagagcaatgctttcatcgaggagagtcgccagctgctttcctatgccctcatccacccagccaccacactggaggaccgcaacgcactggccctctggctgagccacctggaagagcggttggctagtggcttccgctcccggccagagccctcctaccattcacgtcaaggctcagatgagtgggggggccctgcagagctaggccctggggaggcagggccaggctggcaggacaagccaccccgggaaaatggacacgtgcccttccacccatccagctcagtgccgccagccatcaacagtattgggagcaatgcaaacacaggtctcccctgccaaatccaccctagcccactgaagcgctccatgtcactcatccctacaagcccccaggtccctggtgagtggccgagtccagaggagcttggggcccgggctgcttttaccacgcccgatcacgcacctctctcgccccagagcagcgtggcctcctctggcagtgagcagacagaggagcagggctccacagggctccaacgagatcgagatccgcgccgagggcaacagccgcttcacctacagcgtcactgtcgatggctgcacgagtcacaccggagcctggggcaagacagtgattgaatacaaaaccaccaagacctcccgcctgcccatcatcgatgtggcccccttggacgttggtgccccagaccaggaattcggcttcgacgttggccctgtctgcttcctgtaaactccctccatcccaacctggctccctcccacccaaccaactttccccccaacccggaaacagacaagcaacccaaactgaaccccctcaaaagccaaaaaatgggagacaatttcacatggactttggaaaatatttttttcctttgcattcatctctcaaacttagtttttatctttgaccaaccgaacatgaccaaaaaccaaaagtgcattcaaccttaccaaaaaaaaaaaaaaaaaaagaataaataaataactttttaaaaaaggaagcttggtccacttgcttgaagacccatgcgggggtaagtccctttctgcccgttgggcttatgaaaccccaatgctgccctttctgctcctttctccacaccccccttggggcctcccctccactccttcccaaatctgtctccccagaagacacaggaaacaatgtattgtctgcccagcaatcaaaggcaatgctcaaacacccaagtggcccccaccctcagcccgctcctgcccgcccagcacccccaggccctgggggacctggggttctcagactgccaaagaagccttgccatctggcgctcccatggctcttgcaacatctccccttcgtttttgagggggtcatgccgggggagccaccagcccctcactgggttcggaggagagtcaggaagggccacgacaaagcagaaacatcggatttggggaacgcgtgtcaatcccttgtgccgcagggctgggcgggagagactgttctgttccttgtgtaactgtgttgctgaaagactacctcgttcttgtcttgatgtgtcaccggggcaactgcctgggggcggggatgggggcagggtggaagcggctccccattttataccaaaggtgctacatctatgtgatgggtggggtggggagggaatcactggtgctatagaaattgagatgcccccccaggccagcaaatgttcctttttgttcaaagtctatttttattccttgatatttttctttttttttttttttttttgtggatggggacttgtgaatttttctaaaggtgctatttaacatgggaggagagcgtgtgcggctccagcccagcccgctgctcactttccaccctctctccacctgcctctggcttctcaggcctctgctctccgacctctctcctctgaaaccctcctccacagctgcagcccatcctcccggctccctcctagtctgtcctgcgtcctctgtccccgggtttcagagacaacttcccaaagcacaaagcagtttttccccctaggggtgggaggaagcaaaagactctgtacctattttgtatgtgtataataatttgagatgtttttaattattttgattgctggaataaagcatgtggaaatgacccaaacataatcgtcggagcagacgggagtttctcctcggggtcggagcaggaggcacgcggagtgtgaggccacgcatgagcggacgctaaccccctccccagccacaaagagtctacatgtctagggtctagacatgttcagctttgtggacctccggctcctgctcctcttagcggccaccgccctcctgacgcacggccaagaggaaggccaagtcgagggccaagacgaagacatcccaccaatcacctgcgtacagaacggcctcaggtaccatgaccgagacgtgtggaaacccgagccctgccggatctgcgtctgcgacaacggcaaggtgttgtgcgatgacgtgatctgtgacgagaccaagaactgccccggcgccgaagtccccgagggcgagtgctgtcccgtctgccccgacggctcagagtcacccaccgaccaagaaaccaccggcgtcgagggacccaagggagacactggcccccgaggcccaaggggacccgcaggcccccctggccgagatggcatccctggacagcctggacttcccggaccccccggaccccccggacctcccggaccccctggcctcggaggaaactttgctccccagctgtcttatggctatgatgagaaatcaaccggaggaatttccgtgcctggccccatgggtccctctggtcctcgtggtctccctggcccccctggtgcacctggtccccaaggcttccaaggtccccctggtgagcctggcgagcctggagcttcaggtcccatgggtccccgaggtcccccaggtccccctggaaagaatggagatgatggggaagctggaaaacctggtcgtcctggtgagcgtgggcctcctgggcctcagggtgctcgaggattgcccggaacagctggcctccctggaatgaagggacacagaggtttcagtggtttggatggtgccaagggagatgctggtcctgctggtcctaagggtgagcctggcagccctggtgaaaatggagctcctggtcagatgggcccccgtggcctgcctggtgagagaggtcgccctggagcccctggccctgctggtgctcgtggaaatgatggtgctactggtgctgccgggccccctggtcccaccggccccgctggtcctcctggcttccctggtgctgttggtgctaagggtgaagctggtccccaagggccccgaggctctgaaggtccccagggtgtgcgtggtgagcctggcccccctggccctgctggtgctgctggccctgctggaaaccctggtgctgatggacagcctggtgctaaaggtgccaatggtgctcctggtattgctggtgctcctggcttccctggtgcccgaggcccctctggaccccagggccccggcggccctcctggtcccaagggtaacagcggtgaacctggtgctcctggcagcaaaggagacactggtgctaagggagagcctggccctgttggtgttcaaggaccccctggccctgctggagaggaaggaaagcgaggagctcgaggtgaacccggacccactggcctgcccggaccccctggcgagcgtggtggacctggtagccgtggtttccctggcgcagatggtgttgctggtcccaagggtcccgctggtgaacgtggttctcctggccctgctggccccaaaggatctcctggtgaagctggtcgtcccggtgaagctggtctgcctggtgccaagggtctgactggaagccctggcagccctggtcctgatggcaaaactggcccccctggtcccgccggtcaagatggtcgccccggacccccaggcccacctggtgcccgtggtcaggctggtgtgatgggattccctggacctaaaggtgctgctggagagcccggcaaggctggagagcgaggtgttcccggaccccctggcgctgtcggtcctgctggcaaagatggagaggctggagctcagggaccccctggccctgctggtcccgctggcgagagaggtgaacaaggccctgctggctcccccggattccagggtctccctggtcctgctggtcctccaggtgaagcaggcaaacctggtgaacagggtgttcctggagaccttggcgcccctggcccctctggagcaagaggcgagagaggtttccctggcgagcgtggtgtgcaaggtccccctggtcctgctggtccccgaggggccaacggtgctcccggcaacgatggtgctaagggtgatgctggtgcccctggagctcccggtagccagggcgcccctggccttcagggaatgcctggtgaacgtggtgcagctggtcttccagggcctaagggtgacagaggtgatgctggtcccaaaggtgctgatggctctcctggcaaagatggcgtccgtggtctgactggccccattggtcctcctggccctgctggtgcccctggtgacaagggtgaaagtggtcccagcggccctgctggtcccactggagctcgtggtgcccccggagaccgtggtgagcctggtccccccggccctgctggctttgctggcccccctggtgctgacggccaacctggtgctaaaggcgaacctggtgatgctggtgctaaaggcgatgctggtccccctggccctgccggacccgctggaccccctggccccattggtaatgttggtgctcctggagccaaaggtgctcgcggcagcgctggtccccctggtgctactggtttccctggtgctgctggccgagtcggtcctcctggcccctctggaaatgctggaccccctggccctcctggtcctgctggcaaagaaggcggcaaaggtccccgtggtgagactggccctgctggacgtcctggtgaagttggtccccctggtccccctggccctgctggcgagaaaggatcccctggtgctgatggtcctgctggtgctcctggtactcccgggcctcaaggtattgctggacagcgtggtgtggtcggcctgcctggtcagagaggagagagaggcttccctggtcttcctggcccctctggtgaacctggcaaacaaggtccctctggagcaagtggtgaacgtggtccccctggtcccatgggcccccctggattggctggaccccctggtgaatctggacgtgagggggctcctggtgccgaaggttcccctggacgagacggttctcctggcgccaagggtgaccgtggtgagaccggccccgctggaccccctggtgctcctggtgctcctggtgcccctggccccgttggccctgctggcaagagtggtgatcgtggtgagactggtcctgctggtcccaccggtcctgtcggccctgttggcgcccgtggccccgccggaccccaaggcccccgtggtgacaagggtgagacaggcgaacagggcgacagaggcataaagggtcaccgtggcttctctggcctccagggtccccctggccctcctggctctcctggtgaacaaggtccctctggagcctctggtcctgctggtccccgaggtccccctggctctgctggtgctcctggcaaagatggactcaacggtctccctggccccattgggccccctggtcctcgcggtcgcactggtgatgctggtcctgttggtccccccggccctcctggacctcctggtccccctggtcctcccagcgctggtttcgacttcagcttcctgccccagccacctcaagagaaggctcacgatggtggccgctactaccgggctgatgatgccaatgtggttcgtgaccgtgacctcgaggtggacaccaccctcaagagcctgagccagcagatcgagaacatccggagcccagagggcagccgcaagaaccccgcccgcacctgccgtgacctcaagatgtgccactctgactggaagagtggagagtactggattgaccccaaccaaggctgcaacctggatgccatcaaagtcttctgcaacatggagactggtgagacctgcgtgtaccccactcagcccagtgtggcccagaagaactggtacatcagcaagaaccccaaggacaagaggcatgtctggttcggcgagagcatgaccgatggattccagttcgagtatggcggccagggctccgaccctgccgatgtggccatccagctgaccttcctgcgcctgatgtccaccgaggcctcccagaacatcacctaccactgcaagaacagcgtggcctacatggaccagcagactggcaacctcaagaaggccctgctcctccagggctccaacgagatcgagatccgcgccgagggcaacagccgcttcacctacagcgtcactgtcgatggctgcacgagtcacaccggagcctggggcaagacagtgattgaatacaaaaccaccaagacctcccgcctgcccatcatcgatgtggcccccttggacgttggtgccccagaccaggaattcggcttcgacgttggccctgtctgcttcctgtaaactccctccatcccaacctggctccctcccacccaaccaactttccccccaacccggaaacagacaagcaacccaaactgaaccccctcaaaagccaaaaaatgggagacaatttcacatggactttggaaaatatttttttcctttgcattcatctctcaaacttagtttttatctttgaccaaccgaacatgaccaaaaaccaaaagtgcattcaaccttaccaaaaaaaaaaaaaaaaaaagaataaataaataactttttaaaaaaggaagcttggtccacttgcttgaagacccatgcgggggtaagtccctttctgcccgttgggcttatgaaaccccaatgctgccctttctgctcctttctccacaccccccttggggcctcccctccactccttcccaaatctgtctccccagaagacacaggaaacaatgtattgtctgcccagcaatcaaaggcaatgctcaaacacccaagtggcccccaccctcagcccgctcctgcccgcccagcacccccaggccctgggggacctggggttctcagactgccaaagaagccttgccatctggcgctcccatggctcttgcaacatctccccttcgtttttgagggggtcatgccgggggagccaccagcccctcactgggttcggaggagagtcaggaagggccacgacaaagcagaaacatcggatttggggaacgcgtgtcaatcccttgtgccgcagggctgggcgggagagactgttctgttccttgtgtaactgtgttgctgaaagactacctcgttcttgtcttgatgtgtcaccggggcaactgcctgggggcggggatgggggcagggtggaagcggctccccattttataccaaaggtgctacatctatgtgatgggtggggtggggagggaatcactggtgctatagaaattgagatgcccccccaggccagcaaatgttcctttttgttcaaagtctatttttattccttgatatttttctttttttttttttttttttgtggatggggacttgtgaatttttctaaaggtgctatttaacatgggaggagagcgtgtgcggctccagcccagcccgctgctcactttccaccctctctccacctgcctctggcttctcaggcctctgctctccgacctctctcctctgaaaccctcctccacagctgcagcccatcctcccggctccctcctagtctgtcctgcgtcctctgtccccgggtttcagagacaacttcccaaagcacaaagcagtttttccccctaggggtgggaggaagcaaaagactctgtacctattttgtatgtgtataataatttgagatgtttttaattattttgattgctggaataaagcatgtggaaatgacccaaacataatcgtcggagcagacgggagtttctcctcggggtcggagcaggaggcacgcggagtgtgaggccacgcatgagcggacgctaaccccctccccagccacaaagagtctacatgtctagggtctagacatgttcagctttgtggacctccggctcctgctcctcttagcggccaccgccctcctgacgcacggccaagaggaaggccaagtcgagggccaagacgaagacatcccaccaatcacctgcgtacagaacggcctcaggtaccatgaccgagacgtgtggaaacccgagccctgccggatctgcgtctgcgacaacggcaaggtgttgtgcgatgacgtgatctgtgacgagaccaagaactgccccggcgccgaagtccccgagggcgagtgctgtcccgtctgccccgacggctcagagtcacccaccgaccaagaaaccaccggcgtcgagggacccaagggagacactggcccccgaggcccaaggggacccgcaggcccccctggccgagatggcatccctggacagcctggacttcccggaccccccggaccccccggacctcccggaccccctggcctcggaggaaactttgctccccagctgtcttatggctatgatgagaaatcaaccggaggaatttccgtgcctggccccatgggtccctctggtcctcgtggtctccctggcccccctggtgcacctggtccccaaggcttccaaggtccccctggtgagcctggcgagcctggagcttcaggtcccatgggtccccgaggtcccccaggtccccctggaaagaatggagatgatggggaagctggaaaacctggtcgtcctggtgagcgtgggcctcctgggcctcagggtgctcgaggattgcccggaacagctggcctccctggaatgaagggacacagaggtttcagtggtttggatggtgccaagggagatgctggtcctgctggtcctaagggtgagcctggcagccctggtgaaaatggagctcctggtcagatgggcccccgtggcctgcctggtgagagaggtcgccctggagcccctggccctgctggtgctcgtggaaatgatggtgctactggtgctgccgggccccctggtcccaccggccccgctggtcctcctggcttccctggtgctgttggtgctaagggtgaagctggtccccaagggccccgaggctctgaaggtccccagggtgtgcgtggtgagcctggcccccctggccctgctggtgctgctggccctgctggaaaccctggtgctgatggacagcctggtgctaaaggtgccaatggtgctcctggtattgctggtgctcctggcttccctggtgcccgaggcccctctggaccccagggccccggcggccctcctggtcccaagggtaacagcggtgaacctggtgctcctggcagcaaaggagacactggtgctaagggagagcctggccctgttggtgttcaaggaccccctggccctgctggagaggaaggaaagcgaggagctcgaggtgaacccggacccactggcctgcccggaccccctggcgagcgtggtggacctggtagccgtggtttccctggcgcagatggtgttgctggtcccaagggtcccgctggtgaacgtggttctcctggccctgctggccccaaaggatctcctggtgaagctggtcgtcccggtgaagctggtctgcctggtgccaagggtctgactggaagccctggcagccctggtcctgatggcaaaactggcccccctggtcccgccggtcaagatggtcgccccggacccccaggcccacctggtgcccgtggtcaggctggtgtgatgggattccctggacctaaaggtgctgctggagagcccggcaaggctggagagcgaggtgttcccggaccccctggcgctgtcggtcctgctggcaaagatggagaggctggagctcagggaccccctggccctgctggtcccgctggcgagagaggtgaacaaggccctgctggctcccccggattccagggtctccctggtcctgctggtcctccaggtgaagcaggcaaacctggtgaacagggtgttcctggagaccttggcgcccctggcccctctggagcaagaggcgagagaggtttccctggcgagcgtggtgtgcaaggtccccctggtcctgctggtccccgaggggccaacggtgctcccggcaacgatggtgctaagggtgatgctggtgcccctggagctcccggtagccagggcgcccctggccttcagggaatgcctggtgaacgtggtgcagctggtcttccagggcctaagggtgacagaggtgatgctggtcccaaaggtgctgatggctctcctggcaaagatggcgtccgtggtctgactggccccattggtcctcctggccctgctggtgcccctggtgacaagggtgaaagtggtcccagcggccctgctggtcccactggagctcgtggtgcccccggagaccgtggtgagcctggtccccccggccctgctggctttgctggcccccctggtgctgacggccaacctggtgctaaaggcgaacctggtgatgctggtgctaaaggcgatgctggtccccctggccctgccggacccgctggaccccctggccccattggtaatgttggtgctcctggagccaaaggtgctcgcggcagcgctggtccccctggtgctactggtttccctggtgctgctggccgagtcggtcctcctggcccctctggaaatgctggaccccctggccctcctggtcctgctggcaaagaaggcggcaaaggtccccgtggtgagactggccctgctggacgtcctggtgaagttggtccccctggtccccctggccctgctggcgagaaaggatcccctggtgctgatggtcctgctggtgctcctggtactcccgggcctcaaggtattgctggacagcgtggtgtggtcggcctgcctggtcagagaggagagagaggcttccctggtcttcctggcccctctggtgaacctggcaaacaaggtccctctggagcaagtggtgaacgtggtccccctggtcccatgggcccccctggattggctggaccccctggtgaatctggacgtgagggggctcctggtgccgaaggttcccctggacgagacggttctcctggcgccaagggtgaccgtggtgagaccggccccgctggaccccctggtgctcctggtgctcctggtgcccctggccccgttggccctgctggcaagagtggtgatcgtggtgagactggtcctgctggtcccaccggtcctgtcggccctgttggcgcccgtggccccgccggaccccaaggcccccgtggtgacaagggtgagacaggcgaacagggcgacagaggcataaagggtcaccgtggcttctctggcctccagggtccccctggccctcctggctctcctggtgaacaaggtccctctggagcctctggtcctgctggtccccgaggtccccctggctctgctggtgctcctggcaaagatggactcaacggtctccctggccccattgggccccctggtcctcgcggtcgcactggtgatgctggtcctgttggtccccccggccctcctggacctcctggtccccctggtcctcccagcgctggtttcgacttcagcttcctgccccagccacctcaagagaaggctcacgatggtggccgctactaccgggctgatgatgccaatgtggttcgtgaccgtgacctcgaggtggacaccaccctcaagagcctgagccagcagatcgagaacatccggagcccagagggcagccgcaagaaccccgcccgcacctgccgtgacctcaagatgtgccactctgactggaagagtggagagtactggattgaccccaaccaaggctgcaacctggatgccatcaaagtcttctgcaacatggagactggtgagacctgcgtgtaccccactcagcccagtgtggcccagaagaactggtacatcagcaagaaccccaaggacaagaggcatgtctggttcggcgagagcatgaccgatggattccagttcgagtatggcggccagggctccgaccctgccgatgtggccatccagctgaccttcctgcgcctgatgtccaccgaggcctcccagaacatcacctaccactgcaagaacagcgtggcctacatggaccagcagactggcaacctcaagaaggccctgctcctccagggctccaacgagatcgagatccgcgccgagggcaacagccgcttcacctacagcgtcactgtcgatggctgcacgagtcacaccggagcctggggcaagacagtgattgaatacaaaaccaccaagacctcccgcctgcccatcatcgatgtggcccccttggacgttggtgccccagaccaggaattcggcttcgacgttggccctgtctgcttcctgtaaactccctccatcccaacctggctccctcccacccaaccaactttccccccaacccggaaacagacaagcaacccaaactgaaccccctcaaaagccaaaaaatgggagacaatttcacatggactttggaaaatatttttttcctttgcattcatctctcaaacttagtttttatctttgaccaaccgaacatgaccaaaaaccaaaagtgcattcaaccttaccaaaaaaaaaaaaaaaaaaagaataaataaataactttttaaaaaaggaagcttggtccacttgcttgaagacccatgcgggggtaagtccctttctgcccgttgggcttatgaaaccccaatgctgccctttctgctcctttctccacaccccccttggggcctcccctccactccttcccaaatctgtctccccagaagacacaggaaacaatgtattgtctgcccagcaatcaaaggcaatgctcaaacacccaagtggcccccaccctcagcccgctcctgcccgcccagcacccccaggccctgggggacctggggttctcagactgccaaagaagccttgccatctggcgctcccatggctcttgcaacatctccccttcgtttttgagggggtcatgccgggggagccaccagcccctcactgggttcggaggagagtcaggaagggccacgacaaagcagaaacatcggatttggggaacgcgtgtcaatcccttgtgccgcagggctgggcgggagagactgttctgttccttgtgtaactgtgttgctgaaagactacctcgttcttgtcttgatgtgtcaccggggcaactgcctgggggcggggatgggggcagggtggaagcggctccccattttataccaaaggtgctacatctatgtgatgggtggggtggggagggaatcactggtgctatagaaattgagatgcccccccaggccagcaaatgttcctttttgttcaaagtctatttttattccttgatatttttctttttttttttttttttttgtggatggggacttgtgaatttttctaaaggtgctatttaacatgggaggagagcgtgtgcggctccagcccagcccgctgctcactttccaccctctctccacctgcctctggcttctcaggcctctgctctccgacctctctcctctgaaaccctcctccacagctgcagcccatcctcccggctccctcctagtctgtcctgcgtcctctgtccccgggtttcagagacaacttcccaaagcacaaagcagtttttccccctaggggtgggaggaagcaaaagactctgtacctattttgtatgtgtataataatttgagatgtttttaattattttgattgctggaataaagcatgtggaaatgacccaaacataatcgtcggagcagacgggagtttctcctcggggtcggagcaggaggcacgcggagtgtgaggccacgcatgagcggacgctaaccccctccccagccacaaagagtctacatgtctagggtctagacatgttcagctttgtggacctccggctcctgctcctcttagcggccaccgccctcctgacgcacggccaagaggaaggccaagtcgagggccaagacgaagacatcccaccaatcacctgcgtacagaacggcctcaggtaccatgaccgagacgtgtggaaacccgagccctgccggatctgcgtctgcgacaacggcaaggtgttgtgcgatgacgtgatctgtgacgagaccaagaactgccccggcgccgaagtccccgagggcgagtgctgtcccgtctgccccgacggctcagagtcacccaccgaccaagaaaccaccggcgtcgagggacccaagggagacactggcccccgaggcccaaggggacccgcaggcccccctggccgagatggcatccctggacagcctggacttcccggaccccccggaccccccggacctcccggaccccctggcctcggaggaaactttgctccccagctgtcttatggctatgatgagaaatcaaccggaggaatttccgtgcctggccccatgggtccctctggtcctcgtggtctccctggcccccctggtgcacctggtccccaaggcttccaaggtccccctggtgagcctggcgagcctggagcttcaggtcccatgggtccccgaggtcccccaggtccccctggaaagaatggagatgatggggaagctggaaaacctggtcgtcctggtgagcgtgggcctcctgggcctcagggtgctcgaggattgcccggaacagctggcctccctggaatgaagggacacagaggtttcagtggtttggatggtgccaagggagatgctggtcctgctggtcctaagggtgagcctggcagccctggtgaaaatggagctcctggtcagatgggcccccgtggcctgcctggtgagagaggtcgccctggagcccctggccctgctggtgctcgtggaaatgatggtgctactggtgctgccgggccccctggtcccaccggccccgctggtcctcctggcttccctggtgctgttggtgctaagggtgaagctggtccccaagggccccgaggctctgaaggtccccagggtgtgcgtggtgagcctggcccccctggccctgctggtgctgctggccctgctggaaaccctggtgctgatggacagcctggtgctaaaggtgccaatggtgctcctggtattgctggtgctcctggcttccctggtgcccgaggcccctctggaccccagggccccggcggccctcctggtcccaagggtaacagcggtgaacctggtgctcctggcagcaaaggagacactggtgctaagggagagcctggccctgttggtgttcaaggaccccctggccctgctggagaggaaggaaagcgaggagctcgaggtgaacccggacccactggcctgcccggaccccctggcgagcgtggtggacctggtagccgtggtttccctggcgcagatggtgttgctggtcccaagggtcccgctggtgaacgtggttctcctggccctgctggccccaaaggatctcctggtgaagctggtcgtcccggtgaagctggtctgcctggtgccaagggtctgactggaagccctggcagccctggtcctgatggcaaaactggcccccctggtcccgccggtcaagatggtcgccccggacccccaggcccacctggtgcccgtggtcaggctggtgtgatgggattccctggacctaaaggtgctgctggagagcccggcaaggctggagagcgaggtgttcccggaccccctggcgctgtcggtcctgctggcaaagatggagaggctggagctcagggaccccctggccctgctggtcccgctggcgagagaggtgaacaaggccctgctggctcccccggattccagggtctccctggtcctgctggtcctccaggtgaagcaggcaaacctggtgaacagggtgttcctggagaccttggcgcccctggcccctctggagcaagaggcgagagaggtttccctggcgagcgtggtgtgcaaggtccccctggtcctgctggtccccgaggggccaacggtgctcccggcaacgatggtgctaagggtgatgctggtgcccctggagctcccggtagccagggcgcccctggccttcagggaatgcctggtgaacgtggtgcagctggtcttccagggcctaagggtgacagaggtgatgctggtcccaaaggtgctgatggctctcctggcaaagatggcgtccgtggtctgactggccccattggtcctcctggccctgctggtgcccctggtgacaagggtgaaagtggtcccagcggccctgctggtcccactggagctcgtggtgcccccggagaccgtggtgagcctggtccccccggccctgctggctttgctggcccccctggtgctgacggccaacctggtgctaaaggcgaacctggtgatgctggtgctaaaggcgatgctggtccccctggccctgccggacccgctggaccccctggccccattggtaatgttggtgctcctggagccaaaggtgctcgcggcagcgctggtccccctggtgctactggtttccctggtgctgctggccgagtcggtcctcctggcccctctggaaatgctggaccccctggccctcctggtcctgctggcaaagaaggcggcaaaggtccccgtggtgagactggccctgctggacgtcctggtgaagttggtccccctggtccccctggccctgctggcgagaaaggatcccctggtgctgatggtcctgctggtgctcctggtactcccgggcctcaaggtattgctggacagcgtggtgtggtcggcctgcctggtcagagaggagagagaggcttccctggtcttcctggcccctctggtgaacctggcaaacaaggtccctctggagcaagtggtgaacgtggtccccctggtcccatgggcccccctggattggctggaccccctggtgaatctggacgtgagggggctcctggtgccgaaggttcccctggacgagacggttctcctggcgccaagggtgaccgtggtgagaccggccccgctggaccccctggtgctcctggtgctcctggtgcccctggccccgttggccctgctggcaagagtggtgatcgtggtgagactggtcctgctggtcccaccggtcctgtcggccctgttggcgcccgtggccccgccggaccccaaggcccccgtggtgacaagggtgagacaggcgaacagggcgacagaggcataaagggtcaccgtggcttctctggcctccagggtccccctggccctcctggctctcctggtgaacaaggtccctctggagcctctggtcctgctggtccccgaggtccccctggctctgctggtgctcctggcaaagatggactcaacggtctccctggccccattgggccccctggtcctcgcggtcgcactggtgatgctggtcctgttggtccccccggccctcctggacctcctggtccccctggtcctcccagcgctggtttcgacttcagcttcctgccccagccacctcaagagaaggctcacgatggtggccgctactaccgggctgatgatgccaatgtggttcgtgaccgtgacctcgaggtggacaccaccctcaagagcctgagccagcagatcgagaacatccggagcccagagggcagccgcaagaaccccgcccgcacctgccgtgacctcaagatgtgccactctgactggaagagtggagagtactggattgaccccaaccaaggctgcaacctggatgccatcaaagtcttctgcaacatggagactggtgagacctgcgtgtaccccactcagcccagtgtggcccagaagaactggtacatcagcaagaaccccaaggacaagaggcatgtctggttcggcgagagcatgaccgatggattccagttcgagtatggcggccagggctccgaccctgccgatgtggccatccagctgaccttcctgcgcctgatgtccaccgaggcctcccagaacatcacctaccactgcaagaacagcgtggcctacatggaccagcagactggcaacctcaagaaggccctgctcctccagggctccaacgagatcgagatccgcgccgagggcaacagccgcttcacctacagcgtcactgtcgatggctgcacgagtcacaccggagcctggggcaagacagtgattgaatacaaaaccaccaagacctcccgcctgcccatcatcgatgtggcccccttggacgttggtgccccagaccaggaattcggcttcgacgttggccctgtctgcttcctgtaaactccctccatcccaacctggctccctcccacccaaccaactttccccccaacccggaaacagacaagcaacccaaactgaaccccctcaaaagccaaaaaatgggagacaatttcacatggactttggaaaatatttttttcctttgcattcatctctcaaacttagtttttatctttgaccaaccgaacatgaccaaaaaccaaaagtgcattcaaccttaccaaaaaaaaaaaaaaaaaaagaataaataaataactttttaaaaaaggaagcttggtccacttgcttgaagacccatgcgggggtaagtccctttctgcccgttgggcttatgaaaccccaatgctgccctttctgctcctttctccacaccccccttggggcctcccctccactccttcccaaatctgtctccccagaagacacaggaaacaatgtattgtctgcccagcaatcaaaggcaatgctcaaacacccaagtggcccccaccctcagcccgctcctgcccgcccagcacccccaggccctgggggacctggggttctcagactgccaaagaagccttgccatctggcgctcccatggctcttgcaacatctccccttcgtttttgagggggtcatgccgggggagccaccagcccctcactgggttcggaggagagtcaggaagggccacgacaaagcagaaacatcggatttggggaacgcgtgtcaatcccttgtgccgcagggctgggcgggagagactgttctgttccttgtgtaactgtgttgctgaaagactacctcgttcttgtcttgatgtgtcaccggggcaactgcctgggggcggggatgggggcagggtggaagcggctccccattttataccaaaggtgctacatctatgtgatgggtggggtggggagggaatcactggtgctatagaaattgagatgcccccccaggccagcaaatgttcctttttgttcaaagtctatttttattccttgatatttttctttttttttttttttttttgtggatggggacttgtgaatttttctaaaggtgctatttaacatgggaggagagcgtgtgcggctccagcccagcccgctgctcactttccaccctctctccacctgcctctggcttctcaggcctctgctctccgacctctctcctctgaaaccctcctccacagctgcagcccatcctcccggctccctcctagtctgtcctgcgtcctctgtccccgggtttcagagacaacttcccaaagcacaaagcagtttttccccctaggggtgggaggaagcaaaagactctgtacctattttgtatgtgtataataatttgagatgtttttaattattttgattgctggaataaagcatgtggaaatgacccaaacataatcgtcggagcagacgggagtttctcctcggggtcggagcaggaggcacgcggagtgtgaggccacgcatgagcggacgctaaccccctccccagccacaaagagtctacatgtctagggtctagacatgttcagctttgtggacctccggctcctgctcctcttagcggccaccgccctcctgacgcacggccaagaggaaggccaagtcgagggccaagacgaagacatcccaccaatcacctgcgtacagaacggcctcaggtaccatgaccgagacgtgtggaaacccgagccctgccggatctgcgtctgcgacaacggcaaggtgttgtgcgatgacgtgatctgtgacgagaccaagaactgccccggcgccgaagtccccgagggcgagtgctgtcccgtctgccccgacggctcagagtcacccaccgaccaagaaaccaccggcgtcgagggacccaagggagacactggcccccgaggcccaaggggacccgcaggcccccctggccgagatggcatccctggacagcctggacttcccggaccccccggaccccccggacctcccggaccccctggcctcggaggaaactttgctccccagctgtcttatggctatgatgagaaatcaaccggaggaatttccgtgcctggccccatgggtccctctggtcctcgtggtctccctggcccccctggtgcacctggtccccaaggcttccaaggtccccctggtgagcctggcgagcctggagcttcaggtcccatgggtccccgaggtcccccaggtccccctggaaagaatggagatgatggggaagctggaaaacctggtcgtcctggtgagcgtgggcctcctgggcctcagggtgctcgaggattgcccggaacagctggcctccctggaatgaagggacacagaggtttcagtggtttggatggtgccaagggagatgctggtcctgctggtcctaagggtgagcctggcagccctggtgaaaatggagctcctggtcagatgggcccccgtggcctgcctggtgagagaggtcgccctggagcccctggccctgctggtgctcgtggaaatgatggtgctactggtgctgccgggccccctggtcccaccggccccgctggtcctcctggcttccctggtgctgttggtgctaagggtgaagctggtccccaagggccccgaggctctgaaggtccccagggtgtgcgtggtgagcctggcccccctggccctgctggtgctgctggccctgctggaaaccctggtgctgatggacagcctggtgctaaaggtgccaatggtgctcctggtattgctggtgctcctggcttccctggtgcccgaggcccctctggaccccagggccccggcggccctcctggtcccaagggtaacagcggtgaacctggtgctcctggcagcaaaggagacactggtgctaagggagagcctggccctgttggtgttcaaggaccccctggccctgctggagaggaaggaaagcgaggagctcgaggtgaacccggacccactggcctgcccggaccccctggcgagcgtggtggacctggtagccgtggtttccctggcgcagatggtgttgctggtcccaagggtcccgctggtgaacgtggttctcctggccctgctggccccaaaggatctcctggtgaagctggtcgtcccggtgaagctggtctgcctggtgccaagggtctgactggaagccctggcagccctggtcctgatggcaaaactggcccccctggtcccgccggtcaagatggtcgccccggacccccaggcccacctggtgcccgtggtcaggctggtgtgatgggattccctggacctaaaggtgctgctggagagcccggcaaggctggagagcgaggtgttcccggaccccctggcgctgtcggtcctgctggcaaagatggagaggctggagctcagggaccccctggccctgctggtcccgctggcgagagaggtgaacaaggccctgctggctcccccggattccagggtctccctggtcctgctggtcctccaggtgaagcaggcaaacctggtgaacagggtgttcctggagaccttggcgcccctggcccctctggagcaagaggcgagagaggtttccctggcgagcgtggtgtgcaaggtccccctggtcctgctggtccccgaggggccaacggtgctcccggcaacgatggtgctaagggtgatgctggtgcccctggagctcccggtagccagggcgcccctggccttcagggaatgcctggtgaacgtggtgcagctggtcttccagggcctaagggtgacagaggtgatgctggtcccaaaggtgctgatggctctcctggcaaagatggcgtccgtggtctgactggccccattggtcctcctggccctgctggtgcccctggtgacaagggtgaaagtggtcccagcggccctgctggtcccactggagctcgtggtgcccccggagaccgtggtgagcctggtccccccggccctgctggctttgctggcccccctggtgctgacggccaacctggtgctaaaggcgaacctggtgatgctggtgctaaaggcgatgctggtccccctggccctgccggacccgctggaccccctggccccattggtaatgttggtgctcctggagccaaaggtgctcgcggcagcgctggtccccctggtgctactggtttccctggtgctgctggccgagtcggtcctcctggcccctctggaaatgctggaccccctggccctcctggtcctgctggcaaagaaggcggcaaaggtccccgtggtgagactggccctgctggacgtcctggtgaagttggtccccctggtccccctggccctgctggcgagaaaggatcccctggtgctgatggtcctgctggtgctcctggtactcccgggcctcaaggtattgctggacagcgtggtgtggtcggcctgcctggtcagagaggagagagaggcttccctggtcttcctggcccctctggtgaacctggcaaacaaggtccctctggagcaagtggtgaacgtggtccccctggtcccatgggcccccctggattggctggaccccctggtgaatctggacgtgagggggctcctggtgccgaaggttcccctggacgagacggttctcctggcgccaagggtgaccgtggtgagaccggccccgctggaccccctggtgctcctggtgctcctggtgcccctggccccgttggccctgctggcaagagtggtgatcgtggtgagactggtcctgctggtcccaccggtcctgtcggccctgttggcgcccgtggccccgccggaccccaaggcccccgtggtgacaagggtgagacaggcgaacagggcgacagaggcataaagggtcaccgtggcttctctggcctccagggtccccctggccctcctggctctcctggtgaacaaggtccctctggagcctctggtcctgctggtccccgaggtccccctggctctgctggtgctcctggcaaagatggactcaacggtctccctggccccattgggccccctggtcctcgcggtcgcactggtgatgctggtcctgttggtccccccggccctcctggacctcctggtccccctggtcctcccagcgctggtttcgacttcagcttcctgccccagccacctcaagagaaggctcacgatggtggccgctactaccgggctgatgatgccaatgtggttcgtgaccgtgacctcgaggtggacaccaccctcaagagcctgagccagcagatcgagaacatccggagcccagagggcagccgcaagaaccccgcccgcacctgccgtgacctcaagatgtgccactctgactggaagagtggagagtactggattgaccccaaccaaggctgcaacctggatgccatcaaagtcttctgcaacatggagactggtgagacctgcgtgtaccccactcagcccagtgtggcccagaagaactggtacatcagcaagaaccccaaggacaagaggcatgtctggttcggcgagagcatgaccgatggattccagttcgagtatggcggccagggctccgaccctgccgatgtggccatccagctgaccttcctgcgcctgatgtccaccgaggcctcccagaacatcacctaccactgcaagaacagcgtggcctacatggaccagcagactggcaacctcaagaaggccctgctcctccagggctccaacgagatcgagatccgcgccgagggcaacagccgcttcacctacagcgtcactgtcgatggctgcacgagtcacaccggagcctggggcaagacagtgattgaatacaaaaccaccaagacctcccgcctgcccatcatcgatgtggcccccttggacgttggtgccccagaccaggaattcggcttcgacgttggccctgtctgcttcctgtaaactccctccatcccaacctggctccctcccacccaaccaactttccccccaacccggaaacagacaagcaacccaaactgaaccccctcaaaagccaaaaaatgggagacaatttcacatggactttggaaaatatttttttcctttgcattcatctctcaaacttagtttttatctttgaccaaccgaacatgaccaaaaaccaaaagtgcattcaaccttaccaaaaaaaaaaaaaaaaaaagaataaataaataactttttaaaaaaggaagcttggtccacttgcttgaagacccatgcgggggtaagtccctttctgcccgttgggcttatgaaaccccaatgctgccctttctgctcctttctccacaccccccttggggcctcccctccactccttcccaaatctgtctccccagaagacacaggaaacaatgtattgtctgcccagcaatcaaaggcaatgctcaaacacccaagtggcccccaccctcagcccgctcctgcccgcccagcacccccaggccctgggggacctggggttctcagactgccaaagaagccttgccatctggcgctcccatggctcttgcaacatctccccttcgtttttgagggggtcatgccgggggagccaccagcccctcactgggttcggaggagagtcaggaagggccacgacaaagcagaaacatcggatttggggaacgcgtgtcaatcccttgtgccgcagggctgggcgggagagactgttctgttccttgtgtaactgtgttgctgaaagactacctcgttcttgtcttgatgtgtcaccggggcaactgcctgggggcggggatgggggcagggtggaagcggctccccattttataccaaaggtgctacatctatgtgatgggtggggtggggagggaatcactggtgctatagaaattgagatgcccccccaggccagcaaatgttcctttttgttcaaagtctatttttattccttgatatttttctttttttttttttttttttgtggatggggacttgtgaatttttctaaaggtgctatttaacatgggaggagagcgtgtgcggctccagcccagcccgctgctcactttccaccctctctccacctgcctctggcttctcaggcctctgctctccgacctctctcctctgaaaccctcctccacagctgcagcccatcctcccggctccctcctagtctgtcctgcgtcctctgtccccgggtttcagagacaacttcccaaagcacaaagcagtttttccccctaggggtgggaggaagcaaaagactctgtacctattttgtatgtgtataataatttgagatgtttttaattattttgattgctggaataaagcatgtggaaatgacccaaacataatcgtcggagcagacgggagtttctcctcggggtcggagcaggaggcacgcggagtgtgaggccacgcatgagcggacgctaaccccctccccagccacaaagagtctacatgtctagggtctagacatgttcagctttgtggacctccggctcctgctcctcttagcggccaccgccctcctgacgcacggccaagaggaaggccaagtcgagggccaagacgaagacatcccaccaatcacctgcgtacagaacggcctcaggtaccatgaccgagacgtgtggaaacccgagccctgccggatctgcgtctgcgacaacggcaaggtgttgtgcgatgacgtgatctgtgacgagaccaagaactgccccggcgccgaagtccccgagggcgagtgctgtcccgtctgccccgacggctcagagtcacccaccgaccaagaaaccaccggcgtcgagggacccaagggagacactggcccccgaggcccaaggggacccgcaggcccccctggccgagatggcatccctggacagcctggacttcccggaccccccggaccccccggacctcccggaccccctggcctcggaggaaactttgctccccagctgtcttatggctatgatgagaaatcaaccggaggaatttccgtgcctggccccatgggtccctctggtcctcgtggtctccctggcccccctggtgcacctggtccccaaggcttccaaggtccccctggtgagcctggcgagcctggagcttcaggtcccatgggtccccgaggtcccccaggtccccctggaaagaatggagatgatggggaagctggaaaacctggtcgtcctggtgagcgtgggcctcctgggcctcagggtgctcgaggattgcccggaacagctggcctccctggaatgaagggacacagaggtttcagtggtttggatggtgccaagggagatgctggtcctgctggtcctaagggtgagcctggcagccctggtgaaaatggagctcctggtcagatgggcccccgtggcctgcctggtgagagaggtcgccctggagcccctggccctgctggtgctcgtggaaatgatggtgctactggtgctgccgggccccctggtcccaccggccccgctggtcctcctggcttccctggtgctgttggtgctaagggtgaagctggtccccaagggccccgaggctctgaaggtccccagggtgtgcgtggtgagcctggcccccctggccctgctggtgctgctggccctgctggaaaccctggtgctgatggacagcctggtgctaaaggtgccaatggtgctcctggtattgctggtgctcctggcttccctggtgcccgaggcccctctggaccccagggccccggcggccctcctggtcccaagggtaacagcggtgaacctggtgctcctggcagcaaaggagacactggtgctaagggagagcctggccctgttggtgttcaaggaccccctggccctgctggagaggaaggaaagcgaggagctcgaggtgaacccggacccactggcctgcccggaccccctggcgagcgtggtggacctggtagccgtggtttccctggcgcagatggtgttgctggtcccaagggtcccgctggtgaacgtggttctcctggccctgctggccccaaaggatctcctggtgaagctggtcgtcccggtgaagctggtctgcctggtgccaagggtctgactggaagccctggcagccctggtcctgatggcaaaactggcccccctggtcccgccggtcaagatggtcgccccggacccccaggcccacctggtgcccgtggtcaggctggtgtgatgggattccctggacctaaaggtgctgctggagagcccggcaaggctggagagcgaggtgttcccggaccccctggcgctgtcggtcctgctggcaaagatggagaggctggagctcagggaccccctggccctgctggtcccgctggcgagagaggtgaacaaggccctgctggctcccccggattccagggtctccctggtcctgctggtcctccaggtgaagcaggcaaacctggtgaacagggtgttcctggagaccttggcgcccctggcccctctggagcaagaggcgagagaggtttccctggcgagcgtggtgtgcaaggtccccctggtcctgctggtccccgaggggccaacggtgctcccggcaacgatggtgctaagggtgatgctggtgcccctggagctcccggtagccagggcgcccctggccttcagggaatgcctggtgaacgtggtgcagctggtcttccagggcctaagggtgacagaggtgatgctggtcccaaaggtgctgatggctctcctggcaaagatggcgtccgtggtctgactggccccattggtcctcctggccctgctggtgcccctggtgacaagggtgaaagtggtcccagcggccctgctggtcccactggagctcgtggtgcccccggagaccgtggtgagcctggtccccccggccctgctggctttgctggcccccctggtgctgacggccaacctggtgctaaaggcgaacctggtgatgctggtgctaaaggcgatgctggtccccctggccctgccggacccgctggaccccctggccccattggtaatgttggtgctcctggagccaaaggtgctcgcggcagcgctggtccccctggtgctactggtttccctggtgctgctggccgagtcggtcctcctggcccctctggaaatgctggaccccctggccctcctggtcctgctggcaaagaaggcggcaaaggtccccgtggtgagactggccctgctggacgtcctggtgaagttggtccccctggtccccctggccctgctggcgagaaaggatcccctggtgctgatggtcctgctggtgctcctggtactcccgggcctcaaggtattgctggacagcgtggtgtggtcggcctgcctggtcagagaggagagagaggcttccctggtcttcctggcccctctggtgaacctggcaaacaaggtccctctggagcaagtggtgaacgtggtccccctggtcccatgggcccccctggattggctggaccccctggtgaatctggacgtgagggggctcctggtgccgaaggttcccctggacgagacggttctcctggcgccaagggtgaccgtggtgagaccggccccgctggaccccctggtgctcctggtgctcctggtgcccctggccccgttggccctgctggcaagagtggtgatcgtggtgagactggtcctgctggtcccaccggtcctgtcggccctgttggcgcccgtggccccgccggaccccaaggcccccgtggtgacaagggtgagacaggcgaacagggcgacagaggcataaagggtcaccgtggcttctctggcctccagggtccccctggccctcctggctctcctggtgaacaaggtccctctggagcctctggtcctgctggtccccgaggtccccctggctctgctggtgctcctggcaaagatggactcaacggtctccctggccccattgggccccctggtcctcgcggtcgcactggtgatgctggtcctgttggtccccccggccctcctggacctcctggtccccctggtcctcccagcgctggtttcgacttcagcttcctgccccagccacctcaagagaaggctcacgatggtggccgctactaccgggctgatgatgccaatgtggttcgtgaccgtgacctcgaggtggacaccaccctcaagagcctgagccagcagatcgagaacatccggagcccagagggcagccgcaagaaccccgcccgcacctgccgtgacctcaagatgtgccactctgactggaagagtggagagtactggattgaccccaaccaaggctgcaacctggatgccatcaaagtcttctgcaacatggagactggtgagacctgcgtgtaccccactcagcccagtgtggcccagaagaactggtacatcagcaagaaccccaaggacaagaggcatgtctggttcggcgagagcatgaccgatggattccagttcgagtatggcggccagggctccgaccctgccgatgtggccatccagctgaccttcctgcgcctgatgtccaccgaggcctcccagaacatcacctaccactgcaagaacagcgtggcctacatggaccagcagactggcaacctcaagaaggccctgctcctccagggctccaacgagatcgagatccgcgccgagggcaacagccgcttcacctacagcgtcactgtcgatggctgcacgagtcacaccggagcctggggcaagacagtgattgaatacaaaaccaccaagacctcccgcctgcccatcatcgatgtggcccccttggacgttggtgccccagaccaggaattcggcttcgacgttggccctgtctgcttcctgtaaactccctccatcccaacctggctccctcccacccaaccaactttccccccaacccggaaacagacaagcaacccaaactgaaccccctcaaaagccaaaaaatgggagacaatttcacatggactttggaaaatatttttttcctttgcattcatctctcaaacttagtttttatctttgaccaaccgaacatgaccaaaaaccaaaagtgcattcaaccttaccaaaaaaaaaaaaaaaaaaagaataaataaataactttttaaaaaaggaagcttggtccacttgcttgaagacccatgcgggggtaagtccctttctgcccgttgggcttatgaaaccccaatgctgccctttctgctcctttctccacaccccccttggggcctcccctccactccttcccaaatctgtctccccagaagacacaggaaacaatgtattgtctgcccagcaatcaaaggcaatgctcaaacacccaagtggcccccaccctcagcccgctcctgcccgcccagcacccccaggccctgggggacctggggttctcagactgccaaagaagccttgccatctggcgctcccatggctcttgcaacatctccccttcgtttttgagggggtcatgccgggggagccaccagcccctcactgggttcggaggagagtcaggaagggccacgacaaagcagaaacatcggatttggggaacgcgtgtcaatcccttgtgccgcagggctgggcgggagagactgttctgttccttgtgtaactgtgttgctgaaagactacctcgttcttgtcttgatgtgtcaccggggcaactgcctgggggcggggatgggggcagggtggaagcggctccccattttataccaaaggtgctacatctatgtgatgggtggggtggggagggaatcactggtgctatagaaattgagatgcccccccaggccagcaaatgttcctttttgttcaaagtctatttttattccttgatatttttctttttttttttttttttttgtggatggggacttgtgaatttttctaaaggtgctatttaacatgggaggagagcgtgtgcggctccagcccagcccgctgctcactttccaccctctctccacctgcctctggcttctcaggcctctgctctccgacctctctcctctgaaaccctcctccacagctgcagcccatcctcccggctccctcctagtctgtcctgcgtcctctgtccccgggtttcagagacaacttcccaaagcacaaagcagtttttccccctaggggtgggaggaagcaaaagactctgtacctattttgtatgtgtataataatttgagatgtttttaattattttgattgctggaataaagcatgtggaaatgacccaaacataatcgtcggagcagacgggagtttctcctcggggtcggagcaggaggcacgcggagtgtgaggccacgcatgagcggacgctaaccccctccccagccacaaagagtctacatgtctagggtctagacatgttcagctttgtggacctccggctcctgctcctcttagcggccaccgccctcctgacgcacggccaagaggaaggccaagtcgagggccaagacgaagacatcccaccaatcacctgcgtacagaacggcctcaggtaccatgaccgagacgtgtggaaacccgagccctgccggatctgcgtctgcgacaacggcaaggtgttgtgcgatgacgtgatctgtgacgagaccaagaactgccccggcgccgaagtccccgagggcgagtgctgtcccgtctgccccgacggctcagagtcacccaccgaccaagaaaccaccggcgtcgagggacccaagggagacactggcccccgaggcccaaggggacccgcaggcccccctggccgagatggcatccctggacagcctggacttcccggaccccccggaccccccggacctcccggaccccctggcctcggaggaaactttgctccccagctgtcttatggctatgatg

SEQ ID NO: 663 - DNA, 32765 bp, Homo sapiens; identical to SEQ ID NO: 662
  misc_feature (869)..(869): second gene starts at position 869

SEQ ID NO: 664 - DNA, 32765 bp, Homo sapiens
  misc_feature (658)..(658): second gene starts at position 658
atggggagagaccagcgcgcggtggccggccctgccctacggcggtggctgctgctggggacagtgaccgtggggttcctcgcccagagcgtcttggcgggtgtgaagaagtttgatgtgccgtgtggaggaagagattgcagtgggggctgccagtgctaccctgagaaaggtggacgtggtcagcctgggccagtgggcccccaggggtacaatgggccaccaggattacaaggattcccgggactgcagggacgtaaaggagacaagggtgaaaggggagcccccggagtaacgggacccaagggcgacgtgggagcaagaggcgtttctggattccctggtgccgatggaattcctggacacccggggcaaggtgggcccaggggaaggccgggctacgatggctgcaacggaacccagggagactcaggtccacaggggccccccggctctgaggggttcaccgggcctcccgggccccaaggaccaaaagggcagaaaggtgagccttatgcactgcctaaagaggagcgcgacagatatcggggtgaacctggagagcctggattggtcggtttccagggacctcccggccgccctgggcatgtgggacagatgggtccagttggagctccagggagaccaggaccacctggaccccctggaccaaaaggacagcaaggcaacagaggacttggtttctacggagttaagggtgaaaagggtgacgtagggcagccgggacccaacgggattccatcagacaccctccaccccatcatcgcgcccacaggagtcaccttccacccagatcagtacaagggtgaaaaaggcagtgagggggaaccaggaataagaggcatttccttgaagggagaagaaggaatcatgggctttcctggactgaggggttaccctggcttgagtggtgaaaaaggatcaccaggacagaagggaagccgaggcctggatggctatcaagggcctgatggaccccggggacccaagggagaagccggagacccagggccccctggactacctgcctactcccctcacccttccctagcaaaaggtgccagaggtgacccgggattcccaggggcccaaggggagccaggaagccagggtgagccaggagacccgggcctcccaggtccccctggcctctccatcggagatggagatcagaggagaggcctgccgggtgagatgggacccaagggcttcatcggagaccccggcatccctgcgctctacgggggcccacctggacctgatggaaagcgagggcctccaggaccccccgggctccctggaccacctggacctgatggcttcctgtttgggctgaaaggagcaaaaggaagagcaggcttccctgggcttcccggctcccctggagcccgcggaccaaaggggtggaaaggtgacgctggggaatgcagatgtacagaaggcgacgaagctatcaaaggtcttccgggactgccaggacccaagggcttcgcaggcatcaacggggagccggggaggaaaggggacagaggagaccccggccaacacggcctccctgggttcccagggctcaagggagtgcctggcaacattggtgctcccggacccaaaggagcaaaaggagattccagaacaatcacaaccaaaggtgagcggggacagcccggcgtcccaggtgtgcccgggatgaaaggtgacgatggcagcccaggccgcgatgggctcgatggattccccggcctcccaggccctcccggtgatggcatcaagggccctccaggggacccaggctatccaggaatacctggaacgaagggtactccaggagaaatgggccccccaggactgggccttcccggcctcaaaggccaacgtggtttccctggagacgccggcttacctggaccaccaggcttcctgggccctcctggccccgcagggaccccaggacaaatagattgtgacacagatgtgaaaagggccgttggaggtgacagacaggaggccatccagccaggttgcataggagggcccaagggattgccaggcctgccaggacccccaggccccacaggtgccaaaggcctccgaggaatcccaggcttcgcaggagctgatggaggaccagggcccaggggcttgccaggagacgcaggtcgtgaagggttcccaggacccccagggttcataggaccccgaggatccaaaggtgcagtgggcctccctggcccagatggatccccaggtcccatcggcctgccagggccagatgggccccctggggaaaggggcctccctggagaagtcctgggagctcagcccgggccacggggagatgctggtgtgcctggacagcctgggcttaaaggccttcccggagacagaggcccccctggattcagaggaagccaagggatgcctgggatgccagggctgaagggccagccaggcctcccaggaccttccggccagccaggcctgtatgggcctccaggactgcatggattcccaggagctcctggccaagaggggcccttggggctgccaggaatcccaggccgtgaaggtctgcctggtgatagaggggaccctggggacacaggcgctcctggccctgtgggcatgaaaggtctctcggtgatgctggtcccaaaggtgctgatggctctcctggcaaagatggcgtccgtggtctgactggccccattggtcctcctggccctgctggtgcccctggtgacaagggtgaaagtggtcccagcggccctgctggtcccactggagctcgtggtgcccccggagaccgtggtgagcctggtccccccggccctgctggctttgctggcccccctggtgctgacggccaacctggtgctaaaggcgaacctggtgatgctggtgctaaaggcgatgctggtccccctggccctgccggacccgctggaccccctggccccattggtaatgttggtgctcctggagccaaaggtgctcgcggcagcgctggtccccctggtgctactggtttccctggtgctgctggccgagtcggtcctcctggcccctctggaaatgctggaccccctggccctcctggtcctgctggcaaagaaggcggcaaaggtccccgtggtgagactggccctgctggacgtcctggtgaagttggtccccctggtccccctggccctgctggcgagaaaggatcccctggtgctgatggtcctgctggtgctcctggtactcccgggcctcaaggtattgctggacagcgtggtgtggtcggcctgcctggtcagagaggagagagaggcttccctggtcttcctggcccctctggtgaacctggcaaacaaggtccctctggagcaagtggtgaacgtggtccccctggtcccatgggcccccctggattggctggaccccctggtgaatctggacgtgagggggctcctggtgccgaaggttcccctggacgagacggttctcctggcgccaagggtgaccgtggtgagaccggccccgctggaccccctggtgctcctggtgctcctggtgcccctggccccgttggccctgctggcaagagtggtgatcgtggtgagactggtcctgctggtcccaccggtcctgtcggccctgttggcgcccgtggccccgccggaccccaaggcccccgtggtgacaagggtgagacaggcgaacagggcgacagaggcataaagggtcaccgtggcttctctggcctccagggtccccctggccctcctggctctcctggtgaacaaggtccctctggagcctctggtcctgctggtccccgaggtccccctggctctgctggtgctcctggcaaagatggactcaacggtctccctggccccattgggccccctggtcctcgcggtcgcactggtgatgctggtcctgttggtccccccggccctcctggacctcctggtccccctggtcctcccagcgctggtttcgacttcagcttcctgccccagccacctcaagagaaggctcacgatggtggccgctactaccgggctgatgatgccaatgtggttcgtgaccgtgacctcgaggtggacaccaccctcaagagcctgagccagcagatcgagaacatccggagcccagagggcagccgcaagaaccccgcccgcacctgccgtgacctcaagatgtgccactctgactggaagagtggagagtactggattgaccccaaccaaggctgcaacctggatgccatcaaagtcttctgcaacatggagactggtgagacctgcgtgtaccccactcagcccagtgtggcccagaagaactggtacatcagcaagaaccccaaggacaagaggcatgtctggttcggcgagagcatgaccgatggattccagttcgagtatggcggccagggctccgaccctgccgatgtggccatccagctgaccttcctgcgcctgatgtccaccgaggcctcccagaacatcacctaccactgcaagaacagcgtggcctacatggaccagcagactggcaacctcaagaaggccctgctcctccagggctccaacgagatcgagatccgcgccgagggcaacagccgcttcacctacagcgtcactgtcgatggctgcacgagtcacaccggagcctggggcaagacagtgattgaatacaaaaccaccaagacctcccgcctgcccatcatcgatgtggcccccttggacgttggtgccccagaccaggaattcggcttcgacgttggccctgtctgcttcctgtaaactccctccatcccaacctggctccctcccacccaaccaactttccccccaacccggaaacagacaagcaacccaaactgaaccccctcaaaagccaaaaaatgggagacaatttcacatggactttggaaaatatttttttcctttgcattcatctctcaaacttagtttttatctttgaccaaccgaacatgaccaaaaaccaaaagtgcattcaaccttaccaaaaaaaaaaaaaaaaaaagaataaataaataactttttaaaaaaggaagcttggtccacttgcttgaagacccatgcgggggtaagtccctttctgcccgttgggcttatgaaaccccaatgctgccctttctgctcctttctccacaccccccttggggcctcccctccactccttcccaaatctgtctccccagaagacacaggaaacaatgtattgtctgcccagcaatcaaaggcaatgctcaaacacccaagtggcccccaccctcagcccgctcctgcccgcccagcacccccaggccctgggggacctggggttctcagactgccaaagaagccttgccatctggcgctcccatggctcttgcaacatctccccttcgtttttgagggggtcatgccgggggagccaccagcccctcactgggttcggaggagagtcaggaagggccacgacaaagcagaaacatcggatttggggaacgcgtgtcaatcccttgtgccgcagggctgggcgggagagactgttctgttccttgtgtaactgtgttgctgaaagactacctcgttcttgtcttgatgtgtcaccggggcaactgcctgggggcggggatgggggcagggtggaagcggctccccattttataccaaaggtgctacatctatgtgatgggtggggtggggagggaatcactggtgctatagaaattgagatgcccccccaggccagcaaatgttcctttttgttcaaagtctatttttattccttgatatttttctttttttttttttttttttgtggatggggacttgtgaatttttctaaaggtgctatttaacatgggaggagagcgtgtgcggctccagcccagcccgctgctcactttccaccctctctccacctgcctctggcttctcaggcctctgctctccgacctctctcctctgaaaccctcctccacagctgcagcccatcctcccggctccctcctagtctgtcctgcgtcctctgtccccgggtttcagagacaacttcccaaagcacaaagcagtttttccccctaggggtgggaggaagcaaaagactctgtacctattttgtatgtgtataataatttgagatgtttttaattattttgattgctggaataaagcatgtggaaatgacccaaacataatcgtcggagcagacgggagtttctcctcggggtcggagcaggaggcacgcggagtgtgaggccacgcatgagcggacgctaaccccctccccagccacaaagagtctacatgtctagggtctagacatgttcagctttgtggacctccggctcctgctcctcttagcggccaccgccctcctgacgcacggccaagaggaaggccaagtcgagggccaagacgaagacatcccaccaatcacctgcgtacagaacggcctcaggtaccatgaccgagacgtgtggaaacccgagccctgccggatctgcgtctgcgacaacggcaaggtgttgtgcgatgacgtgatctgtgacgagaccaagaactgccccggcgccgaagtccccgagggcgagtgctgtcccgtctgccccgacggctcagagtcacccaccgaccaagaaaccaccggcgtcgagggacccaagggagacactggcccccgaggcccaaggggacccgcaggcccccctggccgagatggcatccctggacagcctggacttcccggaccccccggaccccccggacctcccggaccccctggcctcggaggaaactttgctccccagctgtcttatggctatgatgagaaatcaaccggaggaatttccgtgcctggccccatgggtccctctggtcctcgtggtctccctggcccccctggtgcacctggtccccaaggcttccaaggtccccctggtgagcctggcgagcctggagcttcaggtcccatgggtccccgaggtcccccaggtccccctggaaagaatggagatgatggggaagctggaaaacctggtcgtcctggtgagcgtgggcctcctgggcctcagggtgctcgaggattgcccggaacagctggcctccctggaatgaagggacacagaggtttcagtggtttggatggtgccaagggagatgctggtcctgctggtcctaagggtgagcctggcagccctggtgaaaatggagctcctggtcagatgggcccccgtggcctgcctggtgagagaggtcgccctggagcccctggccctgctggtgctcgtggaaatgatggtgctactggtgctgccgggccccctggtcccaccggccccgctggtcctcctggcttccctggtgctgttggtgctaagggtgaagctggtccccaagggccccgaggctctgaaggtccccagggtgtgcgtggtgagcctggcccccctggccctgctggtgctgctggccctgctggaaaccctggtgctgatggacagcctggtgctaaaggtgccaatggtgctcctggtattgctggtgctcctggcttccctggtgcccgaggcccctctggaccccagggccccggcggccctcctggtcccaagggtaacagcggtgaacctggtgctcctggcagcaaaggagacactggtgctaagggagagcctggccctgttggtgttcaaggaccccctggccctgctggagaggaaggaaagcgaggagctcgaggtgaacccggacccactggcctgcccggaccccctggcgagcgtggtggacctggtagccgtggtttccctggcgcagatggtgttgctggtcccaagggtcccgctggtgaacgtggttctcctggccctgctggccccaaaggatctcctggtgaagctggtcgtcccggtgaagctggtctgcctggtgccaagggtctgactggaagccctggcagccctggtcctgatggcaaaactggcccccctggtcccgccggtcaagatggtcgccccggacccccaggcccacctggtgcccgtggtcaggctggtgtgatgggattccctggacctaaaggtgctgctggagagcccggcaaggctggagagcgaggtgttcccggaccccctggcgctgtcggtcctgctggcaaagatggagaggctggagctcagggaccccctggccctgctggtcccgctggcgagagaggtgaacaaggccctgctggctcccccggattccagggtctccctggtcctgctggtcctccaggtgaagcaggcaaacctggtgaacagggtgttcctggagaccttggcgcccctggcccctctggagcaagaggcgagagaggtttccctggcgagcgtggtgtgcaaggtccccctggtcctgctggtccccgaggggccaacggtgctcccggcaacgatggtgctaagggtgatgctggtgcccctggagctcccggtagccagggcgcccctggccttcagggaatgcctggtgaacgtggtgcagctggtcttccagggcctaagggtgacagaggtgatgctggtcccaaaggtgctgatggctctcctggcaaagatggcgtccgtggtctgactggccccattggtcctcctggccctgctggtgcccctggtgacaagggtgaaagtggtcccagcggccctgctggtcccactggagctcgtggtgcccccggagaccgtggtgagcctggtccccccggccctgctggctttgctggcccccctggtgctgacggccaacctggtgctaaaggcgaacctggtgatgctggtgctaaaggcgatgctggtccccctggccctgccggacccgctggaccccctggccccattggtaatgttggtgctcctggagccaaaggtgctcgcggcagcgctggtccccctggtgctactggtttccctggtgctgctggccgagtcggtcctcctggcccctctggaaatgctggaccccctggccctcctggtcctgctggcaaagaaggcggcaaaggtccccgtggtgagactggccctgctggacgtcctggtgaagttggtccccctggtccccctggccctgctggcgagaaaggatcccctggtgctgatggtcctgctggtgctcctggtactcccgggcctcaaggtattgctggacagcgtggtgtggtcggcctgcctggtcagagaggagagagaggcttccctggtcttcctggcccctctggtgaacctggcaaacaaggtccctctggagcaagtggtgaacgtggtccccctggtcccatgggcccccctggattggctggaccccctggtgaatctggacgtgagggggctcctggtgccgaaggttcccctggacgagacggttctcctggcgccaagggtgaccgtggtgagaccggccccgctggaccccctggtgctcctggtgctcctggtgcccctggccccgttggccctgctggcaagagtggtgatcgtggtgagactggtcctgctggtcccaccggtcctgtcggccctgttggcgcccgtggccccgccggaccccaaggcccccgtggtgacaagggtgagacaggcgaacagggcgacagaggcataaagggtcaccgtggcttctctggcctccagggtccccctggccctcctggctctcctggtgaacaaggtccctctggagcctctggtcctgctggtccccgaggtccccctggctctgctggtgctcctggcaaagatggactcaacggtctccctggccccattgggccccctggtcctcgcggtcgcactggtgatgctggtcctgttggtccccccggccctcctggacctcctggtccccctggtcctcccagcgctggtttcgacttcagcttcctgccccagccacctcaagagaaggctcacgatggtggccgctactaccgggctgatgatgccaatgtggttcgtgaccgtgacctcgaggtggacaccaccctcaagagcctgagccagcagatcgagaacatccggagcccagagggcagccgcaagaaccccgcccgcacctgccgtgacctcaagatgtgccactctgactggaagagtggagagtactggattgaccccaaccaaggctgcaacctggatgccatcaaagtcttctgcaacatggagactggtgagacctgcgtgtaccccactcagcccagtgtggcccagaagaactggtacatcagcaagaaccccaaggacaagaggcatgtctggttcggcgagagcatgaccgatggattccagttcgagtatggcggccagggctccgaccctgccgatgtggccatccagctgaccttcctgcgcctgatgtccaccgaggcctcccagaacatcacctaccactgcaagaacagcgtggcctacatggaccagcagactggcaacctcaagaaggccctgctcctccagggctccaacgagatcgagatccgcgccgagggcaacagccgcttcacctacagcgtcactgtcgatggctgcacgagtcacaccggagcctggggcaagacagtgattgaatacaaaaccaccaagacctcccgcctgcccatcatcgatgtggcccccttggacgttggtgccccagaccaggaattcggcttcgacgttggccctgtctgcttcctgtaaactccctccatcccaacctggctccctcccacccaaccaactttccccccaacccggaaacagacaagcaacccaaactgaaccccctcaaaagccaaaaaatgggagacaatttcacatggactttggaaaatatttttttcctttgcattcatctctcaaacttagtttttatctttgaccaaccgaacatgaccaaaaaccaaaagtgcattcaaccttaccaaaaaaaaaaaaaaaaaaagaataaataaataactttttaaaaaaggaagcttggtccacttgcttgaagacccatgcgggggtaagtccctttctgcccgttgggcttatgaaaccccaatgctgccctttctgctcctttctccacaccccccttggggcctcccctccactccttcccaaatctgtctccccagaagacacaggaaacaatgtattgtctgcccagcaatcaaaggcaatgctcaaacacccaagtggcccccaccctcagcccgctcctgcccgcccagcacccccaggccctgggggacctggggttctcagactgccaaagaagccttgccatctggcgctcccatggctcttgcaacatctccccttcgtttttgagggggtcatgccgggggagccaccagcccctcactgggttcggaggagagtcaggaagggccacgacaaagcagaaacatcggatttggggaacgcgtgtcaatcccttgtgccgcagggctgggcgggagagactgttctgttccttgtgtaactgtgttgctgaaagactacctcgttcttgtcttgatgtgtcaccggggcaactgcctgggggcggggatgggggcagggtggaagcggctccccattttataccaaaggtgctacatctatgtgatgggtggggtggggagggaatcactggtgctatagaaattgagatgcccccccaggccagcaaatgttcctttttgttcaaagtctatttttattccttgatatttttctttttttttttttttttttgtggatggggacttgtgaatttttctaaaggtgctatttaacatgggaggagagcgtgtgcggctccagcccagcccgctgctcactttccaccctctctccacctgcctctggcttctcaggcctctgctctccgacctctctcctctgaaaccctcctccacagctgcagcccatcctcccggctccctcctagtctgtcctgcgtcctctgtccccgggtttcagagacaacttcccaaagcacaaagcagtttttccccctaggggtgggaggaagcaaaagactctgtacctattttgtatgtgtataataatttgagatgtttttaattattttgattgctggaataaagcatgtggaaatgacccaaacataatcgtcggagcagacgggagtttctcctcggggtcggagcaggaggcacgcggagtgtgaggccacgcatgagcggacgctaaccccctccccagccacaaagagtctacatgtctagggtctagacatgttcagctttgtggacctccggctcctgctcctcttagcggccaccgccctcctgacgcacggccaagaggaaggccaagtcgagggccaagacgaagacatcccaccaatcacctgcgtacagaacggcctcaggtaccatgaccgagacgtgtggaaacccgagccctgccggatctgcgtctgcgacaacggcaaggtgttgtgcgatgacgtgatctgtgacgagaccaagaactgccccggcgccgaagtccccgagggcgagtgctgtcccgtctgccccgacggctcagagtcacccaccgaccaagaaaccaccggcgtcgagggacccaagggagacactggcccccgaggcccaaggggacccgcaggcccccctggccgagatggcatccctggacagcctggacttcccggaccccccggaccccccggacctcccggaccccctggcctcggaggaaactttgctccccagctgtcttatggctatgatgagaaatcaaccggaggaatttccgtgcctggccccatgggtccctctggtcctcgtggtctccctggcccccctggtgcacctggtccccaaggcttccaaggtccccctggtgagcctggcgagcctggagcttcaggtcccatgggtccccgaggtcccccaggtccccctggaaagaatggagatgatggggaagctggaaaacctggtcgtcctggtgagcgtgggcctcctgggcctcagggtgctcgaggattgcccggaacagctggcctccctggaatgaagggacacagaggtttcagtggtttggatggtgccaagggagatgctggtcctgctggtcctaagggtgagcctggcagccctggtgaaaatggagctcctggtcagatgggcccccgtggcctgcctggtgagagaggtcgccctggagcccctggccctgctggtgctcgtggaaatgatggtgctactggtgctgccgggccccctggtcccaccggccccgctggtcctcctggcttccctggtgctgttggtgctaagggtgaagctggtccccaagggccccgaggctctgaaggtccccagggtgtgcgtggtgagcctggcccccctggccctgctggtgctgctggccctgctggaaaccctggtgctgatggacagcctggtgctaaaggtgccaatggtgctcctggtattgctggtgctcctggcttccctggtgcccgaggcccctctggaccccagggccccggcggccctcctggtcccaagggtaacagcggtgaacctggtgctcctggcagcaaaggagacactggtgctaagggagagcctggccctgttggtgttcaaggaccccctggccctgctggagaggaaggaaagcgaggagctcgaggtgaacccggacccactggcctgcccggaccccctggcgagcgtggtggacctggtagccgtggtttccctggcgcagatggtgttgctggtcccaagggtcccgctggtgaacgtggttctcctggccctgctggccccaaaggatctcctggtgaagctggtcgtcccggtgaagctggtctgcctggtgccaagggtctgactggaagccctggcagccctggtcctgatggcaaaactggcccccctggtcccgccggtcaagatggtcgccccggacccccaggcccacctggtgcccgtggtcaggctggtgtgatgggattccctggacctaaaggtgctgctggagagcccggcaaggctggagagcgaggtgttcccggaccccctggcgctgtcggtcctgctggcaaagatggagaggctggagctcagggaccccctggccctgctggtcccgctggcgagagaggtgaacaaggccctgctggctcccccggattccagggtctccctggtcctgctggtcctccaggtgaagcaggcaaacctggtgaacagggtgttcctggagaccttggcgcccctggcccctctggagcaagaggcgagagaggtttccctggcgagcgtggtgtgcaaggtccccctggtcctgctggtccccgaggggccaacggtgctcccggcaacgatggtgctaagggtgatgctggtgcccctggagctcccggtagccagggcgcccctggccttcagggaatgcctggtgaacgtggtgcagctggtcttccagggcctaagggtgacagaggtgatgctggtcccaaaggtgctgatggctctcctggcaaagatggcgtccgtggtctgactggccccattggtcctcctggccctgctggtgcccctggtgacaagggtgaaagtggtcccagcggccctgctggtcccactggagctcgtggtgcccccggagaccgtggtgagcctggtccccccggccctgctggctttgctggcccccctggtgctgacggccaacctggtgctaaaggcgaacctggtgatgctggtgctaaaggcgatgctggtccccctggccctgccggacccgctggaccccctggccccattggtaatgttggtgctcctggagccaaaggtgctcgcggcagcgctggtccccctggtgctactggtttccctggtgctgctggccgagtcggtcctcctggcccctctggaaatgctggaccccctggccctcctggtcctgctggcaaagaaggcggcaaaggtccccgtggtgagactggccctgctggacgtcctggtgaagttggtccccctggtccccctggccctgctggcgagaaaggatcccctggtgctgatggtcctgctggtgctcctggtactcccgggcctcaaggtattgctggacagcgtggtgtggtcggcctgcctggtcagagaggagagagaggcttccctggtcttcctggcccctctggtgaacctggcaaacaaggtccctctggagcaagtggtgaacgtggtccccctggtcccatgggcccccctggattggctggaccccctggtgaatctggacgtgagggggctcctggtgccgaaggttcccctggacgagacggttctcctggcgccaagggtgaccgtggtgagaccggccccgctggaccccctggtgctcctggtgctcctggtgcccctggccccgttggccctgctggcaagagtggtgatcgtggtgagactggtcctgctggtcccaccggtcctgtcggccctgttggcgcccgtggccccgccggaccccaaggcccccgtggtgacaagggtgagacaggcgaacagggcgacagaggcataaagggtcaccgtggcttctctggcctccagggtccccctggccctcctggctctcctggtgaacaaggtccctctggagcctctggtcctgctggtccccgaggtccccctggctctgctggtgctcctggcaaagatggactcaacggtctccctggccccattgggccccctggtcctcgcggtcgcactggtgatgctggtcctgttggtccccccggccctcctggacctcctggtccccctggtcctcccagcgctggtttcgacttcagcttcctgccccagccacctcaagagaaggctcacgatggtggccgctactaccgggctgatgatgccaatgtggttcgtgaccgtgacctcgaggtggacaccaccctcaagagcctgagccagcagatcgagaacatccggagcccagagggcagccgcaagaaccccgcccgcacctgccgtgacctcaagatgtgccactctgactggaagagtggagagtactggattgaccccaaccaaggctgcaacctggatgccatcaaagtcttctgcaacatggagactggtgagacctgcgtgtaccccactcagcccagtgtggcccagaagaactggtacatcagcaagaaccccaaggacaagaggcatgtctggttcggcgagagcatgaccgatggattccagttcgagtatggcggccagggctccgaccctgccgatgtggccatccagctgaccttcctgcgcctgatgtccaccgaggcctcccagaacatcacctaccactgcaagaacagcgtggcctacatggaccagcagactggcaacctcaagaaggccctgctcctccagggctccaacgagatcgagatccgcgccgagggcaacagccgcttcacctacagcgtcactgtcgatggctgcacgagtcacaccggagcctggggcaagacagtgattgaatacaaaaccaccaagacctcccgcctgcccatcatcgatgtggcccccttggacgttggtgccccagaccaggaattcggcttcgacgttggccctgtctgcttcctgtaaactccctccatcccaacctggctccctcccacccaaccaactttccccccaacccggaaacagacaagcaacccaaactgaaccccctcaaaagccaaaaaatgggagacaatttcacatggactttggaaaatatttttttcctttgcattcatctctcaaacttagtttttatctttgaccaaccgaacatgaccaaaaaccaaaagtgcattcaaccttaccaaaaaaaaaaaaaaaaaaagaataaataaataactttttaaaaaaggaagcttggtccacttgcttgaagacccatgcgggggtaagtccctttctgcccgttgggcttatgaaaccccaatgctgccctttctgctcctttctccacaccccccttggggcctcccctccactccttcccaaatctgtctccccagaagacacaggaaacaatgtattgtctgcccagcaatcaaaggcaatgctcaaacacccaagtggcccccaccctcagcccgctcctgcccgcccagcacccccaggccctgggggacctggggttctcagactgccaaagaagccttgccatctggcgctcccatggctcttgcaacatctccccttcgtttttgagggggtcatgccgggggagccaccagcccctcactgggttcggaggagagtcaggaagggccacgacaaagcagaaacatcggatttggggaacgcgtgtcaatcccttgtgccgcagggctgggcgggagagactgttctgttccttgtgtaactgtgttgctgaaagactacctcgttcttgtcttgatgtgtcaccggggcaactgcctgggggcggggatgggggcagggtggaagcggctccccattttataccaaaggtgctacatctatgtgatgggtggggtggggagggaatcactggtgctatagaaattgagatgcccccccaggccagcaaatgttcctttttgttcaaagtctatttttattccttgatatttttctttttttttttttttttttgtggatggggacttgtgaatttttctaaaggtgctatttaacatgggaggagagcgtgtgcggctccagcccagcccgctgctcactttccaccctctctccacctgcctctggcttctcaggcctctgctctccgacctctctcctctgaaaccctcctccacagctgcagcccatcctcccggctccctcctagtctgtcctgcgtcctctgtccccgggtttcagagacaacttcccaaagcacaaagcagtttttccccctaggggtgggaggaagcaaaagactctgtacctattttgtatgtgtataataatttgagatgtttttaattattttgattgctggaataaagcatgtggaaatgacccaaacataatcgtcggagcagacgggagtttctcctcggggtcggagcaggaggcacgcggagtgtgaggccacgcatgagcggacgctaaccccctccccagccacaaagagtctacatgtctagggtctagacatgttcagctttgtggacctccggctcctgctcctcttagcggccaccgccctcctgacgcacggccaagaggaaggccaagtcgagggccaagacgaagacatcccaccaatcacctgcgtacagaacggcctcaggtaccatgaccgagacgtgtggaaacccgagccctgccggatctgcgtctgcgacaacggcaaggtgttgtgcgatgacgtgatctgtgacgagaccaagaactgccccggcgccgaagtccccgagggcgagtgctgtcccgtctgccccgacggctcagagtcacccaccgaccaagaaaccaccggcgtcgagggacccaagggagacactggcccccgaggcccaaggggacccgcaggcccccctggccgagatggcatccctggacagcctggacttcccggaccccccggaccccccggacctcccggaccccctggcctcggaggaaactttgctccccagctgtcttatggctatgatgagaaatcaaccggaggaatttccgtgcctggccccatgggtccctctggtcctcgtggtctccctggcccccctggtgcacctggtccccaaggcttccaaggtccccctggtgagcctggcgagcctggagcttcaggtcccatgggtccccgaggtcccccaggtccccctggaaagaatggagatgatggggaagctggaaaacctggtcgtcctggtgagcgtgggcctcctgggcctcagggtgctcgaggattgcccggaacagctggcctccctggaatgaagggacacagaggtttcagtggtttggatggtgccaagggagatgctggtcctgctggtcctaagggtgagcctggcagccctggtgaaaatggagctcctggtcagatgggcccccgtggcctgcctggtgagagaggtcgccctggagcccctggccctgctggtgctcgtggaaatgatggtgctactggtgctgccgggccccctggtcccaccggccccgctggtcctcctggcttccctggtgctgttggtgctaagggtgaagctggtccccaagggccccgaggctctgaaggtccccagggtgtgcgtggtgagcctggcccccctggccctgctggtgctgctggccctgctggaaaccctggtgctgatggacagcctggtgctaaaggtgccaatggtgctcctggtattgctggtgctcctggcttccctggtgcccgaggcccctctggaccccagggccccggcggccctcctggtcccaagggtaacagcggtgaacctggtgctcctggcagcaaaggagacactggtgctaagggagagcctggccctgttggtgttcaaggaccccctggccctgctggagaggaaggaaagcgaggagctcgaggtgaacccggacccactggcctgcccggaccccctggcgagcgtggtggacctggtagccgtggtttccctggcgcagatggtgttgctggtcccaagggtcccgctggtgaacgtggttctcctggccctgctggccccaaaggatctcctggtgaagctggtcgtcccggtgaagctggtctgcctggtgccaagggtctgactggaagccctggcagccctggtcctgatggcaaaactggcccccctggtcccgccggtcaagatggtcgccccggacccccaggcccacctggtgcccgtggtcaggctggtgtgatgggattccctggacctaaaggtgctgctggagagcccggcaaggctggagagcgaggtgttcccggaccccctggcgctgtcggtcctgctggcaaagatggagaggctggagctcagggaccccctggccctgctggtcccgctggcgagagaggtgaacaaggccctgctggctcccccggattccagggtctccctggtcctgctggtcctccaggtgaagcaggcaaacctggtgaacagggtgttcctggagaccttggcgcccctggcccctctggagcaagaggcgagagaggtttccctggcgagcgtggtgtgcaaggtccccctggtcctgctggtccccgaggggccaacggtgctcccggcaacgatggtgctaagggtgatgctggtgcccctggagctcccggtagccagggcgcccctggccttcagggaatgcctggtgaacgtggtgcagctggtcttccagggcctaagggtgacagaggtgatgctggtcccaaaggtgctgatggctctcctggcaaagatggcgtccgtggtctgactggccccattggtcctcctggccctgctggtgcccctggtgacaagggtgaaagtggtcccagcggccctgctggtcccactggagctcgtggtgcccccggagaccgtggtgagcctggtccccccggccctgctggctttgctggcccccctggtgctgacggccaacctggtgctaaaggcgaacctggtgatgctggtgctaaaggcgatgctggtccccctggccctgccggacccgctggaccccctggccccattggtaatgttggtgctcctggagccaaaggtgctcgcggcagcgctggtccccctggtgctactggtttccctggtgctgctggccgagtcggtcctcctggcccctctggaaatgctggaccccctggccctcctggtcctgctggcaaagaaggcggcaaaggtccccgtggtgagactggccctgctggacgtcctggtgaagttggtccccctggtccccctggccctgctggcgagaaaggatcccctggtgctgatggtcctgctggtgctcctggtactcccgggcctcaaggtattgctggacagcgtggtgtggtcggcctgcctggtcagagaggagagagaggcttccctggtcttcctggcccctctggtgaacctggcaaacaaggtccctctggagcaagtggtgaacgtggtccccctggtcccatgggcccccctggattggctggaccccctggtgaatctggacgtgagggggctcctggtgccgaaggttcccctggacgagacggttctcctggcgccaagggtgaccgtggtgagaccggccccgctggaccccctggtgctcctggtgctcctggtgcccctggccccgttggccctgctggcaagagtggtgatcgtggtgagactggtcctgctggtcccaccggtcctgtcggccctgttggcgcccgtggccccgccggaccccaaggcccccgtggtgacaagggtgagacaggcgaacagggcgacagaggcataaagggtcaccgtggcttctctggcctccagggtccccctggccctcctggctctcctggtgaacaaggtccctctggagcctctggtcctgctggtccccgaggtccccctggctctgctggtgctcctggcaaagatggactcaacggtctccctggccccattgggccccctggtcctcgcggtcgcactggtgatgctggtcctgttggtccccccggccctcctggacctcctggtccccctggtcctcccagcgctggtttcgacttcagcttcctgccccagccacctcaagagaaggctcacgatggtggccgctactaccgggctgatgatgccaatgtggttcgtgaccgtgacctcgaggtggacaccaccctcaagagcctgagccagcagatcgagaacatccggagcccagagggcagccgcaagaaccccgcccgcacctgccgtgacctcaagatgtgccactctgactggaagagtggagagtactggattgaccccaaccaaggctgcaacctggatgccatcaaagtcttctgcaacatggagactggtgagacctgcgtgtaccccactcagcccagtgtggcccagaagaactggtacatcagcaagaaccccaaggacaagaggcatgtctggttcggcgagagcatgaccgatggattccagttcgagtatggcggccagggctccgaccctgccgatgtggccatccagctgaccttcctgcgcctgatgtccaccgaggcctcccagaacatcacctaccactgcaagaacagcgtggcctacatggaccagcagactggcaacctcaagaaggccctgctcctccagggctccaacgagatcgagatccgcgccgagggcaacagccgcttcacctacagcgtcactgtcgatggctgcacgagtcacaccggagcctggggcaagacagtgattgaatacaaaaccaccaagacctcccgcctgcccatcatcgatgtggcccccttggacgttggtgccccagaccaggaattcggcttcgacgttggccctgtctgcttcctgtaaactccctccatcccaacctggctccctcccacccaaccaactttccccccaacccggaaacagacaagcaacccaaactgaaccccctcaaaagccaaaaaatgggagacaatttcacatggactttggaaaatatttttttcctttgcattcatctctcaaacttagtttttatctttgaccaaccgaacatgaccaaaaaccaaaagtgcattcaaccttaccaaaaaaaaaaaaaaaaaaagaataaataaataactttttaaaaaaggaagcttggtccacttgcttgaagacccatgcgggggtaagtccctttctgcccgttgggcttatgaaaccccaatgctgccctttctgctcctttctccacaccccccttggggcctcccctccactccttcccaaatctgtctccccagaagacacaggaaacaatgtattgtctgcccagcaatcaaaggcaatgctcaaacacccaagtggcccccaccctcagcccgctcctgcccgcccagcacccccaggccctgggggacctggggttctcagactgccaaagaagccttgccatctggcgctcccatggctcttgcaacatctccccttcgtttttgagggggtcatgccgggggagccaccagcccctcactgggttcggaggagagtcaggaagggccacgacaaagcagaaacatcggatttggggaacgcgtgtcaatcccttgtgccgcagggctgggcgggagagactgttctgttccttgtgtaactgtgttgctgaaagactacctcgttcttgtcttgatgtgtcaccggggcaactgcctgggggcggggatgggggcagggtggaagcggctccccattttataccaaaggtgctacatctatgtgatgggtggggtggggagggaatcactggtgctatagaaattgagatgcccccccaggccagcaaatgttcctttttgttcaaagtctatttttattccttgatatttttctttttttttttttttttttgtggatggggacttgtgaatttttctaaaggtgctatttaacatgggaggagagcgtgtgcggctccagcccagcccgctgctcactttccaccctctctccacctgcctctggcttctcaggcctctgctctccgacctctctcctctgaaaccctcctccacagctgcagcccatcctcccggctccctcctagtctgtcctgcgtcctctgtccccgggtttcagagacaacttcccaaagcacaaagcagtttttccccctaggggtgggaggaagcaaaagactctgtacctattttgtatgtgtataataatttgagatgtttttaattattttgattgctggaataaagcatgtggaaatgacccaaacataatcgtcggagcagacgggagtttctcctcggggtcggagcaggaggcacgcggagtgtgaggccacgcatgagcggacgctaaccccctccccagccacaaagagtctacatgtctagggtctagacatgttcagctttgtggacctccggctcctgctcctcttagcggccaccgccctcctgacgcacggccaagaggaaggccaagtcgagggccaagacgaagacatcccaccaatcacctgcgtacagaacggcctcaggtaccatgaccgagacgtgtggaaacccgagccctgccggatctgcgtctgcgacaacggcaaggtgttgtgcgatgacgtgatctgtgacgagaccaagaactgccccggcgccgaagtccccgagggcgagtgctgtcccgtctgccccgacggctcagagtcacccaccgaccaagaaaccaccggcgtcgagggacccaagggagacactggcccccgaggcccaaggggacccgcaggcccccctggccgagatggcatccctggacagcctggacttcccggaccccccggaccccccggacctcccggaccccctggcctcggaggaaactttgctccccagctgtcttatggctatgatgagaaatcaaccggaggaatttccgtgcctggccccatgggtccctctggtcctcgtggtctccctggcccccctggtgcacctggtccccaaggcttccaaggtccccctggtgagcctggcgagcctggagcttcaggtcccatgggtccccgaggtcccccaggtccccctggaaagaatggagatgatggggaagctggaaaacctggtcgtcctggtgagcgtgggcctcctgggcctcagggtgctcgaggattgcccggaacagctggcctccctggaatgaagggacacagaggtttcagtggtttggatggtgccaagggagatgctggtcctgctggtcctaagggtgagcctggcagccctggtgaaaatggagctcctggtcagatgggcccccgtggcctgcctggtgagagaggtcgccctggagcccctggccctgctggtgctcgtggaaatgatggtgctactggtgctgccgggccccctggtcccaccggccccgctggtcctcctggcttccctggtgctgttggtgctaagggtgaagctggtccccaagggccccgaggctctgaaggtccccagggtgtgcgtggtgagcctggcccccctggccctgctggtgctgctggccctgctggaaaccctggtgctgatggacagcctggtgctaaaggtgccaatggtgctcctggtattgctggtgctcctggcttccctggtgcccgaggcccctctggaccccagggccccggcggccctcctggtcccaagggtaacagcggtgaacctggtgctcctggcagcaaaggagacactggtgctaagggagagcctggccctgttggtgttcaaggaccccctggccctgctggagaggaaggaaagcgaggagctcgaggtgaacccggacccactggcctgcccggaccccctggcgagcgtggtggacctggtagccgtggtttccctggcgcagatggtgttgctggtcccaagggtcccgctggtgaacgtggttctcctggccctgctggccccaaaggatctcctggtgaagctggtcgtcccggtgaagctggtctgcctggtgccaagggtctgactggaagccctggcagccctggtcctgatggcaaaactggcccccctggtcccgccggtcaagatggtcgccccggacccccaggcccacctggtgcccgtggtcaggctggtgtgatgggattccctggacctaaaggtgctgctggagagcccggcaaggctggagagcgaggtgttcccggaccccctggcgctgtcggtcctgctggcaaagatggagaggctggagctcagggaccccctggccctgctggtcccgctggcgagagaggtgaacaaggccctgctggctcccccggattccagggtctccctggtcctgctggtcctccaggtgaagcaggcaaacctggtgaacagggtgttcctggagaccttggcgcccctggcccctctggagcaagaggcgagagaggtttccctggcgagcgtggtgtgcaaggtccccctggtcctgctggtccccgaggggccaacggtgctcccggcaacgatggtgctaagggtgatgctggtgcccctggagctcccggtagccagggcgcccctggccttcagggaatgcctggtgaacgtggtgcagctggtcttccagggcctaagggtgacagaggtgatgctggtcccaaaggtgctgatggctctcctggcaaagatggcgtccgtggtctgactggccccattggtcctcctggccctgctggtgcccctggtgacaagggtgaaagtggtcccagcggccctgctggtcccactggagctcgtggtgcccccggagaccgtggtgagcctggtccccccggccctgctggctttgctggcccccctggtgctgacggccaacctggtgctaaaggcgaacctggtgatgctggtgctaaaggcgatgctggtccccctggccctgccggacccgctggaccccctggccccattggtaatgttggtgctcctggagccaaaggtgctcgcggcagcgctggtccccctggtgctactggtttccctggtgctgctggccgagtcggtcctcctggcccctctggaaatgctggaccccctggccctcctggtcctgctggcaaagaaggcggcaaaggtccccgtggtgagactggccctgctggacgtcctggtgaagttggtccccctggtccccctggccctgctggcgagaaaggatcccctggtgctgatggtcctgctggtgctcctggtactcccgggcctcaaggtattgctggacagcgtggtgtggtcggcctgcctggtcagagaggagagagaggcttccctggtcttcctggcccctctggtgaacctggcaaacaaggtccctctggagcaagtggtgaacgtggtccccctggtcccatgggcccccctggattggctggaccccctggtgaatctggacgtgagggggctcctggtgccgaaggttcccctggacgagacggttctcctggcgccaagggtgaccgtggtgagaccggccccgctggaccccctggtgctcctggtgctcctggtgcccctggccccgttggccctgctggcaagagtggtgatcgtggtgagactggtcctgctggtcccaccggtcctgtcggccctgttggcgcccgtggccccgccggaccccaaggcccccgtggtgacaagggtgagacaggcgaacagggcgacagaggcataaagggtcaccgtggcttctctggcctccagggtccccctggccctcctggctctcctggtgaacaaggtccctctggagcctctggtcctgctggtccccgaggtccccctggctctgctggtgctcctggcaaagatggactcaacggtctccctggccccattgggccccctggtcctcgcggtcgcactggtgatgctggtcctgttggtccccccggccctcctggacctcctggtccccctggtcctcccagcgctggtttcgacttcagcttcctgccccagccacctcaagagaaggctcacgatggtggccgctactaccgggctgatgatgccaatgtggttcgtgaccgtgacctcgaggtggacaccaccctcaagagcctgagccagcagatcgagaacatccggagcccagagggcagccgcaagaaccccgcccgcacctgccgtgacctcaagatgtgccactctgactggaagagtggagagtactggattgaccccaaccaaggctgcaacctggatgccatcaaagtcttctgcaacatggagactggtgagacctgcgtgtaccccactcagcccagtgtggcccagaagaactggtacatcagcaagaaccccaaggacaagaggcatgtctggttcggcgagagcatgaccgatggattccagttcgagtatggcggccagggctccgaccctgccgatgtggccatccagctgaccttcctgcgcctgatgtccaccgaggcctcccagaacatcacctaccactgcaagaacagcgtggcctacatggaccagcagactggcaacctcaagaaggccctgctcctccagggctccaacgagatcgagatccgcgccgagggcaacagccgcttcacctacagcgtcactgtcgatggctgcacgagtcacaccggagcctggggcaagacagtgattgaatacaaaaccaccaagacctcccgcctgcccatcatcgatgtggcccccttggacgttggtgccccagaccaggaattcggcttcgacgttggccctgtctgcttcctgtaaactccctccatcccaacctggctccctcccacccaaccaactttccccccaacccggaaacagacaagcaacccaaactgaaccccctcaaaagccaaaaaatgggagacaatttcacatggactttggaaaatatttttttcctttgcattcatctctcaaacttagtttttatctttgaccaaccgaacatgaccaaaaaccaaaagtgcattcaaccttaccaaaaaaaaaaaaaaaaaaagaataaataaataactttttaaaaaaggaagcttggtccacttgcttgaagacccatgcgggggtaagtccctttctgcccgttgggcttatgaaaccccaatgctgccctttctgctcctttctccacaccccccttggggcctcccctccactccttcccaaatctgtctccccagaagacacaggaaacaatgtattgtctgcccagcaatcaaaggcaatgctcaaacacccaagtggcccccaccctcagcccgctcctgcccgcccagcacccccaggccctgggggacctggggttctcagactgccaaagaagccttgccatctggcgctcccatggctcttgcaacatctccccttcgtttttgagggggtcatgccgggggagccaccagcccctcactgggttcggaggagagtcaggaagggccacgacaaagcagaaacatcggatttggggaacgcgtgtcaatcccttgtgccgcagggctgggcgggagagactgttctgttccttgtgtaactgtgttgctgaaagactacctcgttcttgtcttgatgtgtcaccggggcaactgcctgggggcggggatgggggcagggtggaagcggctccccattttataccaaaggtgctacatctatgtgatgggtggggtggggagggaatcactggtgctatagaaattgagatgcccccccaggccagcaaatgttcctttttgttcaaagtctatttttattccttgatatttttctttttttttttttttttttgtggatggggacttgtgaatttttctaaaggtgctatttaacatgggaggagagcgtgtgcggctccagcccagcccgctgctcactttccaccctctctccacctgcctctggcttctcaggcctctgctctccgacctctctcctctgaaaccctcctccacagctgcagcccatcctcccggctccctcctagtctgtcctgcgtcctctgtccccgggtttcagagacaacttcccaaagcacaaagcagtttttccccctaggggtgggaggaagcaaaagactctgtacctattttgtatgtgtataataatttgagatgtttttaattattttgattgctggaataaagcatgtggaaatgacccaaacataatcgtcggagcagacgggagtttctcctcggggtcggagcaggaggcacgcggagtgtgaggccacgcatgagcggacgctaaccccctccccagccacaaagagtctacatgtctagggtctagacatgttcagctttgtggacctccggctcctgctcctcttagcggccaccgccctcctgacgcacggccaagaggaaggccaagtcgagggccaagacgaagacatcccaccaatcacctgcgtacagaacggcctcaggtaccatgaccgagacgtgtggaaacccgagccctgccggatctgcgtctgcgacaacggcaaggtgttgtgcgatgacgtgatctgtgacgagaccaagaactgccccggcgccgaagtccccgagggcgagtgctgtcccgtctgccccgacggctcagagtcacccaccgaccaagaaaccaccggcgtcgagggacccaagggagacactggcccccgaggcccaaggggacccgcaggcccccctggccgagatggcatccctggacagcctggacttcccggaccccccggaccccccggacctcccggaccccctggcctcggaggaaactttgctccccagctgtcttatggctatgatgagaaatcaaccggaggaatttccgtgcctggccccatgggtccctctggtcctcgtggtctccctggcccccctggtgcacctggtccccaaggcttccaaggtccccctggtgagcctggcgagcctggagcttcaggtcccatgggtccccgaggtcccccaggtccccctggaaagaatggagatgatggggaagctggaaaacctggtcgtcctggtgagcgtgggcctcctgggcctcagggtgctcgaggattgcccggaacagctggcctccctggaatgaagggacacagaggtttcagtggtttggatggtgccaagggagatgctggtcctgctggtcctaagggtgagcctggcagccctggtgaaaatggagctcctggtcagatgggcccccgtggcctgcctggtgagagaggtcgccctggagcccctggccctgctggtgctcgtggaaatgatggtgctactggtgctgccgggccccctggtcccaccggccccgctggtcctcctggcttccctggtgctgttggtgctaagggtgaagctggtccccaagggccccgaggctctgaaggtccccagggtgtgcgtggtgagcctggcccccctggccctgctggtgctgctggccctgctggaaaccctggtgctgatggacagcctggtgctaaaggtgccaatggtgctcctggtattgctggtgctcctggcttccctggtgcccgaggcccctctggaccccagggccccggcggccctcctggtcccaagggtaacagcggtgaacctggtgctcctggcagcaaaggagacactggtgctaagggagagcctggccctgttggtgttcaaggaccccctggccctgctggagaggaaggaaagcgaggagctcgaggtgaacccggacccactggcctgcccggaccccctggcgagcgtggtggacctggtagccgtggtttccctggcgcagatggtgttgctggtcccaagggtcccgctggtgaacgtggttctcctggccctgctggccccaaaggatctcctggtgaagctggtcgtcccggtgaagctggtctgcctggtgccaagggtctgactggaagccctggcagccctggtcctgatggcaaaactggcccccctggtcccgccggtcaagatggtcgccccggacccccaggcccacctggtgcccgtggtcaggctggtgtgatgggattccctggacctaaaggtgctgctggagagcccggcaaggctggagagcgaggtgttcccggaccccctggcgctgtcggtcctgctggcaaagatggagaggctggagctcagggaccccctggccctgctggtcccgctggcgagagaggtgaacaaggccctgctggctcccccggattccagggtctccctggtcctgctggtcctccaggtgaagcaggcaaacctggtgaacagggtgttcctggagaccttggcgcccctggcccctctggagcaagaggcgagagaggtttccctggcgagcgtggtgtgcaaggtccccctggtcctgctggtccccgaggggccaacggtgctcccggcaacgatggtgctaagggtgatgctggtgcccctggagctcccggtagccagggcgcccctggccttcagggaatgcctggtgaacgtggtgcagctggtcttccagggcctaagggtgacagaggtgatgctggtcccaaaggtgctgatggctctcctggcaaagatggcgtccgtggtctgactggccccattggtcctcctggccctgctggtgcccctggtgacaagggtgaaagtggtcccagcggccctgctggtcccactggagctcgtggtgcccccggagaccgtggtgagcctggtccccccggccctgctggctttgctggcccccctggtgctgacggccaacctggtgctaaaggcgaacctggtgatgctggtgctaaaggcgatgctggtccccctggccctgccggacccgctggaccccctggccccattggtaatgttggtgctcctggagccaaaggtgctcgcggcagcgctggtccccctggtgctactggtttccctggtgctgctggccgagtcggtcctcctggcccctctggaaatgctggaccccctggccctcctggtcctgctggcaa

SEQ ID NO: 665 - DNA, 32765 bp, Homo sapiens
  misc_feature (110)..(110): second gene starts at position 110
atggggagagaccagcgcgcggtggccggccctgccctacggcggtggctgctgctggggacagtgaccgtggggttcctcgcccagagcgtcttggcgggtgtgaagaagtttgatgtgccgtgtggaggaagagattgcagtgggggctgccagtgctaccctgagaaaggtggacgtggtcagcctgggccagtgggcccccaggggtacaatgggccaccaggattacaaggattcccgggactgcagggacgtaaaggagacaagggtgaaaggggagcccccggagtaacgggacccaagggcgacgtgggagcaagaggcgtttctggattccctggtgccgatggaattcctggacacccggggcaaggtgggcccaggggaaggccgggctacgatggctgcaacggaacccagggagactcaggtccacaggggccccccggctctgaggggttcaccgggcctcccgggccccaaggaccaaaagggcagaaaggtgagccttatgcactgcctaaagaggagcgcgacagatatcggggtgaacctggagagcctggattggtcggtttccagggacctcccggccgccctgggcatgtgggacagatgggtccagttggagctccagggagaccaggaccacctggaccccctggaccaaaaggacagcaaggcaacagaggacttggtttctacggagttaagggtgaaaagggtgacgtagggcagccgggacccaacgggattccatcagacaccctccaccccatcatcgcgcccacaggagtcaccttccacccagatcagtacaagggtgaaaaaggcagtgagggggaaccaggaataagaggcatttccttgaagggagaagaaggaatcatgggctttcctggactgaggggttaccctggcttgagtggtgaaaaaggatcaccaggacagaagggaagccgaggcctggatggctatcaagggcctgatggaccccggggacccaagggagaagccggagacccagggccccctggactacctgcctactcccctcacccttccctagcaaaaggtgccagaggtgacccgggattcccaggggcccaaggggagccaggaagccagggtgagccaggagacccgggcctcccaggtccccctggcctctccatcggagatggagatcagaggagaggcctgccgggtgagatgggacccaagggcttcatcggagaccccggcatccctgcgctctacgggggcccacctggacctgatggaaagcgagggcctccaggaccccccgggctccctggaccacctggacctgatggcttcctgtttgggctgaaaggagcaaaaggaagagcaggcttccctgggcttcccggctcccctggagcccgcggaccaaaggggtggaaaggtgacgctggggaatgcagatgtacagaaggcgacgaagctatcaaaggtcttccgggactgccaggacccaagggcttcgcaggcatcaacggggagccggggaggaaaggggacagaggagaccccggccaacacggcctccctgggttcccagggctcaagggagtgcctggcaacattggtgctcccggacccaaaggagcaaaaggagattccagaacaatcacaaccaaaggtgagcggggacagcccggcgtcccaggtgtgcccgggatgaaaggtgacgatggcagcccaggccgcgatgggctcgatggattccccggcctcccaggccctcccggtgatggcatcaagggccctccaggggacccaggctatccaggaatacctggaacgaagggtactccaggagaaatgggccccccaggactgggccttcccggcctcaaaggccaacgtggtttccctggagacgccggcttacctggaccaccaggcttcctgggccctcctggccccgcagggaccccaggacaaatagattgtgacacagatgtgaaaagggccgttggaggtgacagacaggaggccatccagccaggttgcataggagggcccaagggattgccaggcctgccaggacccccaggccccacaggtgccaaaggcctccgaggaatcccaggcttcgcaggagctgatggaggaccagggcccaggggcttgccaggagacgcaggtcgtgaagggttcccaggacccccagggttcataggaccccgaggatccaaaggtgcagtgggcctccctggcccagatggatccccaggtcccatcggcctgccagggccagatgggccccctggggaaaggggcctccctggagaagtcctgggagctcagcccgggccacggggagatgctggtgtgcctggacagcctgggcttaaaggccttcccggagacagaggcccccctggattcagaggaagccaagggatgcctgggatgccagggctgaagggccagccaggcctcccaggaccttccggccagccaggcctgtatgggcctccaggactgcatggattcccaggagctcctggccaagaggggcccttggggctgccaggaatcccaggccgtgaaggtctgcctggtgatagaggggaccctggggacacaggcgctcctggccctgtgggcatgaaaggtctctctggtgacagaggagatgctggcttcacaggggagcaaggccatccaggaagccctggatttaaaggaattgatggaatgcctgggacccccgggctaaaaggagatagaggctcacctgggatggatggtttccaaggcatgcctggactcaaagggagacccgggtttccagggagcaaaggcgaggctggatttttcggaatacccggtctgaagggtctggctggtgagccaggttttaaaggcagccgaggggaccctgggcccccaggaccacctcctgtcatcctgccaggaatgaaagacattaaaggagagaaaggagatgaagggcctatggggctgaaaggatacctgggcgcaaaaggtatccaaggaatgccaggcatcccagggctgtcaggaatccctgggctgcctgggaggcccggccacatcaaaggagtcaagggagacatcggagtccccggcatccccggtttgccaggattccctggggtggctggcccccctggaattacgggattcccaggattcataggaagccggggtgacaaaggtgccccagggagagcaggcctgtatggcgagattggcgcgactggtgatttcggtgacatcggggacactataaatttaccaggaagaccaggcctgaagggggagcggggcaccactggaataccaggtctgaagggattctttggagagaagggaacagaaggtgacatcggcttccctgggataacaggcgtgactggagtccaaggccctcctggacttaaaggacaaacaggctttccagggctgactgggcctccagggtcgcagggagagctggggcggattggactgcctggtggcaaaggagatgatggctggccgggagctccgggcttaccaggttttccgggactccgtgggatccgcggcttacacggcttgccaggcaccaagggctttccaggatccccaggttctgacatccacggagacccaggcttcccaggccctcctggggaaagaggtgacccaggagaggccaacacccttccaggccctgtgggagtcccaggacagaaaggagaccaaggagctccaggggaacgaggcccacctgggagcccaggacttcaggggttccctggtatcacacccccttccaacatctctggggcacctggtgacaaaggggcgccagggatatttggcctgaaaggttatcggggcccaccagggccaccaggttctgctgctcttcctggaagcaaaggtgacacagggaacccaggagctccaggaaccccagggaccaaaggatgggccggggactccgggccccagggcaggcctggtgtgtttggtctcccaggagaaaaagggcccaggggtgaacaaggcttcatggggaacactggacccactggggcggtgggcgacagaggccccaagggacccaagggagacactggcccccgaggcccaaggggacccgcaggcccccctggccgagatggcatccctggacagcctggacttcccggaccccccggaccccccggacctcccggaccccctggcctcggaggaaactttgctccccagctgtcttatggctatgatgagaaatcaaccggaggaatttccgtgcctggccccatgggtccctctggtcctcgtggtctccctggcccccctggtgcacctggtccccaaggcttccaaggtccccctggtgagcctggcgagcctggagcttcaggtcccatgggtccccgaggtcccccaggtccccctggaaagaatggagatgatggggaagctggaaaacctggtcgtcctggtgagcgtgggcctcctgggcctcagggtgctcgaggattgcccggaacagctggcctccctggaatgaagggacacagaggtttcagtggtttggatggtgccaagggagatgctggtcctgctggtcctaagggtgagcctggcagccctggtgaaaatggagctcctggtcagatgggcccccgtggcctgcctggtgagagaggtcgccctggagcccctggccctgctggtgctcgtggaaatgatggtgctactggtgctgccgggccccctggtcccaccggccccgctggtcctcctggcttccctggtgctgttggtgctaagggtgaagctggtccccaagggccccgaggctctgaaggtccccagggtgtgcgtggtgagcctggcccccctggccctgctggtgctgctggccctgctggaaaccctggtgctgatggacagcctggtgctaaaggtgccaatggtgctcctggtattgctggtgctcctggcttccctggtgcccgaggcccctctggaccccagggccccggcggccctcctggtcccaagggtaacagcggtgaacctggtgctcctggcagcaaaggagacactggtgctaagggagagcctggccctgttggtgttcaaggaccccctggccctgctggagaggaaggaaagcgaggagctcgaggtgaacccggacccactggcctgcccggaccccctggcgagcgtggtggacctggtagccgtggtttccctggcgcagatggtgttgctggtcccaagggtcccgctggtgaacgtggttctcctggccctgctggccccaaaggatctcctggtgaagctggtcgtcccggtgaagctggtctgcctggtgccaagggtctgactggaagccctggcagccctggtcctgatggcaaaactggcccccctggtcccgccggtcaagatggtcgccccggacccccaggcccacctggtgcccgtggtcaggctggtgtgatgggattccctggacctaaaggtgctgctggagagcccggcaaggctggagagcgaggtgttcccggaccccctggcgctgtcggtcctgctggcaaagatggagaggctggagctcagggaccccctggccctgctggtcccgctggcgagagaggtgaacaaggccctgctggctcccccggattccagggtctccctggtcctgctggtcctccaggtgaagcaggcaaacctggtgaacagggtgttcctggagaccttggcgcccctggcccctctggagcaagaggcgagagaggtttccctggcgagcgtggtgtgcaaggtccccctggtcctgctggtccccgaggggccaacggtgctcccggcaacgatggtgctaagggtgatgctggtgcccctggagctcccggtagccagggcgcccctggccttcagggaatgcctggtgaacgtggtgcagctggtcttccagggcctaagggtgacagaggtgatgctggtcccaaaggtgctgatggctctcctggcaaagatggcgtccgtggtctgactggccccattggtcctcctggccctgctggtgcccctggtgacaagggtgaaagtggtcccagcggccctgctggtcccactggagctcgtggtgcccccggagaccgtggtgagcctggtccccccggccctgctggctttgctggcccccctggtgctgacggccaacctggtgctaaaggcgaacctggtgatgctggtgctaaaggcgatgctggtccccctggccctgccggacccgctggaccccctggccccattggtaatgttggtgctcctggagccaaaggtgctcgcggcagcgctggtccccctggtgctactggtttccctggtgctgctggccgagtcggtcctcctggcccctctggaaatgctggaccccctggccctcctggtcctgctggcaaagaaggcggcaaaggtccccgtggtgagactggccctgctggacgtcctggtgaagttggtccccctggtccccctggccctgctggcgagaaaggatcccctggtgctgatggtcctgctggtgctcctggtactcccgggcctcaaggtattgctggacagcgtggtgtggtcggcctgcctggtcagagaggagagagaggcttccctggtcttcctggcccctctggtgaacctggcaaacaaggtccctctggagcaagtggtgaacgtggtccccctggtcccatgggcccccctggattggctggaccccctggtgaatctggacgtgagggggctcctggtgccgaaggttcccctggacgagacggttctcctggcgccaagggtgaccgtggtgagaccggccccgctggaccccctggtgctcctggtgctcctggtgcccctggccccgttggccctgctggcaagagtggtgatcgtggtgagactggtcctgctggtcccaccggtcctgtcggccctgttggcgcccgtggccccgccggaccccaaggcccccgtggtgacaagggtgagacaggcgaacagggcgacagaggcataaagggtcaccgtggcttctctggcctccagggtccccctggccctcctggctctcctggtgaacaaggtccctctggagcctctggtcctgctggtccccgaggtccccctggctctgctggtgctcctggcaaagatggactcaacggtctccctggccccattgggccccctggtcctcgcggtcgcactggtgatgctggtcctgttggtccccccggccctcctggacctcctggtccccctggtcctcccagcgctggtttcgacttcagcttcctgccccagccacctcaagagaaggctcacgatggtggccgctactaccgggctgatgatgccaatgtggttcgtgaccgtgacctcgaggtggacaccaccctcaagagcctgagccagcagatcgagaacatccggagcccagagggcagccgcaagaaccccgcccgcacctgccgtgacctcaagatgtgccactctgactggaagagtggagagtactggattgaccccaaccaaggctgcaacctggatgccatcaaagtcttctgcaacatggagactggtgagacctgcgtgtaccccactcagcccagtgtggcccagaagaactggtacatcagcaagaaccccaaggacaagaggcatgtctggttcggcgagagcatgaccgatggattccagttcgagtatggcggccagggctccgaccctgccgatgtggccatccagctgaccttcctgcgcctgatgtccaccgaggcctcccagaacatcacctaccactgcaagaacagcgtggcctacatggaccagcagactggcaacctcaagaaggccctgctcctccagggctccaacgagatcgagatccgcgccgagggcaacagccgcttcacctacagcgtcactgtcgatggctgcacgagtcacaccggagcctggggcaagacagtgattgaatacaaaaccaccaagacctcccgcctgcccatcatcgatgtggcccccttggacgttggtgccccagaccaggaattcggcttcgacgttggccctgtctgcttcctgtaaactccctccatcccaacctggctccctcccacccaaccaactttccccccaacccggaaacagacaagcaacccaaactgaaccccctcaaaagccaaaaaatgggagacaatttcacatggactttggaaaatatttttttcctttgcattcatctctcaaacttagtttttatctttgaccaaccgaacatgaccaaaaaccaaaagtgcattcaaccttaccaaaaaaaaaaaaaaaaaaagaataaataaataactttttaaaaaaggaagcttggtccacttgcttgaagacccatgcgggggtaagtccctttctgcccgttgggcttatgaaaccccaatgctgccctttctgctcctttctccacaccccccttggggcctcccctccactccttcccaaatctgtctccccagaagacacaggaaacaatgtattgtctgcccagcaatcaaaggcaatgctcaaacacccaagtggcccccaccctcagcccgctcctgcccgcccagcacccccaggccctgggggacctggggttctcagactgccaaagaagccttgccatctggcgctcccatggctcttgcaacatctccccttcgtttttgagggggtcatgccgggggagccaccagcccctcactgggttcggaggagagtcaggaagggccacgacaaagcagaaacatcggatttggggaacgcgtgtcaatcccttgtgccgcagggctgggcgggagagactgttctgttccttgtgtaactgtgttgctgaaagactacctcgttcttgtcttgatgtgtcaccggggcaactgcctgggggcggggatgggggcagggtggaagcggctccccattttataccaaaggtgctacatctatgtgatgggtggggtggggagggaatcactggtgctatagaaattgagatgcccccccaggccagcaaatgttcctttttgttcaaagtctatttttattccttgatatttttctttttttttttttttttttgtggatggggacttgtgaatttttctaaaggtgctatttaacatgggaggagagcgtgtgcggctccagcccagcccgctgctcactttccaccctctctccacctgcctctggcttctcaggcctctgctctccgacctctctcctctgaaaccctcctccacagctgcagcccatcctcccggctccctcctagtctgtcctgcgtcctctgtccccgggtttcagagacaacttcccaaagcacaaagcagtttttccccctaggggtgggaggaagcaaaagactctgtacctattttgtatgtgtataataatttgagatgtttttaattattttgattgctggaataaagcatgtggaaatgacccaaacataatcgtcggagcagacgggagtttctcctcggggtcggagcaggaggcacgcggagtgtgaggccacgcatgagcggacgctaaccccctccccagccacaaagagtctacatgtctagggtctagacatgttcagctttgtggacctccggctcctgctcctcttagcggccaccgccctcctgacgcacggccaagaggaaggccaagtcgagggccaagacgaagacatcccaccaatcacctgcgtacagaacggcctcaggtaccatgaccgagacgtgtggaaacccgagccctgccggatctgcgtctgcgacaacggcaaggtgttgtgcgatgacgtgatctgtgacgagaccaagaactgccccggcgccgaagtccccgagggcgagtgctgtcccgtctgccccgacggctcagagtcacccaccgaccaagaaaccaccggcgtcgagggacccaagggagacactggcccccgaggcccaaggggacccgcaggcccccctggccgagatggcatccctggacagcctggacttcccggaccccccggaccccccggacctcccggaccccctggcctcggaggaaactttgctccccagctgtcttatggctatgatgagaaatcaaccggaggaatttccgtgcctggccccatgggtccctctggtcctcgtggtctccctggcccccctggtgcacctggtccccaaggcttccaaggtccccctggtgagcctggcgagcctggagcttcaggtcccatgggtccccgaggtcccccaggtccccctggaaagaatggagatgatggggaagctggaaaacctggtcgtcctggtgagcgtgggcctcctgggcctcagggtgctcgaggattgcccggaacagctggcctccctggaatgaagggacacagaggtttcagtggtttggatggtgccaagggagatgctggtcctgctggtcctaagggtgagcctggcagccctggtgaaaatggagctcctggtcagatgggcccccgtggcctgcctggtgagagaggtcgccctggagcccctggccctgctggtgctcgtggaaatgatggtgctactggtgctgccgggccccctggtcccaccggccccgctggtcctcctggcttccctggtgctgttggtgctaagggtgaagctggtccccaagggccccgaggctctgaaggtccccagggtgtgcgtggtgagcctggcccccctggccctgctggtgctgctggccctgctggaaaccctggtgctgatggacagcctggtgctaaaggtgccaatggtgctcctggtattgctggtgctcctggcttccctggtgcccgaggcccctctggaccccagggccccggcggccctcctggtcccaagggtaacagcggtgaacctggtgctcctggcagcaaaggagacactggtgctaagggagagcctggccctgttggtgttcaaggaccccctggccctgctggagaggaaggaaagcgaggagctcgaggtgaacccggacccactggcctgcccggaccccctggcgagcgtggtggacctggtagccgtggtttccctggcgcagatggtgttgctggtcccaagggtcccgctggtgaacgtggttctcctggccctgctggccccaaaggatctcctggtgaagctggtcgtcccggtgaagctggtctgcctggtgccaagggtctgactggaagccctggcagccctggtcctgatggcaaaactggcccccctggtcccgccggtcaagatggtcgccccggacccccaggcccacctggtgcccgtggtcaggctggtgtgatgggattccctggacctaaaggtgctgctggagagcccggcaaggctggagagcgaggtgttcccggaccccctggcgctgtcggtcctgctggcaaagatggagaggctggagctcagggaccccctggccctgctggtcccgctggcgagagaggtgaacaaggccctgctggctcccccggattccagggtctccctggtcctgctggtcctccaggtgaagcaggcaaacctggtgaacagggtgttcctggagaccttggcgcccctggcccctctggagcaagaggcgagagaggtttccctggcgagcgtggtgtgcaaggtccccctggtcctgctggtccccgaggggccaacggtgctcccggcaacgatggtgctaagggtgatgctggtgcccctggagctcccggtagccagggcgcccctggccttcagggaatgcctggtgaacgtggtgcagctggtcttccagggcctaagggtgacagaggtgatgctggtcccaaaggtgctgatggctctcctggcaaagatggcgtccgtggtctgactggccccattggtcctcctggccctgctggtgcccctggtgacaagggtgaaagtggtcccagcggccctgctggtcccactggagctcgtggtgcccccggagaccgtggtgagcctggtccccccggccctgctggctttgctggcccccctggtgctgacggccaacctggtgctaaaggcgaacctggtgatgctggtgctaaaggcgatgctggtccccctggccctgccggacccgctggaccccctggccccattggtaatgttggtgctcctggagccaaaggtgctcgcggcagcgctggtccccctggtgctactggtttccctggtgctgctggccgagtcggtcctcctggcccctctggaaatgctggaccccctggccctcctggtcctgctggcaaagaaggcggcaaaggtccccgtggtgagactggccctgctggacgtcctggtgaagttggtccccctggtccccctggccctgctggcgagaaaggatcccctggtgctgatggtcctgctggtgctcctggtactcccgggcctcaaggtattgctggacagcgtggtgtggtcggcctgcctggtcagagaggagagagaggcttccctggtcttcctggcccctctggtgaacctggcaaacaaggtccctctggagcaagtggtgaacgtggtccccctggtcccatgggcccccctggattggctggaccccctggtgaatctggacgtgagggggctcctggtgccgaaggttcccctggacgagacggttctcctggcgccaagggtgaccgtggtgagaccggccccgctggaccccctggtgctcctggtgctcctggtgcccctggccccgttggccctgctggcaagagtggtgatcgtggtgagactggtcctgctggtcccaccggtcctgtcggccctgttggcgcccgtggccccgccggaccccaaggcccccgtggtgacaagggtgagacaggcgaacagggcgacagaggcataaagggtcaccgtggcttctctggcctccagggtccccctggccctcctggctctcctggtgaacaaggtccctctggagcctctggtcctgctggtccccgaggtccccctggctctgctggtgctcctggcaaagatggactcaacggtctccctggccccattgggccccctggtcctcgcggtcgcactggtgatgctggtcctgttggtccccccggccctcctggacctcctggtccccctggtcctcccagcgctggtttcgacttcagcttcctgccccagccacctcaagagaaggctcacgatggtggccgctactaccgggctgatgatgccaatgtggttcgtgaccgtgacctcgaggtggacaccaccctcaagagcctgagccagcagatcgagaacatccggagcccagagggcagccgcaagaaccccgcccgcacctgccgtgacctcaagatgtgccactctgactggaagagtggagagtactggattgaccccaaccaaggctgcaacctggatgccatcaaagtcttctgcaacatggagactggtgagacctgcgtgtaccccactcagcccagtgtggcccagaagaactggtacatcagcaagaaccccaaggacaagaggcatgtctggttcggcgagagcatgaccgatggattccagttcgagtatggcggccagggctccgaccctgccgatgtggccatccagctgaccttcctgcgcctgatgtccaccgaggcctcccagaacatcacctaccactgcaagaacagcgtggcctacatggaccagcagactggcaacctcaagaaggccctgctcctccagggctccaacgagatcgagatccgcgccgagggcaacagccgcttcacctacagcgtcactgtcgatggctgcacgagtcacaccggagcctggggcaagacagtgattgaatacaaaaccaccaagacctcccgcctgcccatcatcgatgtggcccccttggacgttggtgccccagaccaggaattcggcttcgacgttggccctgtctgcttcctgtaaactccctccatcccaacctggctccctcccacccaaccaactttccccccaacccggaaacagacaagcaacccaaactgaaccccctcaaaagccaaaaaatgggagacaatttcacatggactttggaaaatatttttttcctttgcattcatctctcaaacttagtttttatctttgaccaaccgaacatgaccaaaaaccaaaagtgcattcaaccttaccaaaaaaaaaaaaaaaaaaagaataaataaataactttttaaaaaaggaagcttggtccacttgcttgaagacccatgcgggggtaagtccctttctgcccgttgggcttatgaaaccccaatgctgccctttctgctcctttctccacaccccccttggggcctcccctccactccttcccaaatctgtctccccagaagacacaggaaacaatgtattgtctgcccagcaatcaaaggcaatgctcaaacacccaagtggcccccaccctcagcccgctcctgcccgcccagcacccccaggccctgggggacctggggttctcagactgccaaagaagccttgccatctggcgctcccatggctcttgcaacatctccccttcgtttttgagggggtcatgccgggggagccaccagcccctcactgggttcggaggagagtcaggaagggccacgacaaagcagaaacatcggatttggggaacgcgtgtcaatcccttgtgccgcagggctgggcgggagagactgttctgttccttgtgtaactgtgttgctgaaagactacctcgttcttgtcttgatgtgtcaccggggcaactgcctgggggcggggatgggggcagggtggaagcggctccccattttataccaaaggtgctacatctatgtgatgggtggggtggggagggaatcactggtgctatagaaattgagatgcccccccaggccagcaaatgttcctttttgttcaaagtctatttttattccttgatatttttctttttttttttttttttttgtggatggggacttgtgaatttttctaaaggtgctatttaacatgggaggagagcgtgtgcggctccagcccagcccgctgctcactttccaccctctctccacctgcctctggcttctcaggcctctgctctccgacctctctcctctgaaaccctcctccacagctgcagcccatcctcccggctccctcctagtctgtcctgcgtcctctgtccccgggtttcagagacaacttcccaaagcacaaagcagtttttccccctaggggtgggaggaagcaaaagactctgtacctattttgtatgtgtataataatttgagatgtttttaattattttgattgctggaataaagcatgtggaaatgacccaaacataatcgtcggagcagacgggagtttctcctcggggtcggagcaggaggcacgcggagtgtgaggccacgcatgagcggacgctaaccccctccccagccacaaagagtctacatgtctagggtctagacatgttcagctttgtggacctccggctcctgctcctcttagcggccaccgccctcctgacgcacggccaagaggaaggccaagtcgagggccaagacgaagacatcccaccaatcacctgcgtacagaacggcctcaggtaccatgaccgagacgtgtggaaacccgagccctgccggatctgcgtctgcgacaacggcaaggtgttgtgcgatgacgtgatctgtgacgagaccaagaactgccccggcgccgaagtccccgagggcgagtgctgtcccgtctgccccgacggctcagagtcacccaccgaccaagaaaccaccggcgtcgagggacccaagggagacactggcccccgaggcccaaggggacccgcaggcccccctggccgagatggcatccctggacagcctggacttcccggaccccccggaccccccggacctcccggaccccctggcctcggaggaaactttgctccccagctgtcttatggctatgatgagaaatcaaccggaggaatttccgtgcctggccccatgggtccctctggtcctcgtggtctccctggcccccctggtgcacctggtccccaaggcttccaaggtccccctggtgagcctggcgagcctggagcttcaggtcccatgggtccccgaggtcccccaggtccccctggaaagaatggagatgatggggaagctggaaaacctggtcgtcctggtgagcgtgggcctcctgggcctcagggtgctcgaggattgcccggaacagctggcctccctggaatgaagggacacagaggtttcagtggtttggatggtgccaagggagatgctggtcctgctggtcctaagggtgagcctggcagccctggtgaaaatggagctcctggtcagatgggcccccgtggcctgcctggtgagagaggtcgccctggagcccctggccctgctggtgctcgtggaaatgatggtgctactggtgctgccgggccccctggtcccaccggccccgctggtcctcctggcttccctggtgctgttggtgctaagggtgaagctggtccccaagggccccgaggctctgaaggtccccagggtgtgcgtggtgagcctggcccccctggccctgctggtgctgctggccctgctggaaaccctggtgctgatggacagcctggtgctaaaggtgccaatggtgctcctggtattgctggtgctcctggcttccctggtgcccgaggcccctctggaccccagggccccggcggccctcctggtcccaagggtaacagcggtgaacctggtgctcctggcagcaaaggagacactggtgctaagggagagcctggccctgttggtgttcaaggaccccctggccctgctggagaggaaggaaagcgaggagctcgaggtgaacccggacccactggcctgcccggaccccctggcgagcgtggtggacctggtagccgtggtttccctggcgcagatggtgttgctggtcccaagggtcccgctggtgaacgtggttctcctggccctgctggccccaaaggatctcctggtgaagctggtcgtcccggtgaagctggtctgcctggtgccaagggtctgactggaagccctggcagccctggtcctgatggcaaaactggcccccctggtcccgccggtcaagatggtcgccccggacccccaggcccacctggtgcccgtggtcaggctggtgtgatgggattccctggacctaaaggtgctgctggagagcccggcaaggctggagagcgaggtgttcccggaccccctggcgctgtcggtcctgctggcaaagatggagaggctggagctcagggaccccctggccctgctggtcccgctggcgagagaggtgaacaaggccctgctggctcccccggattccagggtctccctggtcctgctggtcctccaggtgaagcaggcaaacctggtgaacagggtgttcctggagaccttggcgcccctggcccctctggagcaagaggcgagagaggtttccctggcgagcgtggtgtgcaaggtccccctggtcctgctggtccccgaggggccaacggtgctcccggcaacgatggtgctaagggtgatgctggtgcccctggagctcccggtagccagggcgcccctggccttcagggaatgcctggtgaacgtggtgcagctggtcttccagggcctaagggtgacagaggtgatgctggtcccaaaggtgctgatggctctcctggcaaagatggcgtccgtggtctgactggccccattggtcctcctggccctgctggtgcccctggtgacaagggtgaaagtggtcccagcggccctgctggtcccactggagctcgtggtgcccccggagaccgtggtgagcctggtccccccggccctgctggctttgctggcccccctggtgctgacggccaacctggtgctaaaggcgaacctggtgatgctggtgctaaaggcgatgctggtccccctggccctgccggacccgctggaccccctggccccattggtaatgttggtgctcctggagccaaaggtgctcgcggcagcgctggtccccctggtgctactggtttccctggtgctgctggccgagtcggtcctcctggcccctctggaaatgctggaccccctggccctcctggtcctgctggcaaagaaggcggcaaaggtccccgtggtgagactggccctgctggacgtcctggtgaagttggtccccctggtccccctggccctgctggcgagaaaggatcccctggtgctgatggtcctgctggtgctcctggtactcccgggcctcaaggtattgctggacagcgtggtgtggtcggcctgcctggtcagagaggagagagaggcttccctggtcttcctggcccctctggtgaacctggcaaacaaggtccctctggagcaagtggtgaacgtggtccccctggtcccatgggcccccctggattggctggaccccctggtgaatctggacgtgagggggctcctggtgccgaaggttcccctggacgagacggttctcctggcgccaagggtgaccgtggtgagaccggccccgctggaccccctggtgctcctggtgctcctggtgcccctggccccgttggccctgctggcaagagtggtgatcgtggtgagactggtcctgctggtcccaccggtcctgtcggccctgttggcgcccgtggccccgccggaccccaaggcccccgtggtgacaagggtgagacaggcgaacagggcgacagaggcataaagggtcaccgtggcttctctggcctccagggtccccctggccctcctggctctcctggtgaacaaggtccctctggagcctctggtcctgctggtccccgaggtccccctggctctgctggtgctcctggcaaagatggactcaacggtctccctggccccattgggccccctggtcctcgcggtcgcactggtgatgctggtcctgttggtccccccggccctcctggacctcctggtccccctggtcctcccagcgctggtttcgacttcagcttcctgccccagccacctcaagagaaggctcacgatggtggccgctactaccgggctgatgatgccaatgtggttcgtgaccgtgacctcgaggtggacaccaccctcaagagcctgagccagcagatcgagaacatccggagcccagagggcagccgcaagaaccccgcccgcacctgccgtgacctcaagatgtgccactctgactggaagagtggagagtactggattgaccccaaccaaggctgcaacctggatgccatcaaagtcttctgcaacatggagactggtgagacctgcgtgtaccccactcagcccagtgtggcccagaagaactggtacatcagcaagaaccccaaggacaagaggcatgtctggttcggcgagagcatgaccgatggattccagttcgagtatggcggccagggctccgaccctgccgatgtggccatccagctgaccttcctgcgcctgatgtccaccgaggcctcccagaacatcacctaccactgcaagaacagcgtggcctacatggaccagcagactggcaacctcaagaaggccctgctcctccagggctccaacgagatcgagatccgcgccgagggcaacagccgcttcacctacagcgtcactgtcgatggctgcacgagtcacaccggagcctggggcaagacagtgattgaatacaaaaccaccaagacctcccgcctgcccatcatcgatgtggcccccttggacgttggtgccccagaccaggaattcggcttcgacgttggccctgtctgcttcctgtaaactccctccatcccaacctggctccctcccacccaaccaactttccccccaacccggaaacagacaagcaacccaaactgaaccccctcaaaagccaaaaaatgggagacaatttcacatggactttggaaaatatttttttcctttgcattcatctctcaaacttagtttttatctttgaccaaccgaacatgaccaaaaaccaaaagtgcattcaaccttaccaaaaaaaaaaaaaaaaaaagaataaataaataactttttaaaaaaggaagcttggtccacttgcttgaagacccatgcgggggtaagtccctttctgcccgttgggcttatgaaaccccaatgctgccctttctgctcctttctccacaccccccttggggcctcccctccactccttcccaaatctgtctccccagaagacacaggaaacaatgtattgtctgcccagcaatcaaaggcaatgctcaaacacccaagtggcccccaccctcagcccgctcctgcccgcccagcacccccaggccctgggggacctggggttctcagactgccaaagaagccttgccatctggcgctcccatggctcttgcaacatctccccttcgtttttgagggggtcatgccgggggagccaccagcccctcactgggttcggaggagagtcaggaagggccacgacaaagcagaaacatcggatttggggaacgcgtgtcaatcccttgtgccgcagggctgggcgggagagactgttctgttccttgtgtaactgtgttgctgaaagactacctcgttcttgtcttgatgtgtcaccggggcaactgcctgggggcggggatgggggcagggtggaagcggctccccattttataccaaaggtgctacatctatgtgatgggtggggtggggagggaatcactggtgctatagaaattgagatgcccccccaggccagcaaatgttcctttttgttcaaagtctatttttattccttgatatttttctttttttttttttttttttgtggatggggacttgtgaatttttctaaaggtgctatttaacatgggaggagagcgtgtgcggctccagcccagcccgctgctcactttccaccctctctccacctgcctctggcttctcaggcctctgctctccgacctctctcctctgaaaccctcctccacagctgcagcccatcctcccggctccctcctagtctgtcctgcgtcctctgtccccgggtttcagagacaacttcccaaagcacaaagcagtttttccccctaggggtgggaggaagcaaaagactctgtacctattttgtatgtgtataataatttgagatgtttttaattattttgattgctggaataaagcatgtggaaatgacccaaacataatcgtcggagcagacgggagtttctcctcggggtcggagcaggaggcacgcggagtgtgaggccacgcatgagcggacgctaaccccctccccagccacaaagagtctacatgtctagggtctagacatgttcagctttgtggacctccggctcctgctcctcttagcggccaccgccctcctgacgcacggccaagaggaaggccaagtcgagggccaagacgaagacatcccaccaatcacctgcgtacagaacggcctcaggtaccatgaccgagacgtgtggaaacccgagccctgccggatctgcgtctgcgacaacggcaaggtgttgtgcgatgacgtgatctgtgacgagaccaagaactgccccggcgccgaagtccccgagggcgagtgctgtcccgtctgccccgacggctcagagtcacccaccgaccaagaaaccaccggcgtcgagggacccaagggagacactggcccccgaggcccaaggggacccgcaggcccccctggccgagatggcatccctggacagcctggacttcccggaccccccggaccccccggacctcccggaccccctggcctcggaggaaactttgctccccagctgtcttatggctatgatgagaaatcaaccggaggaatttccgtgcctggccccatgggtccctctggtcctcgtggtctccctggcccccctggtgcacctggtccccaaggcttccaaggtccccctggtgagcctggcgagcctggagcttcaggtcccatgggtccccgaggtcccccaggtccccctggaaagaatggagatgatggggaagctggaaaacctggtcgtcctggtgagcgtgggcctcctgggcctcagggtgctcgaggattgcccggaacagctggcctccctggaatgaagggacacagaggtttcagtggtttggatggtgccaagggagatgctggtcctgctggtcctaagggtgagcctggcagccctggtgaaaatggagctcctggtcagatgggcccccgtggcctgcctggtgagagaggtcgccctggagcccctggccctgctggtgctcgtggaaatgatggtgctactggtgctgccgggccccctggtcccaccggccccgctggtcctcctggcttccctggtgctgttggtgctaagggtgaagctggtccccaagggccccgaggctctgaaggtccccagggtgtgcgtggtgagcctggcccccctggccctgctggtgctgctggccctgctggaaaccctggtgctgatggacagcctggtgctaaaggtgccaatggtgctcctggtattgctggtgctcctggcttccctggtgcccgaggcccctctggaccccagggccccggcggccctcctggtcccaagggtaacagcggtgaacctggtgctcctggcagcaaaggagacactggtgctaagggagagcctggccctgttggtgttcaaggaccccctggccctgctggagaggaaggaaagcgaggagctcgaggtgaacccggacccactggcctgcccggaccccctggcgagcgtggtggacctggtagccgtggtttccctggcgcagatggtgttgctggtcccaagggtcccgctggtgaacgtggttctcctggccctgctggccccaaaggatctcctggtgaagctggtcgtcccggtgaagctggtctgcctggtgccaagggtctgactggaagccctggcagccctggtcctgatggcaaaactggcccccctggtcccgccggtcaagatggtcgccccggacccccaggcccacctggtgcccgtggtcaggctggtgtgatgggattccctggacctaaaggtgctgctggagagcccggcaaggctggagagcgaggtgttcccggaccccctggcgctgtcggtcctgctggcaaagatggagaggctggagctcagggaccccctggccctgctggtcccgctggcgagagaggtgaacaaggccctgctggctcccccggattccagggtctccctggtcctgctggtcctccaggtgaagcaggcaaacctggtgaacagggtgttcctggagaccttggcgcccctggcccctctggagcaagaggcgagagaggtttccctggcgagcgtggtgtgcaaggtccccctggtcctgctggtccccgaggggccaacggtgctcccggcaacgatggtgctaagggtgatgctggtgcccctggagctcccggtagccagggcgcccctggccttcagggaatgcctggtgaacgtggtgcagctggtcttccagggcctaagggtgacagaggtgatgctggtcccaaaggtgctgatggctctcctggcaaagatggcgtccgtggtctgactggccccattggtcctcctggccctgctggtgcccctggtgacaagggtgaaagtggtcccagcggccctgctggtcccactggagctcgtggtgcccccggagaccgtggtgagcctggtccccccggccctgctggctttgctggcccccctggtgctgacggccaacctggtgctaaaggcgaacctggtgatgctggtgctaaaggcgatgctggtccccctggccctgccggacccgctggaccccctggccccattggtaatgttggtgctcctggagccaaaggtgctcgcggcagcgctggtccccctggtgctactggtttccctggtgctgctggccgagtcggtcctcctggcccctctggaaatgctggaccccctggccctcctggtcctgctggcaaagaaggcggcaaaggtccccgtggtgagactggccctgctggacgtcctggtgaagttggtccccctggtccccctggccctgctggcgagaaaggatcccctggtgctgatggtcctgctggtgctcctggtactcccgggcctcaaggtattgctggacagcgtggtgtggtcggcctgcctggtcagagaggagagagaggcttccctggtcttcctggcccctctggtgaacctggcaaacaaggtccctctggagcaagtggtgaacgtggtccccctggtcccatgggcccccctggattggctggaccccctggtgaatctggacgtgagggggctcctggtgccgaaggttcccctggacgagacggttctcctggcgccaagggtgaccgtggtgagaccggccccgctggaccccctggtgctcctggtgctcctggtgcccctggccccgttggccctgctggcaagagtggtgatcgtggtgagactggtcctgctggtcccaccggtcctgtcggccctgttggcgcccgtggccccgccggaccccaaggcccccgtggtgacaagggtgagacaggcgaacagggcgacagaggcataaagggtcaccgtggcttctctggcctccagggtccccctggccctcctggctctcctggtgaacaaggtccctctggagcctctggtcctgctggtccccgaggtccccctggctctgctggtgctcctggcaaagatggactcaacggtctccctggccccattgggccccctggtcctcgcggtcgcactggtgatgctggtcctgttggtccccccggccctcctggacctcctggtccccctggtcctcccagcgctggtttcgacttcagcttcctgccccagccacctcaagagaaggctcacgatggtggccgctactaccgggctgatgatgccaatgtggttcgtgaccgtgacctcgaggtggacaccaccctcaagagcctgagccagcagatcgagaacatccggagcccagagggcagccgcaagaaccccgcccgcacctgccgtgacctcaagatgtgccactctgactggaagagtggagagtactggattgaccccaaccaaggctgcaacctggatgccatcaaagtcttctgcaacatggagactggtgagacctgcgtgtaccccactcagcccagtgtggcccagaagaactggtacatcagcaagaaccccaaggacaagaggcatgtctggttcggcgagagcatgaccgatggattccagttcgagtatggcggccagggctccgaccctgccgatgtggccatccagctgaccttcctgcgcctgatgtccaccgaggcctcccagaacatcacctaccactgcaagaacagcgtggcctacatggaccagcagactggcaacctcaagaaggccctgctcctccagggctccaacgagatcgagatccgcgccgagggcaacagccgcttcacctacagcgtcactgtcgatggctgcacgagtcacaccggagcctggggcaagacagtgattgaatacaaaaccaccaagacctcccgcctgcccatcatcgatgtggcccccttggacgttggtgccccagaccaggaattcggcttcgacgttggccctgtctgcttcctgtaaactccctccatcccaacctggctccctcccacccaaccaactttccccccaacccggaaacagacaagcaacccaaactgaaccccctcaaaagccaaaaaatgggagacaatttcacatggactttggaaaatatttttttcctttgcattcatctctcaaacttagtttttatctttgaccaaccgaacatgaccaaaaaccaaaagtgcattcaaccttaccaaaaaaaaaaaaaaaaaaagaataaataaataactttttaaaaaaggaagcttggtccacttgcttgaagacccatgcgggggtaagtccctttctgcccgttgggcttatgaaaccccaatgctgccctttctgctcctttctccacaccccccttggggcctcccctccactccttcccaaatctgtctccccagaagacacaggaaacaatgtattgtctgcccagcaatcaaaggcaatgctcaaacacccaagtggcccccaccctcagcccgctcctgcccgcccagcacccccaggccctgggggacctggggttctcagactgccaaagaagccttgccatctggcgctcccatggctcttgcaacatctccccttcgtttttgagggggtcatgccgggggagccaccagcccctcactgggttcggaggagagtcaggaagggccacgacaaagcagaaacatcggatttggggaacgcgtgtcaatcccttgtgccgcagggctgggcgggagagactgttctgttccttgtgtaactgtgttgctgaaagactacctcgttcttgtcttgatgtgtcaccggggcaactgcctgggggcggggatgggggcagggtggaagcggctccccattttataccaaaggtgctacatctatgtgatgggtggggtggggagggaatcactggtgctatagaaattgagatgcccccccaggccagcaaatgttcctttttgttcaaagtctatttttattccttgatatttttctttttttttttttttttttgtggatggggacttgtgaatttttctaaaggtgctatttaacatgggaggagagcgtgtgcggctccagcccagcccgctgctcactttccaccctctctccacctgcctctggcttctcaggcctctgctctccgacctctctcctctgaaaccctcctccacagctgcagcccatcctcccggctccctcctagtctgtcctgcgtcctctgtccccgggtttcagagacaacttcccaaagcacaaagcagtttttccccctaggggtgggaggaagcaaaagactctgtacctattttgtatgtgtataataatttgagatgtttttaattattttgattgctggaataaagcatgtggaaatgacccaaacataatcgtcggagcagacgggagtttctcctcggggtcggagcaggaggcacgcggagtgtgaggccacgcatgagcggacgctaaccccctccccagccacaaagagtctacatgtctagggtctagacatgttcagctttgtggacctccggctcctgctcctcttagcggccaccgccctcctgacgcacggccaagaggaaggccaagtcgagggccaagacgaagacatcccaccaatcacctgcgtacagaacggcctcaggtaccatgaccgagacgtgtggaaacccgagccctgccggatctgcgtctgcgacaacggcaaggtgttgtgcgatgacgtgatctgtgacgagaccaagaactgccccggcgccgaagtccccgagggcgagtgctgtcccgtctgccccgacggctcagagtcacccaccgaccaagaaaccaccggcgtcgagggacccaagggagacactggcccccgaggcccaaggggacccgcaggcccccctggccgagatggcatccctggacagcctggacttcccggaccccccggaccccccggacctcccggaccccctggcctcggaggaaactttgctccccagctgtcttatggctatgatgagaaatcaaccggaggaatttccgtgcctggccccatgggtccctctggtcctcgtggtctccctggcccccctggtgcacctggtccccaaggcttccaaggtccccctggtgagcctggcgagcctggagcttcaggtcccatgggtccccgaggtcccccaggtccccctggaaagaatggagatgatggggaagctggaaaacctggtcgtcctggtgagcgtgggcctcctgggcctcagggtgctcgaggattgcccggaacagctggcctccctggaatgaagggacacagaggtttcagtggtttggatggtgccaagggagatgctggtcctgctggtcctaagggtgagcctggcagccctggtgaaaatggagctcctggtcagatgggcccccgtggcctgcctggtgagagaggtcgccctggagcccctggccctgctggtgctcgtggaaatgatggtgctactggtgctgccgggccccctggtcccaccggccccgctggtcctcctggcttccctggtgctgttggtgctaagggtgaagctggtccccaagggccccgaggctctgaaggtccccagggtgtgcgtggtgagcctggcccccctggccctgctggtgctgctggccctgctggaaaccctggtgctgatggacagcctggtgctaaaggtgccaatggtgctcctggtattgctggtgctcctggcttccctggtgcccgaggcccctctggaccccagggccccggcggccctcctggtcccaagggtaacagcggtgaacctggtgctcctggcagcaaaggagacactggtgctaagggagagcctggccctgttggtgttcaaggaccccctggccctgctggagaggaaggaaagcgaggagctcgaggtgaacccggacccactggcctgcccggaccccctggcgagcgtggtggacctggtagccgtggtttccctggcgcagatggtgttgctggtcccaagggtcccgctggtgaacgtggttctcctggccctgctggccccaaaggatctcctggtgaagctggtcgtcccggtgaagctggtctgcctggtgccaagggtctgactggaagccctggcagccctggtcctgatggcaaaactggcccccctggtcccgccggtcaagatggtcgccccggacccccaggcccacctggtgcccgtggtcaggctggtgtgatgggattccctggacctaaaggtgctgctggagagcccggcaaggctggagagcgaggtgttcccggaccccctggcgctgtcggtcctgctggcaaagatggagaggctggagctcagggaccccctggccctgctggtcccgctggcgagagaggtgaacaaggccctgctggctcccccggattccagggtctccctggtcctgctggtcctccaggtgaagcaggcaaacctggtgaacagggtgttcctggagaccttggcgcccctggcccctctggagcaagaggcgagagaggtttccctggcgagcgtggtgtgcaaggtccccctggtcctgctggtccccgaggggccaacggtgctcccggcaacgatggtgctaagggtgatgctggtgcccctggagctcccggtagccagggcgcccctggccttcagggaatgcctggtgaacgtggtgcagctggtcttccagggcctaagggtgacagaggtgatgctggtcccaaaggtgctgatggctctcctggcaaagatggcgtccgtggtctgactggccccattggtcctcctggccctgctggtgcccctggtgacaagggtgaaagtggtcccagcggccctgctggtcccactggagctcgtggtgcccccggagaccgtggtgagcctggtccccccggccctgctggctttgctggcccccctggtgctgacggccaacctggtgctaaaggcgaacctggtgatgctggtgctaaaggcgatgctggtccccctggccctgccggacccgctggaccccctggccccattggtaatgttggtgctcctggagccaaaggtgctcgcggcagcgctggtccccctggtgctactggtttccctggtgctgctggccgagtcggtcctcctggcccctctggaaatgctggaccccctggccctcctggtcctgctggcaaagaaggcggcaaaggtccccgtggtgagactggccctgctggacgtcctggtgaagttggtccccctggtccccctggccctgctggcgagaaaggatcccctggtgctgatggtcctgctggtgctcctggtactcccgggcctcaaggtattgctggacagcgtggtgtggtcggcctgcctggtcagagaggagagagaggcttccctggtcttcctggcccctctggtgaacctggcaaacaaggtccctctggagcaagtggtgaacgtggtccccctggtcccatgggcccccctggattggctggaccccctggtgaatctggacgtgagggggctcctggtgccgaaggttcccctggacgagacggttctcctggcgccaagggtgaccgtggtgagaccggccccgctggaccccctggtgctcctggtgctcctggtgcccctggccccgttggccctgctggcaagagtggtgatcgtggtgagactggtcctgctggtcccaccggtcctgtcggccctgttggcgcccgtggccccgccggaccccaaggcccccgtggtgacaagggtgagacaggcgaacagggcgacagaggcataaagggtcaccgtggcttctctggcctccagggtccccctggccctcctggctctcctggtgaacaaggtccctctggagcctctggtcctgctggtccccgaggtccccctggctctgctggtgctcctggcaaagatggactcaacggtctccctggccccattgggccccctggtcctcgcggtcgcactggtgatgctggtcctgttggtccccccggccctcctggacctcctggtccccctggtcctcccagcgctggtttcgacttcagcttcctgccccagccacctcaagagaaggctcacgatggtggccgctactaccgggctgatgatgccaatgtggttcgtgaccgtgacctcgaggtggacaccaccctcaagagcctgagccagcagatcgagaacatccggagcccagagggcagccgcaagaaccccgcccgcacctgccgtgacctcaagatgtgccactctgactggaagagtggagagtactggattgaccccaaccaaggctgcaacctggatgccatcaaagtcttctgcaacatggagactggtgagacctgcgtgtaccccactcagcccagtgtggcccagaagaactggtacatcagcaagaaccccaaggacaagaggcatgtctggttcggcgagagcatgaccgatggattccagttcgagtatggcggccagggctccgaccctgccgatgtggccatccagctgaccttcctgcgcctgatgtccaccgaggcctcccagaacatcacctaccactgcaagaacagcgtggcctacatggaccagcagactggcaacctcaagaaggccctgctcctccagggctccaacgagatcgagatccgcgccgagggcaacagccgcttcacctacagcgtcactgtcgatggctgcacgagtcacaccggagcctggggcaagacagtgattgaatacaaaaccaccaagacctcccgcctgcccatcatcgatgtggcccccttggacgttggtgccccagaccaggaattcggcttcgacgttggccctgtctgcttcctgtaaactccctccatcccaacctggctccctcccacccaaccaactttccccccaacccggaaacagacaagcaacccaaactgaaccccctcaaaagccaaaaaatgggagacaatttcacatggactttggaaaatatttttttcctttgcattcatctctcaaacttagtttttatctttgaccaaccgaacatgaccaaaaaccaaaagtgcattcaaccttaccaaaaaaaaaaaaaaaaaaagaataaataaataactttttaaaaaaggaagcttggtccacttgcttgaagacccatgcgggggtaagtccctttctgcccgttgggcttatgaaaccccaatgctgccctttctgctcctttctccacaccccccttggggcctcccctccactccttcccaaatctgtctccccagaagacacaggaaacaatgtattgtctgcccagcaatcaaaggcaatgctcaaacacccaagtggcccccaccctcagcccgctcctgcccgcccagcacccccaggccctgggggacctggggttctcagactgccaaagaagccttgccatctggcgctcccatggctcttgcaacatctccccttcgtttttgagggggtcatgccgggggagccaccagcccctcactgggttcggaggagagtcaggaagggccacgacaaagcagaaacatcggatttggggaacgcgtgtcaatcccttgtgccgcagggctgggcgggagagactgttctgttccttgtgtaactgtgttgctgaaagactacctcgttcttgtcttgatgtgtcaccggggcaactgcctgggggcggggatgggggcagggtggaagcggctccccattttataccaaaggtgc

SEQ ID NO: 666 - DNA, 32765 bp, Homo sapiens
  misc_feature (222)..(222): second gene starts at position 222
atggcagaagtagagcagaagaagaagcggaccttccgcaagttcacctaccgcggcgtggacctcgaccagctgctggacatgtcctacgagcagctgatgcagctgtacagtgcgcgccagcggcggcggctgaaccggggcctgcggcggaagcagcactccctgctgaagcgcctgcgcaaggccaagaaggaggcgccgcccatggagaagccggagaccttctcttcatcctcctactcctcctcgggctacggccgccgctacgcctcggggtcctcggcctccctggggggccctgagtctgccgtggcctgaggctgcctgcgcccaccccgctctgcatgcggcccagcccggctcccaccgaggcgcgggggccgttttcaacgcttaaaggtgtcttcctcccaagtggtgcctaaagtttaaccaaaaagaccagactaatatattaatatatatctgctgtccagacagcctgtatcttgggggacagggctggcccagccctgctggccgcctcaccccctcgggtctcctcactcccttctacctgccactcacacagccaggtgccttggagggtcccaagctgggccccagcccaccctcctgtcttcccagggtagcccgcctgccagtcctagctgcacagggcagctgggcccaaccctgtctgtagagggccctggtgtttctagcactggcctgcacggtgggccttgctggggacggggggccccagtcagcctctctcccagtctacccagagaagccccttccccatgggaagacgaggccctcgggcccagcccccacagtgctgtctgatctgtgctttccagctcaccccccacactcactcctgagacccctggcctccggcgtcagcctccagcctctgttcccctagtaagtgccttccatgtcggcctctaaccccaggccccgaggacccagacccagtggggaggcggacgttccagccggcatggctgggaactgcagacctgtcctcctggtgggtccaggggcccctccagcttgtggagccccacactggggtgccgcctgcccgtctctctcccatggagccccagccccctttgggcccagggacaccagccaggctctgtgctgaccctcctgttgcacccagccctggtctcagcagcgaccacccctgcctccaccctctgagctttgcatgttccactaaccccgggcgggtggcaggtggaggtgtcaggctgctggcgcctctgcaagggcagaacactaacctgaccgtgggcggggccttgcggtatccgcccccaataaaagcaattccaaccttcctccgaggggcctgtgacctcccacacccctggcccgctccgtctgccccgtgggctcctgccaccgtccccgatgaagatcgtgcccgatgagcgggatcgtgtgcagaagaaaaccttcaccaagtgggtcaacaagcacctcatcaaggcccagaggcacatcagtgacctgtatgaagacctccgcgatggccacaacctcatctccctgctggaggtcctctcgggggacagcctgccccgggagaaggggaggatgcgtttccacaagctgcagaatgtccagattgccctggactacctccggcaccgccaggtgaagctggtgaacatcaggaatgatgacatcgctgacggcaaccccaagctgacccttggcctcatctggacaatcattctgcacttccagatctcagatatccaggtgagtgggcagtcggaggacatgacggccaaggagaagctgctgctgtggtcgcagcgaatggtggaggggtaccagggcctgcgatgcgacaacttcacctccagctggagagacggccgcctcttcaatgccatcatccaccggcacaagcccctgctcatcgacatgaacaaggtgtaccggcagaccaacctggagaacctggaccaggccttctctgtggcggagcgggacctgggagtgacgcggctcctggaccctgaggacgtggatgtccctcagcccgacgagaagtccatcatcacctacgtctcgtcgctgtatgacgccatgccccgcgtgccggacgtgcaggatggggtgagggccaacgagctgcagctgcgctggcaggagtaccgggagctggtgctgctgctgcttcagtggatgcgacaccacacggccgcctttgaggaacgcaggttcccctccagcttcgaggagattgagatcctgtggtctcagttcctgaagtttaaggagatggagctaccagccaaggaggccgacaagaacaggtccaagggcatctaccaatccctggagggagcggtgcaagcaggccagctcaaggtgccccctggctaccacccgctggatgtggagaaggagtggggcaagctgcacgtggccatcctggagcgggagaagcagctccgcagcgagtttgagaggctggagtgtcttcagcgcatcgtgaccaagctgcagatggaggcggggctgtgtgaggagcagctgaaccaggccgacgccctgctgcagtcggatgtccggctgctggctgcaggcaaagtgccacagcgggcgggggaggtggaacgggacttggacaaggcggatagcatgatccggctgctcttcaacgacgtgcagaccctcaaggatggacggcacccgcagggcgagcagatgtaccgcagggtgtaccgtctgcacgagcgcctggtagccatccgcaccgagtacaacctacggctgaaggcaggcgtggcggcccctgcaacccaggtggcccaggtgactctgcagagtgtgcagaggcgccccgagctggaggactccactctgcgctacctgcaggacctgctggcctgggtggaggagaaccagcaccgtgtggatggcgctgagtggggtgtggacctgcccagcgtggaggcgcagctgggcagccaccgaggcctgcaccagtccatcgaagaattccgggccaagatcgagcgggcacggagtgacgagggccagctctcccccgccacccggggtgcctaccgtgactgcctgggtcggctggacctgcagtacgccaagctgctgaactcctccaaggcccgcctcaggtccctggagagcttgcacagctttgtggcagccgccactaaggagctaatgtggctgaatgagaaggaggaggaggaggtgggcttcgactggagcgaccgcaacaccaacatgaccgccaagaaggagagctactcggcgctgatgcgggagctggagctgaaggagaagaagatcaaggagctccaaaatgctggggaccggctgctgcgggaggaccacccggcccggcccacggtggagtccttccaggcggccctgcagacgcagtggagctggatgctacagctgtgctgctgtatcgaggcacacctgaaggagaacgctgcctactttcagttcttctcagatgtgcgggaggccgaggggcagttgcagaagctgcaggaggcactgcgtaggaaatacagttgtgatcgctccgccaccgtcacccggctggaggacctgctgcaggatgcccaggacgagaaggaacagctgaacgagtacaagggccacctctcaggcctggccaagcgggccaaggccgtcgtgcagctgaagccccgccacccagcccaccccatgcggggccgcctgcccctgctggccgtgtgcgactataagcaggtggaggtgactgtgcacaagggtgacgagtgccagctggtgggccctgcacagccgtcccactggaaggtgctcagcagctccggcagcgaggccgccgtgccctccgtgtgcttcctggtgcccccgcccaaccaggaggcccaggaggccgtcaccaggctggaggcccagcaccaggccctggtcacgctgtggcaccagttgcacgtggacatgaagagccttctggcctggcagagccttcgccgcgacgtgcagctcatccgctcctggtccctggccacgttccgcaccctgaagccagaggagcagcgccaagccctgcacagcctggagctgcactaccaggccttcctgcgggacagccaggacgcgggcggcttcggacccgaggaccggctgatggctgagcgcgagtacggctcctgcagccaccactaccagcagctgctgcagagcctggaacagggtgcacaggaagagtctcgctgccagcgctgcatctccgagctcaaagacatccggctgcagctggaggcctgtgagacgcgcaccgtgcaccgcctgcggctgccgctggacaaagagccggcacgggagtgtgcccagcgcatcgccgagcagcagaaggcacaggcagaggtggaggggctgggcaagggggtcgcccggctctctgccgaggccgagaaggtcttggccctaccagagccatcgcctgcggcccccacgctgcgctcggagctggagctgacgctgggcaagctggagcaggtccgcagcctgtctgccatctacctggagaagctcaagaccatcagcctggtgatccgcggcacgcagggggccgaggaggtgctcagggcccacgaggagcagctcaaggaggcccaggccgtgccggccaccctcccggagctcgaggccaccaaggcctctctgaagaagctgcgggcccaggccgaggcacagcagcccacgttcgacgccctgcgggatgagctgcggggggcacaggaggtgggggagcgactgcagcagcggcacggggagcgggacgtggaggtggagcgctggcgggagcgggtcgcccagttgcttgagcgctggcaggctgtgctggcccagaccgacgtgcggcagcgcgagctcgagcaactgggccgccagctgcgttactaccgcgagagtgcagaccccttgggcgcctggctgcaggacgccaggcggcggcaggagcagatccaggccatgccgctggccgacagccaggctgtgcgggagcagctgcggcaggagcaggccctgctggaggagatcgagcgccacggcgagaaggtcgaggagtgccagaggtttgcgaaacagtacatcaacgccatcaaggactatgaactccagctggtgacgtacaaggcgcagcttgagccggtggcctccccggccaagaagcccaaggtccagtcgggatcagagagtgtcatccaggagtacgtggacctgcgtacgcactacagcgagctgaccacactgacgagccagtacatcaagttcatcagcgagactctgcggcgcatggaggaggaggagaggctggctgagcagcagcgggcagaggagcgcgagcggctggccgaggtggaggccgcgctggagaagcagcggcagctggccgaggcgcacgcccaggcaaaggcacaggcggagcgggaggcgaaggagctgcagcagcgcatgcaggaggaggtggtgcggcgggaggaggcggcggtggacgcgcagcagcagaagcgcagcattcaggaggagctgcagcagctgcggcagagctcggaggcggagatccaggccaaggcccggcaggcagaggcggctgagcgcagccggctgcgcatcgaggaggagatccgcgtggtgcgcctgcagttggaggccaccgagcgccagcgtggcggggctgagggggagctgcaggcactgcgtgcacgggcggaggaggctgaggcacaaaagcgacaggcgcaggaggaggccgagcgcttgcggaggcaggtgcaggacgagagccagcgtaagcggcaggcggaggtggagctggcctcgcgcgtgaaggccgaggccgaggcggcgcgcgagaagcagcgggccctgcaggccctggaggagctgcggctgcaggcggaggaggcggagcggcgcctgcggcaggccgaggtggagcgagcgcggcaggtacaggtggccctggagacggcgcagcgcagtgcagaggcggagctgcagagcaaacgcgcctccttcgccgagaagacggcacagctggagcgctccctgcaggaggaacacgtggctgtggcacagctgcgggaggaggctgagcggcgggcacagcagcaggccgaggccgagcgggcgcgcgaggaggcagagcgggagctggagcgctggcagctcaaggccaacgaggcgctacggctgcggctgcaggcggaggaggtggcgcagcagaagagcctggcgcaggccgaggctgagaagcagaaggaggaggcggagcgcgaggcgcggcggcgcggcaaggcggaggagcaggccgtccggcagcgggagctggctgaacaagagctggagaagcagcggcagctggcggaaggcaccgcgcagcagcgcctggccgcggagcaggagttgatccggctgcgggccgagacggagcagggggagcagcagcggcagctgctggaggaggagctggcccggctgcagcgtgaggcggctgcagccacgcagaaacggcaggagctggaagccgagctggccaaggtgcgggccgagatggaggtgctgctggccagcaaggcgagggctgaggaggagtcgcgctccaccagcgagaagtccaagcagaggctggaggccgaggccggccggttccgcgagctggccgaggaggccgcccgcctgcgtgccctggcggaagaggccaagcggcagcggcagctggccgaggaagacgcggcgcggcagcgggccgaggcggagcgggtgcttgcggagaagctggccgccatcggcgaggccacgcggctcaagacggaggcggagatcgcgctcaaggagaaggaggcggagaacgagcgcctgcggcggctggcggaggacgaggccttccagcggcggcggctggaggagcaggccgcgcaacacaaggctgacatcgaggagcgcctggcccagctgcgcaaggcatcggacagcgagctggagcggcagaaggggctggtggaggacacgctgaggcagcggcggcaggtggaggaggagatcctggcgctgaaggcgagcttcgagaaggcggccgctggcaaggcggagctggagctggagctgggacgcatccgcagcaacgcggaggacacgctgcgcagcaaggagcaggccgagctggaggctgcgaggcagcggcagctggcggcggaggaggagcggcggcgccgtgaggctgaggagcgcgtgcagaagagcctggcggccgaggaggaggccgcacggcagcggaaggcggcgctggaggaagtcgagcggctgaaagccaaggtggaggaggcgcggcgcctgcgggagcgagcggagcaggagtcggcgcggcagctgcagctggcccaggaggccgcccagaagcggctgcaggcggaagagaaggcacacgccttcgcggtgcagcagaaggagcaggagctacagcagacgctgcagcaggagcagagcgtgctggaccagctgcgcggcgaggcggaggcggcccggcgggcggctgaggaggcggaggaggcccgggtgcaggcggagcgtgaggcggcgcagtcccggcggcaggtggaagaggccgagcggctgaagcagtcggcagaggagcaggcacaggcccgggctcaggcacaggcggctgcagagaagctgcgcaaggaggccgagcaagaggcggcgcggcgggcacaggcggagcaggcggccctgcggcagaagcaggcagctgacgcggagatggagaagcataagaaattcgccgagcagacgctgcggcagaaggcgcaggtggagcaggagctgacaacactgcggctgcagctggaggagaccgaccaccagaagaacctgctggacgaggagctgcagcggctgaaggcggaggccacggaggccgcacgccagcgcagccaggtggaggaggagctcttctcggtgcgcgtgcagatggaggagctgagcaagctcaaggcacgcatcgaggctgagaaccgcgcactcatcttgcgtgacaaggacaatacgcagcgcttcctgcaggaggaggctgagaagatgaagcaggtggcggaggaggccgcgcggctgagtgtggcggcccaagaggctgcgcgactgcggcagctggcagaggaggacctggcacagcagcgggccttggcagagaagatgctcaaggagaagatgcaggcggtgcaggaggccacgcgactcaaggctgaggcggaactgctgcagcagcagaaggagcttgcgcaggagcaggcgcggcggctgcaggaggacaaggagcagatggcgcagcagctggcggaggagacgcagggcttccagcggacgctggaggccgagcggcagcggcagctggagatgagcgctgaggctgagcgcctcaagctgcgtgtggccgagatgagccgagcccaggcccgcgctgaggaggacgcccagcgcttccggaagcaggcggaggagatcggtgagaagctgcaccgcacggagctcgccacccaggagaaggtgaccctggtgcagacactggagatccagcgacagcagagtgaccatgatgccgagcgcctgcgggaggccatcgctgagctggagcgtgagaaggagaagctccaacaggaggccaaactgctgcagctcaagtctgaggagatgcagacggtgcagcaggagcagctgctgcaggagacgcaggccctgcagcaaagcttcctctctgaaaaggacagcctgctacagcgggagcgcttcatcgagcaggagaaggccaagctggagcagctcttccaggacgaggtggccaaggcacagcagctgcgtgaggagcagcagcggcagcagcagcagatggagcaggaacggcagcggctggtggccagcatggaggaggcgcggcggcggcagcatgaggccgaggagggcgtgcggcgcaagcaggaggagctgcagcagctggagcagcagcggcggcagcaggaggagctgctggctgaggagaaccagaggctgcgtgagcagctgcagctcctggaggagcagcaccgggccgcgctggcgcactcagaggaggtcactgcctcgcaggtggctgccacaaagaccctgcccaatggccgggatgcacttgatggccccgcggcagaggcagagccggagcacagcttcgatggcctgcggcggaaggtgtcagctcagaggctgcaggaggccggcatcctgagtgcggaggagctgcagcggttggcgcagggccacaccacggtggacgagctcgcacggcgggaagacgtgcgccactacctgcagggccgcagcagtatcgcagggctgttgctgaaggccaccaatgagaagctgagtgtttacgccgccctgcagaggcagctgctgagtcccggcacggccctcatcctgctggaggcgcaggcggcctcaggcttcctgctggaccctgtgcggaaccggcggctgaccgtcaacgaggctgtgaaggagggtgtggtgggccccgagctgcaccacaagctgctgtcggccgagcgcgccgtcactggctacaaggacccctacactggccagcagatctctctcttccaagccatgcagaagggcctcatcgtccgggagcacggcatccgcctgctggaggcccagatcgccacgggcggcgttatcgaccccgtgcacagccaccgcgtgcccgtggacgtggcctaccggcgcggctacttcgacgaggagatgaaccgcgtcctggcggaccccagcgacgacaccaagggcttctttgaccccaacacgcacgagaacctcacgtacctgcagctactggagcgctgcgtggaggaccccgagacgggcctgtgccttctgccactcacggataaggctgccaagggcggggagctggtctacactgactccgaggcccgggacgtctttgagaaggccaccgtgtctgcgccgttcggcaagttccagggcaagacggtgaccatttgggagatcatcaactcggaatacttcacggcagagcagcggcgggacctgctgcggcagttccgcacgggccggatcacagtggagaagatcatcaagatcatcatcacggtggtggaggagcaggagcagaagggccggctttgctttgagggcctgcgcagcctggtgccagccgccgagctgctggagagcagggtcatcgaccgcgagctctaccagcagctgcagcgaggtgagcgctctgtgcgagacgtagccgaggtggacactgtgcggcgggctctccggggtgccaacgtcatcgcgggtgtatggctggaggaggcggggcagaagctgagtatctacaatgccctgaagaaagacctgctgccatccgacatggccgtggccctgttggaagcccaggccggcaccgggcacatcatcgaccccgccaccagcgcccggctgaccgtggacgaggcagtgcgtgctggcctggtgggccccgagtttcatgagaagctgctatcagccgagaaggctgtgacagggtacagggacccctacacagggcagagcgtctccctgttccaggccctgaagaagggcctcattccccgggagcagggcctgcgcctgttggacgcccagctgtccacgggcggcatcgtggaccccagcaagagccaccgcgtgcccctggatgtcgcctgcgcccgaggctgcctggatgaggagaccagcagggccctgtcggcaccaagggccgacgccaaggcctacagtgaccccagcacaggggagccggccacctacggcgagctccagcagcggtgccggcccgaccagctgaccgggctgagcctgctgccgctctcagaaaaggctgctcgggcccggcaggaggagctctactcagagctgcaggcccgtgagacctttgaaaagaccccggttgaggtccccgtgggtggcttcaagggcaggacggtgacggtgtgggagctcatcagctctgagtacttcactgcggagcagcggcaggagctgttgcgtcagttccgcacgggcaaggtcaccgtggagaaggtcatcaagattctcattaccatcgtggaggaggtggagaccctgcggcaggagaggctgtccttcagcggcctccgtgcccctgtgccagccagcgagctcctggcttccggggtcctcagcagagcccagtttgagcagctcaaggacggcaagacgacggtcaaggacctttcggagctgggctccgtgcggacgctgctgcagggcagtggctgcctcgccggcatctacctggaggacaccaaggagaaggtgtccatctacgaggccatgcgccggggcctgctgagagccacaacggctgcgctcctgctggaggcgcaggcggccactggcttcctggtggaccccgtgcggaaccagcgcctgtatgtccacgaggccgtgaaggcgggcgtggtgggccccgagcttcacgagcagctgctgtctgccgagaaggccgtcaccggctacagagacccctactcgggcagcaccatctccctcttccaggccatgcagaagggcctggttctccggcagcacggcatccgcctgctggaggcccagatcgccacgggcggcatcatcgaccccgtgcacagccaccgcgtgcctgtggacgtggcctaccagcgcggctacttcagtgaggagatgaaccgcgtcctggcggaccccagcgacgacaccaagggcttctttgaccccaacacgcatgagaacctcacgtacaggcagctgctggagcggtgcgtggaggaccccgagacgggcttgcgccttctgccactgaaaggggcggagaaggctgaggtggtggagaccacgcaggtgtacactgaggaggagacaagaagggcatttgaagagacacagatcgacattcccggcggcggcagccacggcggctccaccatgtccctgtgggaggtgatgcagtcggacctgatccccgaggagcagcgggcccagctgatggctgacttccaggccggccgggtgaccaaggaacgcatgatcatcatcatcatcgagatcattgagaagacagagatcatccgccagcagggtctggcctcctacgactacgtgcgccgccgcctcacggctgaggacctgttcgaggctcggatcatctctctcgagacctacaacctgctccgggagggcaccaggagcctccgtgaggctctcgaggcggagtccgcctggtgctacctctatggcacgggctccgtggctggtgtctacctgcccggttccaggcagacactgagcatctaccaggctctcaagaaagggctgctgagtgccgaggtggcccgcctgctgctggaggcacaggcagccacaggcttcctgctggacccggtgaagggggagcggctgactgtggatgaggctgtgcggaagggcctcgtggggcccgagctgcacgaccgcctgctctcggctgagcgggcggtcaccggctaccgtgacccctacaccgagcagaccatctcgctcttccaggccatgaagaaggagctgatccctactgaggaggccctgcggctgctggatgcccagctggccaccggcggcatcgtggacccccgcctgggcttccaccttcccctggaggtggcttaccagcgtggctacctcaacaaggacacgcacgaccagctgtcagagcccagcgaggtgcgcagctacgtggacccgtccaccgacgagcgcctcagctacacgcagctgctcaggcggtgccgtcgtgacgacggcaccggccagctgctcctgccactgtcggacgcccgcaagctgaccttccgtggcctgcggaagcagatcaccatggaggagctggtgcgctcgcaggtcatggacgaggccacggcgctgcagctgcgggagggcctgacctccatcgaggaggtcaccaagaacttgcagaagttcctggaaggcaccagctgcatcgctggtgtcttcgtggacgccaccaaggaacggctctcggtgtaccaggccatgaagaagggcatcatccgccccggcacagcctttgagctcctggaggcgcaggcggccaccggttacgtcatcgaccccatcaagggactgaagctgacggtggaggaggctgtgcgtatgggcattgtgggccccgagttcaaggacaagctgctgtcggccgagcgcgccgtcactgggtacaaggacccctactctgggaagctcatctccctcttccaggccatgaagaagggcctgatcctgaaggaccatggcatccgcctgctggaggcccagatcgccacgggcggcatcatcgaccctgaggagagccaccggctgcccgtggaggtggcctacaagcgcggcctcttcgatgaggagatgaacgagatcctgaccgacccctcggacgacaccaagggcttctttgaccctaacacggaggagaacctcacctacctgcagctgatggagcgttgtatcactgacccccagacgggcctgtgtctcttgccgctgaaggagaagaagcgggagcggaagacgtcctccaagtcctccgtgcgcaagcgccgagtggtcatcgtggaccccgagacgggcaaggagatgtcagtgtacgaggcctaccgcaagggcctgattgaccaccagacgtacctggagctgtccgagcaggagtgcgagtgggaggagatcaccatctcctcctcggacggcgtggtcaagtccatgatcatcgaccgccgctccgggcgccagtacgacatcgatgatgccatcgccaagaacctcatcgaccgctcggcactggaccagtaccgcgccggcacgctctccatcaccgagttcgccgacatgctctcgggcaacgccggtggtttccgctcccgttcctcctcggtgggatcctcctcctcctaccccatcagccccgccgtctccaggacccagctggcctcctggtcagaccccactgaggagacgggccccgtggctggcatcctggacacggagacgctggagaaggtgtccatcaccgaggccatgcaccggaacctggtggataacatcacggggcagcggctgctggaggcgcaggcctgcaccgggggcatcatcgaccccagcaccggtgagcgcttccctgtcaccgacgccgtcaacaagggcctggtggacaagatcatggtggaccgcatcaacctggcccagaaggccttctgcggcttcgaggacccacgcaccaagaccaagatgtcggccgcccaggccctgaagaagggctggctctactacgaggccggccagcgcttcctggaggtgcagtacctgaccggcggcttgatcgagcccgacacgccgggccgcgtgcccctggacgaggccctgcagcgcggcacggtggacgcccgcaccgcacagaagctgcgtgacgtgggcgcctactccaagtacctcacctgccctaagaccaagctcaagatctcctataaggacgcgctggaccgcagcatggtggaggagggcacggggctgcggctgctggaggctgccgcgcagtccaccaagggctactacagcccctacagcgtcagcggctccggctctaccgctggctcccgcaccggctcgcgcaccggctcccgggccggctcccgccgcggcagctttgacgccaccggctccggcttctccatgaccttctcttcatcctcctactcctcctcgggctacggccgccgctacgcctcggggtcctcggcctccctggggggccctgagtctgccgtggcctgaggctgcctgcgcccaccccgctctgcatgcggcccagcccggctcccaccgaggcgcgggggccgttttcaacgcttaaaggtgtcttcctcccaagtggtgcctaaagtttaaccaaaaagaccagactaatatattaatatatatctgctgtccagacagcctgtatcttgggggacagggctggcccagccctgctggccgcctcaccccctcgggtctcctcactcccttctacctgccactcacacagccaggtgccttggagggtcccaagctgggccccagcccaccctcctgtcttcccagggtagcccgcctgccagtcctagctgcacagggcagctgggcccaaccctgtctgtagagggccctggtgtttctagcactggcctgcacggtgggccttgctggggacggggggccccagtcagcctctctcccagtctacccagagaagccccttccccatgggaagacgaggccctcgggcccagcccccacagtgctgtctgatctgtgctttccagctcaccccccacactcactcctgagacccctggcctccggcgtcagcctccagcctctgttcccctagtaagtgccttccatgtcggcctctaaccccaggccccgaggacccagacccagtggggaggcggacgttccagccggcatggctgggaactgcagacctgtcctcctggtgggtccaggggcccctccagcttgtggagccccacactggggtgccgcctgcccgtctctctcccatggagccccagccccctttgggcccagggacaccagccaggctctgtgctgaccctcctgttgcacccagccctggtctcagcagcgaccacccctgcctccaccctctgagctttgcatgttccactaaccccgggcgggtggcaggtggaggtgtcaggctgctggcgcctctgcaagggcagaacactaacctgaccgtgggcggggccttgcggtatccgcccccaataaaagcaattccaaccttcctccgaggggcctgtgacctcccacacccctggcccgctccgtctgccccgtgggctcctgccaccgtccccgatgaagatcgtgcccgatgagcgggatcgtgtgcagaagaaaaccttcaccaagtgggtcaacaagcacctcatcaaggcccagaggcacatcagtgacctgtatgaagacctccgcgatggccacaacctcatctccctgctggaggtcctctcgggggacagcctgccccgggagaaggggaggatgcgtttccacaagctgcagaatgtccagattgccctggactacctccggcaccgccaggtgaagctggtgaacatcaggaatgatgacatcgctgacggcaaccccaagctgacccttggcctcatctggacaatcattctgcacttccagatctcagatatccaggtgagtgggcagtcggaggacatgacggccaaggagaagctgctgctgtggtcgcagcgaatggtggaggggtaccagggcctgcgatgcgacaacttcacctccagctggagagacggccgcctcttcaatgccatcatccaccggcacaagcccctgctcatcgacatgaacaaggtgtaccggcagaccaacctggagaacctggaccaggccttctctgtggcggagcgggacctgggagtgacgcggctcctggaccctgaggacgtggatgtccctcagcccgacgagaagtccatcatcacctacgtctcgtcgctgtatgacgccatgccccgcgtgccggacgtgcaggatggggtgagggccaacgagctgcagctgcgctggcaggagtaccgggagctggtgctgctgctgcttcagtggatgcgacaccacacggccgcctttgaggaacgcaggttcccctccagcttcgaggagattgagatcctgtggtctcagttcctgaagtttaaggagatggagctaccagccaaggaggccgacaagaacaggtccaagggcatctaccaatccctggagggagcggtgcaagcaggccagctcaaggtgccccctggctaccacccgctggatgtggagaaggagtggggcaagctgcacgtggccatcctggagcgggagaagcagctccgcagcgagtttgagaggctggagtgtcttcagcgcatcgtgaccaagctgcagatggaggcggggctgtgtgaggagcagctgaaccaggccgacgccctgctgcagtcggatgtccggctgctggctgcaggcaaagtgccacagcgggcgggggaggtggaacgggacttggacaaggcggatagcatgatccggctgctcttcaacgacgtgcagaccctcaaggatggacggcacccgcagggcgagcagatgtaccgcagggtgtaccgtctgcacgagcgcctggtagccatccgcaccgagtacaacctacggctgaaggcaggcgtggcggcccctgcaacccaggtggcccaggtgactctgcagagtgtgcagaggcgccccgagctggaggactccactctgcgctacctgcaggacctgctggcctgggtggaggagaaccagcaccgtgtggatggcgctgagtggggtgtggacctgcccagcgtggaggcgcagctgggcagccaccgaggcctgcaccagtccatcgaagaattccgggccaagatcgagcgggcacggagtgacgagggccagctctcccccgccacccggggtgcctaccgtgactgcctgggtcggctggacctgcagtacgccaagctgctgaactcctccaaggcccgcctcaggtccctggagagcttgcacagctttgtggcagccgccactaaggagctaatgtggctgaatgagaaggaggaggaggaggtgggcttcgactggagcgaccgcaacaccaacatgaccgccaagaaggagagctactcggcgctgatgcgggagctggagctgaaggagaagaagatcaaggagctccaaaatgctggggaccggctgctgcgggaggaccacccggcccggcccacggtggagtccttccaggcggccctgcagacgcagtggagctggatgctacagctgtgctgctgtatcgaggcacacctgaaggagaacgctgcctactttcagttcttctcagatgtgcgggaggccgaggggcagttgcagaagctgcaggaggcactgcgtaggaaatacagttgtgatcgctccgccaccgtcacccggctggaggacctgctgcaggatgcccaggacgagaaggaacagctgaacgagtacaagggccacctctcaggcctggccaagcgggccaaggccgtcgtgcagctgaagccccgccacccagcccaccccatgcggggccgcctgcccctgctggccgtgtgcgactataagcaggtggaggtgactgtgcacaagggtgacgagtgccagctggtgggccctgcacagccgtcccactggaaggtgctcagcagctccggcagcgaggccgccgtgccctccgtgtgcttcctggtgcccccgcccaaccaggaggcccaggaggccgtcaccaggctggaggcccagcaccaggccctggtcacgctgtggcaccagttgcacgtggacatgaagagccttctggcctggcagagccttcgccgcgacgtgcagctcatccgctcctggtccctggccacgttccgcaccctgaagccagaggagcagcgccaagccctgcacagcctggagctgcactaccaggccttcctgcgggacagccaggacgcgggcggcttcggacccgaggaccggctgatggctgagcgcgagtacggctcctgcagccaccactaccagcagctgctgcagagcctggaacagggtgcacaggaagagtctcgctgccagcgctgcatctccgagctcaaagacatccggctgcagctggaggcctgtgagacgcgcaccgtgcaccgcctgcggctgccgctggacaaagagccggcacgggagtgtgcccagcgcatcgccgagcagcagaaggcacaggcagaggtggaggggctgggcaagggggtcgcccggctctctgccgaggccgagaaggtcttggccctaccagagccatcgcctgcggcccccacgctgcgctcggagctggagctgacgctgggcaagctggagcaggtccgcagcctgtctgccatctacctggagaagctcaagaccatcagcctggtgatccgcggcacgcagggggccgaggaggtgctcagggcccacgaggagcagctcaaggaggcccaggccgtgccggccaccctcccggagctcgaggccaccaaggcctctctgaagaagctgcgggcccaggccgaggcacagcagcccacgttcgacgccctgcgggatgagctgcggggggcacaggaggtgggggagcgactgcagcagcggcacggggagcgggacgtggaggtggagcgctggcgggagcgggtcgcccagttgcttgagcgctggcaggctgtgctggcccagaccgacgtgcggcagcgcgagctcgagcaactgggccgccagctgcgttactaccgcgagagtgcagaccccttgggcgcctggctgcaggacgccaggcggcggcaggagcagatccaggccatgccgctggccgacagccaggctgtgcgggagcagctgcggcaggagcaggccctgctggaggagatcgagcgccacggcgagaaggtcgaggagtgccagaggtttgcgaaacagtacatcaacgccatcaaggactatgaactccagctggtgacgtacaaggcgcagcttgagccggtggcctccccggccaagaagcccaaggtccagtcgggatcagagagtgtcatccaggagtacgtggacctgcgtacgcactacagcgagctgaccacactgacgagccagtacatcaagttcatcagcgagactctgcggcgcatggaggaggaggagaggctggctgagcagcagcgggcagaggagcgcgagcggctggccgaggtggaggccgcgctggagaagcagcggcagctggccgaggcgcacgcccaggcaaaggcacaggcggagcgggaggcgaaggagctgcagcagcgcatgcaggaggaggtggtgcggcgggaggaggcggcggtggacgcgcagcagcagaagcgcagcattcaggaggagctgcagcagctgcggcagagctcggaggcggagatccaggccaaggcccggcaggcagaggcggctgagcgcagccggctgcgcatcgaggaggagatccgcgtggtgcgcctgcagttggaggccaccgagcgccagcgtggcggggctgagggggagctgcaggcactgcgtgcacgggcggaggaggctgaggcacaaaagcgacaggcgcaggaggaggccgagcgcttgcggaggcaggtgcaggacgagagccagcgtaagcggcaggcggaggtggagctggcctcgcgcgtgaaggccgaggccgaggcggcgcgcgagaagcagcgggccctgcaggccctggaggagctgcggctgcaggcggaggaggcggagcggcgcctgcggcaggccgaggtggagcgagcgcggcaggtacaggtggccctggagacggcgcagcgcagtgcagaggcggagctgcagagcaaacgcgcctccttcgccgagaagacggcacagctggagcgctccctgcaggaggaacacgtggctgtggcacagctgcgggaggaggctgagcggcgggcacagcagcaggccgaggccgagcgggcgcgcgaggaggcagagcgggagctggagcgctggcagctcaaggccaacgaggcgctacggctgcggctgcaggcggaggaggtggcgcagcagaagagcctggcgcaggccgaggctgagaagcagaaggaggaggcggagcgcgaggcgcggcggcgcggcaaggcggaggagcaggccgtccggcagcgggagctggctgaacaagagctggagaagcagcggcagctggcggaaggcaccgcgcagcagcgcctggccgcggagcaggagttgatccggctgcgggccgagacggagcagggggagcagcagcggcagctgctggaggaggagctggcccggctgcagcgtgaggcggctgcagccacgcagaaacggcaggagctggaagccgagctggccaaggtgcgggccgagatggaggtgctgctggccagcaaggcgagggctgaggaggagtcgcgctccaccagcgagaagtccaagcagaggctggaggccgaggccggccggttccgcgagctggccgaggaggccgcccgcctgcgtgccctggcggaagaggccaagcggcagcggcagctggccgaggaagacgcggcgcggcagcgggccgaggcggagcgggtgcttgcggagaagctggccgccatcggcgaggccacgcggctcaagacggaggcggagatcgcgctcaaggagaaggaggcggagaacgagcgcctgcggcggctggcggaggacgaggccttccagcggcggcggctggaggagcaggccgcgcaacacaaggctgacatcgaggagcgcctggcccagctgcgcaaggcatcggacagcgagctggagcggcagaaggggctggtggaggacacgctgaggcagcggcggcaggtggaggaggagatcctggcgctgaaggcgagcttcgagaaggcggccgctggcaaggcggagctggagctggagctgggacgcatccgcagcaacgcggaggacacgctgcgcagcaaggagcaggccgagctggaggctgcgaggcagcggcagctggcggcggaggaggagcggcggcgccgtgaggctgaggagcgcgtgcagaagagcctggcggccgaggaggaggccgcacggcagcggaaggcggcgctggaggaagtcgagcggctgaaagccaaggtggaggaggcgcggcgcctgcgggagcgagcggagcaggagtcggcgcggcagctgcagctggcccaggaggccgcccagaagcggctgcaggcggaagagaaggcacacgccttcgcggtgcagcagaaggagcaggagctacagcagacgctgcagcaggagcagagcgtgctggaccagctgcgcggcgaggcggaggcggcccggcgggcggctgaggaggcggaggaggcccgggtgcaggcggagcgtgaggcggcgcagtcccggcggcaggtggaagaggccgagcggctgaagcagtcggcagaggagcaggcacaggcccgggctcaggcacaggcggctgcagagaagctgcgcaaggaggccgagcaagaggcggcgcggcgggcacaggcggagcaggcggccctgcggcagaagcaggcagctgacgcggagatggagaagcataagaaattcgccgagcagacgctgcggcagaaggcgcaggtggagcaggagctgacaacactgcggctgcagctggaggagaccgaccaccagaagaacctgctggacgaggagctgcagcggctgaaggcggaggccacggaggccgcacgccagcgcagccaggtggaggaggagctcttctcggtgcgcgtgcagatggaggagctgagcaagctcaaggcacgcatcgaggctgagaaccgcgcactcatcttgcgtgacaaggacaatacgcagcgcttcctgcaggaggaggctgagaagatgaagcaggtggcggaggaggccgcgcggctgagtgtggcggcccaagaggctgcgcgactgcggcagctggcagaggaggacctggcacagcagcgggccttggcagagaagatgctcaaggagaagatgcaggcggtgcaggaggccacgcgactcaaggctgaggcggaactgctgcagcagcagaaggagcttgcgcaggagcaggcgcggcggctgcaggaggacaaggagcagatggcgcagcagctggcggaggagacgcagggcttccagcggacgctggaggccgagcggcagcggcagctggagatgagcgctgaggctgagcgcctcaagctgcgtgtggccgagatgagccgagcccaggcccgcgctgaggaggacgcccagcgcttccggaagcaggcggaggagatcggtgagaagctgcaccgcacggagctcgccacccaggagaaggtgaccctggtgcagacactggagatccagcgacagcagagtgaccatgatgccgagcgcctgcgggaggccatcgctgagctggagcgtgagaaggagaagctccaacaggaggccaaactgctgcagctcaagtctgaggagatgcagacggtgcagcaggagcagctgctgcaggagacgcaggccctgcagcaaagcttcctctctgaaaaggacagcctgctacagcgggagcgcttcatcgagcaggagaaggccaagctggagcagctcttccaggacgaggtggccaaggcacagcagctgcgtgaggagcagcagcggcagcagcagcagatggagcaggaacggcagcggctggtggccagcatggaggaggcgcggcggcggcagcatgaggccgaggagggcgtgcggcgcaagcaggaggagctgcagcagctggagcagcagcggcggcagcaggaggagctgctggctgaggagaaccagaggctgcgtgagcagctgcagctcctggaggagcagcaccgggccgcgctggcgcactcagaggaggtcactgcctcgcaggtggctgccacaaagaccctgcccaatggccgggatgcacttgatggccccgcggcagaggcagagccggagcacagcttcgatggcctgcggcggaaggtgtcagctcagaggctgcaggaggccggcatcctgagtgcggaggagctgcagcggttggcgcagggccacaccacggtggacgagctcgcacggcgggaagacgtgcgccactacctgcagggccgcagcagtatcgcagggctgttgctgaaggccaccaatgagaagctgagtgtttacgccgccctgcagaggcagctgctgagtcccggcacggccctcatcctgctggaggcgcaggcggcctcaggcttcctgctggaccctgtgcggaaccggcggctgaccgtcaacgaggctgtgaaggagggtgtggtgggccccgagctgcaccacaagctgctgtcggccgagcgcgccgtcactggctacaaggacccctacactggccagcagatctctctcttccaagccatgcagaagggcctcatcgtccgggagcacggcatccgcctgctggaggcccagatcgccacgggcggcgttatcgaccccgtgcacagccaccgcgtgcccgtggacgtggcctaccggcgcggctacttcgacgaggagatgaaccgcgtcctggcggaccccagcgacgacaccaagggcttctttgaccccaacacgcacgagaacctcacgtacctgcagctactggagcgctgcgtggaggaccccgagacgggcctgtgccttctgccactcacggataaggctgccaagggcggggagctggtctacactgactccgaggcccgggacgtctttgagaaggccaccgtgtctgcgccgttcggcaagttccagggcaagacggtgaccatttgggagatcatcaactcggaatacttcacggcagagcagcggcgggacctgctgcggcagttccgcacgggccggatcacagtggagaagatcatcaagatcatcatcacggtggtggaggagcaggagcagaagggccggctttgctttgagggcctgcgcagcctggtgccagccgccgagctgctggagagcagggtcatcgaccgcgagctctaccagcagctgcagcgaggtgagcgctctgtgcgagacgtagccgaggtggacactgtgcggcgggctctccggggtgccaacgtcatcgcgggtgtatggctggaggaggcggggcagaagctgagtatctacaatgccctgaagaaagacctgctgccatccgacatggccgtggccctgttggaagcccaggccggcaccgggcacatcatcgaccccgccaccagcgcccggctgaccgtggacgaggcagtgcgtgctggcctggtgggccccgagtttcatgagaagctgctatcagccgagaaggctgtgacagggtacagggacccctacacagggcagagcgtctccctgttccaggccctgaagaagggcctcattccccgggagcagggcctgcgcctgttggacgcccagctgtccacgggcggcatcgtggaccccagcaagagccaccgcgtgcccctggatgtcgcctgcgcccgaggctgcctggatgaggagaccagcagggccctgtcggcaccaagggccgacgccaaggcctacagtgaccccagcacaggggagccggccacctacggcgagctccagcagcggtgccggcccgaccagctgaccgggctgagcctgctgccgctctcagaaaaggctgctcgggcccggcaggaggagctctactcagagctgcaggcccgtgagacctttgaaaagaccccggttgaggtccccgtgggtggcttcaagggcaggacggtgacggtgtgggagctcatcagctctgagtacttcactgcggagcagcggcaggagctgttgcgtcagttccgcacgggcaaggtcaccgtggagaaggtcatcaagattctcattaccatcgtggaggaggtggagaccctgcggcaggagaggctgtccttcagcggcctccgtgcccctgtgccagccagcgagctcctggcttccggggtcctcagcagagcccagtttgagcagctcaaggacggcaagacgacggtcaaggacctttcggagctgggctccgtgcggacgctgctgcagggcagtggctgcctcgccggcatctacctggaggacaccaaggagaaggtgtccatctacgaggccatgcgccggggcctgctgagagccacaacggctgcgctcctgctggaggcgcaggcggccactggcttcctggtggaccccgtgcggaaccagcgcctgtatgtccacgaggccgtgaaggcgggcgtggtgggccccgagcttcacgagcagctgctgtctgccgagaaggccgtcaccggctacagagacccctactcgggcagcaccatctccctcttccaggccatgcagaagggcctggttctccggcagcacggcatccgcctgctggaggcccagatcgccacgggcggcatcatcgaccccgtgcacagccaccgcgtgcctgtggacgtggcctaccagcgcggctacttcagtgaggagatgaaccgcgtcctggcggaccccagcgacgacaccaagggcttctttgaccccaacacgcatgagaacctcacgtacaggcagctgctggagcggtgcgtggaggaccccgagacgggcttgcgccttctgccactgaaaggggcggagaaggctgaggtggtggagaccacgcaggtgtacactgaggaggagacaagaagggcatttgaagagacacagatcgacattcccggcggcggcagccacggcggctccaccatgtccctgtgggaggtgatgcagtcggacctgatccccgaggagcagcgggcccagctgatggctgacttccaggccggccgggtgaccaaggaacgcatgatcatcatcatcatcgagatcattgagaagacagagatcatccgccagcagggtctggcctcctacgactacgtgcgccgccgcctcacggctgaggacctgttcgaggctcggatcatctctctcgagacctacaacctgctccgggagggcaccaggagcctccgtgaggctctcgaggcggagtccgcctggtgctacctctatggcacgggctccgtggctggtgtctacctgcccggttccaggcagacactgagcatctaccaggctctcaagaaagggctgctgagtgccgaggtggcccgcctgctgctggaggcacaggcagccacaggcttcctgctggacccggtgaagggggagcggctgactgtggatgaggctgtgcggaagggcctcgtggggcccgagctgcacgaccgcctgctctcggctgagcgggcggtcaccggctaccgtgacccctacaccgagcagaccatctcgctcttccaggccatgaagaaggagctgatccctactgaggaggccctgcggctgctggatgcccagctggccaccggcggcatcgtggacccccgcctgggcttccaccttcccctggaggtggcttaccagcgtggctacctcaacaaggacacgcacgaccagctgtcagagcccagcgaggtgcgcagctacgtggacccgtccaccgacgagcgcctcagctacacgcagctgctcaggcggtgccgtcgtgacgacggcaccggccagctgctcctgccactgtcggacgcccgcaagctgaccttccgtggcctgcggaagcagatcaccatggaggagctggtgcgctcgcaggtcatggacgaggccacggcgctgcagctgcgggagggcctgacctccatcgaggaggtcaccaagaacttgcagaagttcctggaaggcaccagctgcatcgctggtgtcttcgtggacgccaccaaggaacggctctcggtgtaccaggccatgaagaagggcatcatccgccccggcacagcctttgagctcctggaggcgcaggcggccaccggttacgtcatcgaccccatcaagggactgaagctgacggtggaggaggctgtgcgtatgggcattgtgggccccgagttcaaggacaagctgctgtcggccgagcgcgccgtcactgggtacaaggacccctactctgggaagctcatctccctcttccaggccatgaagaagggcctgatcctgaaggaccatggcatccgcctgctggaggcccagatcgccacgggcggcatcatcgaccctgaggagagccaccggctgcccgtggaggtggcctacaagcgcggcctcttcgatgaggagatgaacgagatcctgaccgacccctcggacgacaccaagggcttctttgaccctaacacggaggagaacctcacctacctgcagctgatggagcgttgtatcactgacccccagacgggcctgtgtctcttgccgctgaaggagaagaagcgggagcggaagacgtcctccaagtcctccgtgcgcaagcgccgagtggtcatcgtggaccccgagacgggcaaggagatgtcagtgtacgaggcctaccgcaagggcctgattgaccaccagacgtacctggagctgtccgagcaggagtgcgagtgggaggagatcaccatctcctcctcggacggcgtggtcaagtccatgatcatcgaccgccgctccgggcgccagtacgacatcgatgatgccatcgccaagaacctcatcgaccgctcggcactggaccagtaccgcgccggcacgctctccatcaccgagttcgccgacatgctctcgggcaacgccggtggtttccgctcccgttcctcctcggtgggatcctcctcctcctaccccatcagccccgccgtctccaggacccagctggcctcctggtcagaccccactgaggagacgggccccgtggctggcatcctggacacggagacgctggagaaggtgtccatcaccgaggccatgcaccggaacctggtggataacatcacggggcagcggctgctggaggcgcaggcctgcaccgggggcatcatcgaccccagcaccggtgagcgcttccctgtcaccgacgccgtcaacaagggcctggtggacaagatcatggtggaccgcatcaacctggcccagaaggccttctgcggcttcgaggacccacgcaccaagaccaagatgtcggccgcccaggccctgaagaagggctggctctactacgaggccggccagcgcttcctggaggtgcagtacctgaccggcggcttgatcgagcccgacacgccgggccgcgtgcccctggacgaggccctgcagcgcggcacggtggacgcccgcaccgcacagaagctgcgtgacgtgggcgcctactccaagtacctcacctgccctaagaccaagctcaagatctcctataaggacgcgctggaccgcagcatggtggaggagggcacggggctgcggctgctggaggctgccgcgcagtccaccaagggctactacagcccctacagcgtcagcggctccggctctaccgctggctcccgcaccggctcgcgcaccggctcccgggccggctcccgccgcggcagctttgacgccaccggctccggcttctccatgaccttctcttcatcctcctactcctcctcgggctacggccgccgctacgcctcggggtcctcggcctccctggggggccctgagtctgccgtggcctgaggctgcctgcgcccaccccgctctgcatgcggcccagcccggctcccaccgaggcgcgggggccgttttcaacgcttaaaggtgtcttcctcccaagtggtgcctaaagtttaaccaaaaagaccagactaatatattaatatatatctgctgtccagacagcctgtatcttgggggacagggctggcccagccctgctggccgcctcaccccctcgggtctcctcactcccttctacctgccactcacacagccaggtgccttggagggtcccaagctgggccccagcccaccctcctgtcttcccagggtagcccgcctgccagtcctagctgcacagggcagctgggcccaaccctgtctgtagagggccctggtgtttctagcactggcctgcacggtgggccttgctggggacggggggccccagtcagcctctctcccagtctacccagagaagccccttccccatgggaagacgaggccctcgggcccagcccccacagtgctgtctgatctgtgctttccagctcaccccccacactcactcctgagacccctggcctccggcgtcagcctccagcctctgttcccctagtaagtgccttccatgtcggcctctaaccccaggccccgaggacccagacccagtggggaggcggacgttccagccggcatggctgggaactgcagacctgtcctcctggtgggtccaggggcccctccagcttgtggagccccacactggggtgccgcctgcccgtctctctcccatggagccccagccccctttgggcccagggacaccagccaggctctgtgctgaccctcctgttgcacccagccctggtctcagcagcgaccacccctgcctccaccctctgagctttgcatgttccactaaccccgggcgggtggcaggtggaggtgtcaggctgctggcgcctctgcaagggcagaacactaacctgaccgtgggcggggccttgcggtatccgcccccaataaaagcaattccaaccttcctccgaggggcctgtgacctcccacacccctggcccgctccgtctgccccgtgggctcctgccaccgtccccgatgaagatcgtgcccgatgagcgggatcgtgtgcagaagaaaaccttcaccaagtgggtcaacaagcacctcatcaaggcccagaggcacatcagtgacctgtatgaagacctccgcgatggccacaacctcatctccctgctggaggtcctctcgggggacagcctgccccgggagaaggggaggatgcgtttccacaagctgcagaatgtccagattgccctggactacctccggcaccgccaggtgaagctggtgaacatcaggaatgatgacatcgctgacggcaaccccaagctgacccttggcctcatctggacaatcattctgcacttccagatctcagatatccaggtgagtgggcagtcggaggacatgacggccaaggagaagctgctgctgtggtcgcagcgaatggtggaggggtaccagggcctgcgatgcgacaacttcacctccagctggagagacggccgcctcttcaatgccatcatccaccggcacaagcccctgctcatcgacatgaacaaggtgtaccggcagaccaacctggagaacctggaccaggccttctctgtggcggagcgggacctgggagtgacgcggctcctggaccctgaggacgtggatgtccctcagcccgacgagaagtccatcatcacctacgtctcgtcgctgtatgacgccatgccccgcgtgccggacgtgcaggatggggtgagggccaacgagctgcagctgcgctggcaggagtaccgggagctggtgctgctgctgcttcagtggatgcgacaccacacggccgcctttgaggaacgcaggttcccctccagcttcgaggagattgagatcctgtggtctcagttcctgaagtttaaggagatggagctaccagccaaggaggccgacaagaacaggtccaagggcatctaccaatccctggagggagcggtgcaagcaggccagctcaaggtgccccctggctaccacccgctggatgtggagaaggagtggggcaagctgcacgtggccatcctggagcgggagaagcagctccgcagcgagtttgagaggctggagtgtcttcagcgcatcgtgaccaagctgcagatggaggcggggctgtgtgaggagcagctgaaccaggccgacgccctgctgcagtcggatgtccggctgctggctgcaggcaaagtgccacagcgggcgggggaggtggaacgggacttggacaaggcggatagcatgatccggctgctcttcaacgacgtgcagaccctcaaggatggacggcacccgcagggcgagcagatgtaccgcagggtgtaccgtctgcacgagcgcctggtagccatccgcaccgagtacaacctacggctgaaggcaggcgtggcggcccctgcaacccaggtggcccaggtgactctgcagagtgtgcagaggcgccccgagctggaggactccactctgcgctacctgcaggacctgctggcctgggtggaggagaaccagcaccgtgtggatggcgctgagtggggtgtggacctgcccagcgtggaggcgcagctgggcagccaccgaggcctgcaccagtccatcgaagaattccgggccaagatcgagcgggcacggagtgacgagggccagctctcccccgccacccggggtgcctaccgtgactgcctgggtcggctggacctgcagtacgccaagctgctgaactcctccaaggcccgcctcaggtccctggagagcttgcacagctttgtggcagccgccactaaggagctaatgtggctgaatgagaaggaggaggaggaggtgggcttcgactggagcgaccgcaacaccaacatgaccgccaagaaggagagctactcggcgctgatgcgggagctggagctgaaggagaagaagatcaaggagctccaaaatgctggggaccggctgctgcgggaggaccacccggcccggcccacggtggagtccttccaggcggccctgcagacgcagtggagctggatgctacagctgtgctgctgtatcgaggcaca

SEQ ID NO: 667 - DNA, 32765 bp, Homo sapiens
  misc_feature (222)..(222): second gene starts at position 222
atggcagaagtagagcagaagaagaagcggaccttccgcaagttcacctaccgcggcgtggacctcgaccagctgctggacatgtcctacgagcagctgatgcagctgtacagtgcgcgccagcggcggcggctgaaccggggcctgcggcggaagcagcactccctgctgaagcgcctgcgcaaggccaagaaggaggcgccgcccatggagaagccggagaccttctcttcatcctcctactcctcctcgggctacggccgccgctacgcctcggggtcctcggcctccctggggggccctgagtctgccgtggcctgaggctgcctgcgcccaccccgctctgcatgcggcccagcccggctcccaccgaggcgcgggggccgttttcaacgcttaaaggtgtcttcctcccaagtggtgcctaaagtttaaccaaaaagaccagactaatatattaatatatatctgctgtccagacagcctgtatcttgggggacagggctggcccagccctgctggccgcctcaccccctcgggtctcctcactcccttctacctgccactcacacagccaggtgccttggagggtcccaagctgggccccagcccaccctcctgtcttcccagggtagcccgcctgccagtcctagctgcacagggcagctgggcccaaccctgtctgtagagggccctggtgtttctagcactggcctgcacggtgggccttgctggggacggggggccccagtcagcctctctcccagtctacccagagaagccccttccccatgggaagacgaggccctcgggcccagcccccacagtgctgtctgatctgtgctttccagctcaccccccacactcactcctgagacccctggcctccggcgtcagcctccagcctctgttcccctagtaagtgccttccatgtcggcctctaaccccaggccccgaggacccagacccagtggggaggcggacgttccagccggcatggctgggaactgcagacctgtcctcctggtgggtccaggggcccctccagcttgtggagccccacactggggtgccgcctgcccgtctctctcccatggagccccagccccctttgggcccagggacaccagccaggctctgtgctgaccctcctgttgcacccagccctggtctcagcagcgaccacccctgcctccaccctctgagctttgcatgttccactaaccccgggcgggtggcaggtggaggtgtcaggctgctggcgcctctgcaagggcagaacactaacctgaccgtgggcggggccttgcggtatccgcccccaataaaagcaattccaaccttcagccggttcccagcgcaggaagggcagccctggcggctccgcgtggcggctatggagccctcgggcagcctgtttccctccctggtggttgtgggtcacgttgtcaccctggccgctgtgtggcactggcgcaggggacgtcggtgggcgcaggacgagcaagatgagcgggatcgtgtgcagaagaaaaccttcaccaagtgggtcaacaagcacctcatcaaggcccagaggcacatcagtgacctgtatgaagacctccgcgatggccacaacctcatctccctgctggaggtcctctcgggggacagcctgccccgggagaaggggaggatgcgtttccacaagctgcagaatgtccagattgccctggactacctccggcaccgccaggtgaagctggtgaacatcaggaatgatgacatcgctgacggcaaccccaagctgacccttggcctcatctggacaatcattctgcacttccagatctcagatatccaggtgagtgggcagtcggaggacatgacggccaaggagaagctgctgctgtggtcgcagcgaatggtggaggggtaccagggcctgcgatgcgacaacttcacctccagctggagagacggccgcctcttcaatgccatcatccaccggcacaagcccctgctcatcgacatgaacaaggtgtaccggcagaccaacctggagaacctggaccaggccttctctgtggcggagcgggacctgggagtgacgcggctcctggaccctgaggacgtggatgtccctcagcccgacgagaagtccatcatcacctacgtctcgtcgctgtatgacgccatgccccgcgtgccggacgtgcaggatggggtgagggccaacgagctgcagctgcgctggcaggagtaccgggagctggtgctgctgctgcttcagtggatgcgacaccacacggccgcctttgaggaacgcaggttcccctccagcttcgaggagattgagatcctgtggtctcagttcctgaagtttaaggagatggagctaccagccaaggaggccgacaagaacaggtccaagggcatctaccaatccctggagggagcggtgcaagcaggccagctcaaggtgccccctggctaccacccgctggatgtggagaaggagtggggcaagctgcacgtggccatcctggagcgggagaagcagctccgcagcgagtttgagaggctggagtgtcttcagcgcatcgtgaccaagctgcagatggaggcggggctgtgtgaggagcagctgaaccaggccgacgccctgctgcagtcggatgtccggctgctggctgcaggcaaagtgccacagcgggcgggggaggtggaacgggacttggacaaggcggatagcatgatccggctgctcttcaacgacgtgcagaccctcaaggatggacggcacccgcagggcgagcagatgtaccgcagggtgtaccgtctgcacgagcgcctggtagccatccgcaccgagtacaacctacggctgaaggcaggcgtggcggcccctgcaacccaggtggcccaggtgactctgcagagtgtgcagaggcgccccgagctggaggactccactctgcgctacctgcaggacctgctggcctgggtggaggagaaccagcaccgtgtggatggcgctgagtggggtgtggacctgcccagcgtggaggcgcagctgggcagccaccgaggcctgcaccagtccatcgaagaattccgggccaagatcgagcgggcacggagtgacgagggccagctctcccccgccacccggggtgcctaccgtgactgcctgggtcggctggacctgcagtacgccaagctgctgaactcctccaaggcccgcctcaggtccctggagagcttgcacagctttgtggcagccgccactaaggagctaatgtggctgaatgagaaggaggaggaggaggtgggcttcgactggagcgaccgcaacaccaacatgaccgccaagaaggagagctactcggcgctgatgcgggagctggagctgaaggagaagaagatcaaggagctccaaaatgctggggaccggctgctgcgggaggaccacccggcccggcccacggtggagtccttccaggcggccctgcagacgcagtggagctggatgctacagctgtgctgctgtatcgaggcacacctgaaggagaacgctgcctactttcagttcttctcagatgtgcgggaggccgaggggcagttgcagaagctgcaggaggcactgcgtaggaaatacagttgtgatcgctccgccaccgtcacccggctggaggacctgctgcaggatgcccaggacgagaaggaacagctgaacgagtacaagggccacctctcaggcctggccaagcgggccaaggccgtcgtgcagctgaagccccgccacccagcccaccccatgcggggccgcctgcccctgctggccgtgtgcgactataagcaggtggaggtgactgtgcacaagggtgacgagtgccagctggtgggccctgcacagccgtcccactggaaggtgctcagcagctccggcagcgaggccgccgtgccctccgtgtgcttcctggtgcccccgcccaaccaggaggcccaggaggccgtcaccaggctggaggcccagcaccaggccctggtcacgctgtggcaccagttgcacgtggacatgaagagccttctggcctggcagagccttcgccgcgacgtgcagctcatccgctcctggtccctggccacgttccgcaccctgaagccagaggagcagcgccaagccctgcacagcctggagctgcactaccaggccttcctgcgggacagccaggacgcgggcggcttcggacccgaggaccggctgatggctgagcgcgagtacggctcctgcagccaccactaccagcagctgctgcagagcctggaacagggtgcacaggaagagtctcgctgccagcgctgcatctccgagctcaaagacatccggctgcagctggaggcctgtgagacgcgcaccgtgcaccgcctgcggctgccgctggacaaagagccggcacgggagtgtgcccagcgcatcgccgagcagcagaaggcacaggcagaggtggaggggctgggcaagggggtcgcccggctctctgccgaggccgagaaggtcttggccctaccagagccatcgcctgcggcccccacgctgcgctcggagctggagctgacgctgggcaagctggagcaggtccgcagcctgtctgccatctacctggagaagctcaagaccatcagcctggtgatccgcggcacgcagggggccgaggaggtgctcagggcccacgaggagcagctcaaggaggcccaggccgtgccggccaccctcccggagctcgaggccaccaaggcctctctgaagaagctgcgggcccaggccgaggcacagcagcccacgttcgacgccctgcgggatgagctgcggggggcacaggaggtgggggagcgactgcagcagcggcacggggagcgggacgtggaggtggagcgctggcgggagcgggtcgcccagttgcttgagcgctggcaggctgtgctggcccagaccgacgtgcggcagcgcgagctcgagcaactgggccgccagctgcgttactaccgcgagagtgcagaccccttgggcgcctggctgcaggacgccaggcggcggcaggagcagatccaggccatgccgctggccgacagccaggctgtgcgggagcagctgcggcaggagcaggccctgctggaggagatcgagcgccacggcgagaaggtcgaggagtgccagaggtttgcgaaacagtacatcaacgccatcaaggactatgaactccagctggtgacgtacaaggcgcagcttgagccggtggcctccccggccaagaagcccaaggtccagtcgggatcagagagtgtcatccaggagtacgtggacctgcgtacgcactacagcgagctgaccacactgacgagccagtacatcaagttcatcagcgagactctgcggcgcatggaggaggaggagaggctggctgagcagcagcgggcagaggagcgcgagcggctggccgaggtggaggccgcgctggagaagcagcggcagctggccgaggcgcacgcccaggcaaaggcacaggcggagcgggaggcgaaggagctgcagcagcgcatgcaggaggaggtggtgcggcgggaggaggcggcggtggacgcgcagcagcagaagcgcagcattcaggaggagctgcagcagctgcggcagagctcggaggcggagatccaggccaaggcccggcaggcagaggcggctgagcgcagccggctgcgcatcgaggaggagatccgcgtggtgcgcctgcagttggaggccaccgagcgccagcgtggcggggctgagggggagctgcaggcactgcgtgcacgggcggaggaggctgaggcacaaaagcgacaggcgcaggaggaggccgagcgcttgcggaggcaggtgcaggacgagagccagcgtaagcggcaggcggaggtggagctggcctcgcgcgtgaaggccgaggccgaggcggcgcgcgagaagcagcgggccctgcaggccctggaggagctgcggctgcaggcggaggaggcggagcggcgcctgcggcaggccgaggtggagcgagcgcggcaggtacaggtggccctggagacggcgcagcgcagtgcagaggcggagctgcagagcaaacgcgcctccttcgccgagaagacggcacagctggagcgctccctgcaggaggaacacgtggctgtggcacagctgcgggaggaggctgagcggcgggcacagcagcaggccgaggccgagcgggcgcgcgaggaggcagagcgggagctggagcgctggcagctcaaggccaacgaggcgctacggctgcggctgcaggcggaggaggtggcgcagcagaagagcctggcgcaggccgaggctgagaagcagaaggaggaggcggagcgcgaggcgcggcggcgcggcaaggcggaggagcaggccgtccggcagcgggagctggctgaacaagagctggagaagcagcggcagctggcggaaggcaccgcgcagcagcgcctggccgcggagcaggagttgatccggctgcgggccgagacggagcagggggagcagcagcggcagctgctggaggaggagctggcccggctgcagcgtgaggcggctgcagccacgcagaaacggcaggagctggaagccgagctggccaaggtgcgggccgagatggaggtgctgctggccagcaaggcgagggctgaggaggagtcgcgctccaccagcgagaagtccaagcagaggctggaggccgaggccggccggttccgcgagctggccgaggaggccgcccgcctgcgtgccctggcggaagaggccaagcggcagcggcagctggccgaggaagacgcggcgcggcagcgggccgaggcggagcgggtgcttgcggagaagctggccgccatcggcgaggccacgcggctcaagacggaggcggagatcgcgctcaaggagaaggaggcggagaacgagcgcctgcggcggctggcggaggacgaggccttccagcggcggcggctggaggagcaggccgcgcaacacaaggctgacatcgaggagcgcctggcccagctgcgcaaggcatcggacagcgagctggagcggcagaaggggctggtggaggacacgctgaggcagcggcggcaggtggaggaggagatcctggcgctgaaggcgagcttcgagaaggcggccgctggcaaggcggagctggagctggagctgggacgcatccgcagcaacgcggaggacacgctgcgcagcaaggagcaggccgagctggaggctgcgaggcagcggcagctggcggcggaggaggagcggcggcgccgtgaggctgaggagcgcgtgcagaagagcctggcggccgaggaggaggccgcacggcagcggaaggcggcgctggaggaagtcgagcggctgaaagccaaggtggaggaggcgcggcgcctgcgggagcgagcggagcaggagtcggcgcggcagctgcagctggcccaggaggccgcccagaagcggctgcaggcggaagagaaggcacacgccttcgcggtgcagcagaaggagcaggagctacagcagacgctgcagcaggagcagagcgtgctggaccagctgcgcggcgaggcggaggcggcccggcgggcggctgaggaggcggaggaggcccgggtgcaggcggagcgtgaggcggcgcagtcccggcggcaggtggaagaggccgagcggctgaagcagtcggcagaggagcaggcacaggcccgggctcaggcacaggcggctgcagagaagctgcgcaaggaggccgagcaagaggcggcgcggcgggcacaggcggagcaggcggccctgcggcagaagcaggcagctgacgcggagatggagaagcataagaaattcgccgagcagacgctgcggcagaaggcgcaggtggagcaggagctgacaacactgcggctgcagctggaggagaccgaccaccagaagaacctgctggacgaggagctgcagcggctgaaggcggaggccacggaggccgcacgccagcgcagccaggtggaggaggagctcttctcggtgcgcgtgcagatggaggagctgagcaagctcaaggcacgcatcgaggctgagaaccgcgcactcatcttgcgtgacaaggacaatacgcagcgcttcctgcaggaggaggctgagaagatgaagcaggtggcggaggaggccgcgcggctgagtgtggcggcccaagaggctgcgcgactgcggcagctggcagaggaggacctggcacagcagcgggccttggcagagaagatgctcaaggagaagatgcaggcggtgcaggaggccacgcgactcaaggctgaggcggaactgctgcagcagcagaaggagcttgcgcaggagcaggcgcggcggctgcaggaggacaaggagcagatggcgcagcagctggcggaggagacgcagggcttccagcggacgctggaggccgagcggcagcggcagctggagatgagcgctgaggctgagcgcctcaagctgcgtgtggccgagatgagccgagcccaggcccgcgctgaggaggacgcccagcgcttccggaagcaggcggaggagatcggtgagaagctgcaccgcacggagctcgccacccaggagaaggtgaccctggtgcagacactggagatccagcgacagcagagtgaccatgatgccgagcgcctgcgggaggccatcgctgagctggagcgtgagaaggagaagctccaacaggaggccaaactgctgcagctcaagtctgaggagatgcagacggtgcagcaggagcagctgctgcaggagacgcaggccctgcagcaaagcttcctctctgaaaaggacagcctgctacagcgggagcgcttcatcgagcaggagaaggccaagctggagcagctcttccaggacgaggtggccaaggcacagcagctgcgtgaggagcagcagcggcagcagcagcagatggagcaggaacggcagcggctggtggccagcatggaggaggcgcggcggcggcagcatgaggccgaggagggcgtgcggcgcaagcaggaggagctgcagcagctggagcagcagcggcggcagcaggaggagctgctggctgaggagaaccagaggctgcgtgagcagctgcagctcctggaggagcagcaccgggccgcgctggcgcactcagaggaggtcactgcctcgcaggtggctgccacaaagaccctgcccaatggccgggatgcacttgatggccccgcggcagaggcagagccggagcacagcttcgatggcctgcggcggaaggtgtcagctcagaggctgcaggaggccggcatcctgagtgcggaggagctgcagcggttggcgcagggccacaccacggtggacgagctcgcacggcgggaagacgtgcgccactacctgcagggccgcagcagtatcgcagggctgttgctgaaggccaccaatgagaagctgagtgtttacgccgccctgcagaggcagctgctgagtcccggcacggccctcatcctgctggaggcgcaggcggcctcaggcttcctgctggaccctgtgcggaaccggcggctgaccgtcaacgaggctgtgaaggagggtgtggtgggccccgagctgcaccacaagctgctgtcggccgagcgcgccgtcactggctacaaggacccctacactggccagcagatctctctcttccaagccatgcagaagggcctcatcgtccgggagcacggcatccgcctgctggaggcccagatcgccacgggcggcgttatcgaccccgtgcacagccaccgcgtgcccgtggacgtggcctaccggcgcggctacttcgacgaggagatgaaccgcgtcctggcggaccccagcgacgacaccaagggcttctttgaccccaacacgcacgagaacctcacgtacctgcagctactggagcgctgcgtggaggaccccgagacgggcctgtgccttctgccactcacggataaggctgccaagggcggggagctggtctacactgactccgaggcccgggacgtctttgagaaggccaccgtgtctgcgccgttcggcaagttccagggcaagacggtgaccatttgggagatcatcaactcggaatacttcacggcagagcagcggcgggacctgctgcggcagttccgcacgggccggatcacagtggagaagatcatcaagatcatcatcacggtggtggaggagcaggagcagaagggccggctttgctttgagggcctgcgcagcctggtgccagccgccgagctgctggagagcagggtcatcgaccgcgagctctaccagcagctgcagcgaggtgagcgctctgtgcgagacgtagccgaggtggacactgtgcggcgggctctccggggtgccaacgtcatcgcgggtgtatggctggaggaggcggggcagaagctgagtatctacaatgccctgaagaaagacctgctgccatccgacatggccgtggccctgttggaagcccaggccggcaccgggcacatcatcgaccccgccaccagcgcccggctgaccgtggacgaggcagtgcgtgctggcctggtgggccccgagtttcatgagaagctgctatcagccgagaaggctgtgacagggtacagggacccctacacagggcagagcgtctccctgttccaggccctgaagaagggcctcattccccgggagcagggcctgcgcctgttggacgcccagctgtccacgggcggcatcgtggaccccagcaagagccaccgcgtgcccctggatgtcgcctgcgcccgaggctgcctggatgaggagaccagcagggccctgtcggcaccaagggccgacgccaaggcctacagtgaccccagcacaggggagccggccacctacggcgagctccagcagcggtgccggcccgaccagctgaccgggctgagcctgctgccgctctcagaaaaggctgctcgggcccggcaggaggagctctactcagagctgcaggcccgtgagacctttgaaaagaccccggttgaggtccccgtgggtggcttcaagggcaggacggtgacggtgtgggagctcatcagctctgagtacttcactgcggagcagcggcaggagctgttgcgtcagttccgcacgggcaaggtcaccgtggagaaggtcatcaagattctcattaccatcgtggaggaggtggagaccctgcggcaggagaggctgtccttcagcggcctccgtgcccctgtgccagccagcgagctcctggcttccggggtcctcagcagagcccagtttgagcagctcaaggacggcaagacgacggtcaaggacctttcggagctgggctccgtgcggacgctgctgcagggcagtggctgcctcgccggcatctacctggaggacaccaaggagaaggtgtccatctacgaggccatgcgccggggcctgctgagagccacaacggctgcgctcctgctggaggcgcaggcggccactggcttcctggtggaccccgtgcggaaccagcgcctgtatgtccacgaggccgtgaaggcgggcgtggtgggccccgagcttcacgagcagctgctgtctgccgagaaggccgtcaccggctacagagacccctactcgggcagcaccatctccctcttccaggccatgcagaagggcctggttctccggcagcacggcatccgcctgctggaggcccagatcgccacgggcggcatcatcgaccccgtgcacagccaccgcgtgcctgtggacgtggcctaccagcgcggctacttcagtgaggagatgaaccgcgtcctggcggaccccagcgacgacaccaagggcttctttgaccccaacacgcatgagaacctcacgtacaggcagctgctggagcggtgcgtggaggaccccgagacgggcttgcgccttctgccactgaaaggggcggagaaggctgaggtggtggagaccacgcaggtgtacactgaggaggagacaagaagggcatttgaagagacacagatcgacattcccggcggcggcagccacggcggctccaccatgtccctgtgggaggtgatgcagtcggacctgatccccgaggagcagcgggcccagctgatggctgacttccaggccggccgggtgaccaaggaacgcatgatcatcatcatcatcgagatcattgagaagacagagatcatccgccagcagggtctggcctcctacgactacgtgcgccgccgcctcacggctgaggacctgttcgaggctcggatcatctctctcgagacctacaacctgctccgggagggcaccaggagcctccgtgaggctctcgaggcggagtccgcctggtgctacctctatggcacgggctccgtggctggtgtctacctgcccggttccaggcagacactgagcatctaccaggctctcaagaaagggctgctgagtgccgaggtggcccgcctgctgctggaggcacaggcagccacaggcttcctgctggacccggtgaagggggagcggctgactgtggatgaggctgtgcggaagggcctcgtggggcccgagctgcacgaccgcctgctctcggctgagcgggcggtcaccggctaccgtgacccctacaccgagcagaccatctcgctcttccaggccatgaagaaggagctgatccctactgaggaggccctgcggctgctggatgcccagctggccaccggcggcatcgtggacccccgcctgggcttccaccttcccctggaggtggcttaccagcgtggctacctcaacaaggacacgcacgaccagctgtcagagcccagcgaggtgcgcagctacgtggacccgtccaccgacgagcgcctcagctacacgcagctgctcaggcggtgccgtcgtgacgacggcaccggccagctgctcctgccactgtcggacgcccgcaagctgaccttccgtggcctgcggaagcagatcaccatggaggagctggtgcgctcgcaggtcatggacgaggccacggcgctgcagctgcgggagggcctgacctccatcgaggaggtcaccaagaacttgcagaagttcctggaaggcaccagctgcatcgctggtgtcttcgtggacgccaccaaggaacggctctcggtgtaccaggccatgaagaagggcatcatccgccccggcacagcctttgagctcctggaggcgcaggcggccaccggttacgtcatcgaccccatcaagggactgaagctgacggtggaggaggctgtgcgtatgggcattgtgggccccgagttcaaggacaagctgctgtcggccgagcgcgccgtcactgggtacaaggacccctactctgggaagctcatctccctcttccaggccatgaagaagggcctgatcctgaaggaccatggcatccgcctgctggaggcccagatcgccacgggcggcatcatcgaccctgaggagagccaccggctgcccgtggaggtggcctacaagcgcggcctcttcgatgaggagatgaacgagatcctgaccgacccctcggacgacaccaagggcttctttgaccctaacacggaggagaacctcacctacctgcagctgatggagcgttgtatcactgacccccagacgggcctgtgtctcttgccgctgaaggagaagaagcgggagcggaagacgtcctccaagtcctccgtgcgcaagcgccgagtggtcatcgtggaccccgagacgggcaaggagatgtcagtgtacgaggcctaccgcaagggcctgattgaccaccagacgtacctggagctgtccgagcaggagtgcgagtgggaggagatcaccatctcctcctcggacggcgtggtcaagtccatgatcatcgaccgccgctccgggcgccagtacgacatcgatgatgccatcgccaagaacctcatcgaccgctcggcactggaccagtaccgcgccggcacgctctccatcaccgagttcgccgacatgctctcgggcaacgccggtggtttccgctcccgttcctcctcggtgggatcctcctcctcctaccccatcagccccgccgtctccaggacccagctggcctcctggtcagaccccactgaggagacgggccccgtggctggcatcctggacacggagacgctggagaaggtgtccatcaccgaggccatgcaccggaacctggtggataacatcacggggcagcggctgctggaggcgcaggcctgcaccgggggcatcatcgaccccagcaccggtgagcgcttccctgtcaccgacgccgtcaacaagggcctggtggacaagatcatggtggaccgcatcaacctggcccagaaggccttctgcggcttcgaggacccacgcaccaagaccaagatgtcggccgcccaggccctgaagaagggctggctctactacgaggccggccagcgcttcctggaggtgcagtacctgaccggcggcttgatcgagcccgacacgccgggccgcgtgcccctggacgaggccctgcagcgcggcacggtggacgcccgcaccgcacagaagctgcgtgacgtgggcgcctactccaagtacctcacctgccctaagaccaagctcaagatctcctataaggacgcgctggaccgcagcatggtggaggagggcacggggctgcggctgctggaggctgccgcgcagtccaccaagggctactacagcccctacagcgtcagcggctccggctctaccgctggctcccgcaccggctcgcgcaccggctcccgggccggctcccgccgcggcagctttgacgccaccggctccggcttctccatgaccttctcttcatcctcctactcctcctcgggctacggccgccgctacgcctcggggtcctcggcctccctggggggccctgagtctgccgtggcctgaggctgcctgcgcccaccccgctctgcatgcggcccagcccggctcccaccgaggcgcgggggccgttttcaacgcttaaaggtgtcttcctcccaagtggtgcctaaagtttaaccaaaaagaccagactaatatattaatatatatctgctgtccagacagcctgtatcttgggggacagggctggcccagccctgctggccgcctcaccccctcgggtctcctcactcccttctacctgccactcacacagccaggtgccttggagggtcccaagctgggccccagcccaccctcctgtcttcccagggtagcccgcctgccagtcctagctgcacagggcagctgggcccaaccctgtctgtagagggccctggtgtttctagcactggcctgcacggtgggccttgctggggacggggggccccagtcagcctctctcccagtctacccagagaagccccttccccatgggaagacgaggccctcgggcccagcccccacagtgctgtctgatctgtgctttccagctcaccccccacactcactcctgagacccctggcctccggcgtcagcctccagcctctgttcccctagtaagtgccttccatgtcggcctctaaccccaggccccgaggacccagacccagtggggaggcggacgttccagccggcatggctgggaactgcagacctgtcctcctggtgggtccaggggcccctccagcttgtggagccccacactggggtgccgcctgcccgtctctctcccatggagccccagccccctttgggcccagggacaccagccaggctctgtgctgaccctcctgttgcacccagccctggtctcagcagcgaccacccctgcctccaccctctgagctttgcatgttccactaaccccgggcgggtggcaggtggaggtgtcaggctgctggcgcctctgcaagggcagaacactaacctgaccgtgggcggggccttgcggtatccgcccccaataaaagcaattccaaccttcagccggttcccagcgcaggaagggcagccctggcggctccgcgtggcggctatggagccctcgggcagcctgtttccctccctggtggttgtgggtcacgttgtcaccctggccgctgtgtggcactggcgcaggggacgtcggtgggcgcaggacgagcaagatgagcgggatcgtgtgcagaagaaaaccttcaccaagtgggtcaacaagcacctcatcaaggcccagaggcacatcagtgacctgtatgaagacctccgcgatggccacaacctcatctccctgctggaggtcctctcgggggacagcctgccccgggagaaggggaggatgcgtttccacaagctgcagaatgtccagattgccctggactacctccggcaccgccaggtgaagctggtgaacatcaggaatgatgacatcgctgacggcaaccccaagctgacccttggcctcatctggacaatcattctgcacttccagatctcagatatccaggtgagtgggcagtcggaggacatgacggccaaggagaagctgctgctgtggtcgcagcgaatggtggaggggtaccagggcctgcgatgcgacaacttcacctccagctggagagacggccgcctcttcaatgccatcatccaccggcacaagcccctgctcatcgacatgaacaaggtgtaccggcagaccaacctggagaacctggaccaggccttctctgtggcggagcgggacctgggagtgacgcggctcctggaccctgaggacgtggatgtccctcagcccgacgagaagtccatcatcacctacgtctcgtcgctgtatgacgccatgccccgcgtgccggacgtgcaggatggggtgagggccaacgagctgcagctgcgctggcaggagtaccgggagctggtgctgctgctgcttcagtggatgcgacaccacacggccgcctttgaggaacgcaggttcccctccagcttcgaggagattgagatcctgtggtctcagttcctgaagtttaaggagatggagctaccagccaaggaggccgacaagaacaggtccaagggcatctaccaatccctggagggagcggtgcaagcaggccagctcaaggtgccccctggctaccacccgctggatgtggagaaggagtggggcaagctgcacgtggccatcctggagcgggagaagcagctccgcagcgagtttgagaggctggagtgtcttcagcgcatcgtgaccaagctgcagatggaggcggggctgtgtgaggagcagctgaaccaggccgacgccctgctgcagtcggatgtccggctgctggctgcaggcaaagtgccacagcgggcgggggaggtggaacgggacttggacaaggcggatagcatgatccggctgctcttcaacgacgtgcagaccctcaaggatggacggcacccgcagggcgagcagatgtaccgcagggtgtaccgtctgcacgagcgcctggtagccatccgcaccgagtacaacctacggctgaaggcaggcgtggcggcccctgcaacccaggtggcccaggtgactctgcagagtgtgcagaggcgccccgagctggaggactccactctgcgctacctgcaggacctgctggcctgggtggaggagaaccagcaccgtgtggatggcgctgagtggggtgtggacctgcccagcgtggaggcgcagctgggcagccaccgaggcctgcaccagtccatcgaagaattccgggccaagatcgagcgggcacggagtgacgagggccagctctcccccgccacccggggtgcctaccgtgactgcctgggtcggctggacctgcagtacgccaagctgctgaactcctccaaggcccgcctcaggtccctggagagcttgcacagctttgtggcagccgccactaaggagctaatgtggctgaatgagaaggaggaggaggaggtgggcttcgactggagcgaccgcaacaccaacatgaccgccaagaaggagagctactcggcgctgatgcgggagctggagctgaaggagaagaagatcaaggagctccaaaatgctggggaccggctgctgcgggaggaccacccggcccggcccacggtggagtccttccaggcggccctgcagacgcagtggagctggatgctacagctgtgctgctgtatcgaggcacacctgaaggagaacgctgcctactttcagttcttctcagatgtgcgggaggccgaggggcagttgcagaagctgcaggaggcactgcgtaggaaatacagttgtgatcgctccgccaccgtcacccggctggaggacctgctgcaggatgcccaggacgagaaggaacagctgaacgagtacaagggccacctctcaggcctggccaagcgggccaaggccgtcgtgcagctgaagccccgccacccagcccaccccatgcggggccgcctgcccctgctggccgtgtgcgactataagcaggtggaggtgactgtgcacaagggtgacgagtgccagctggtgggccctgcacagccgtcccactggaaggtgctcagcagctccggcagcgaggccgccgtgccctccgtgtgcttcctggtgcccccgcccaaccaggaggcccaggaggccgtcaccaggctggaggcccagcaccaggccctggtcacgctgtggcaccagttgcacgtggacatgaagagccttctggcctggcagagccttcgccgcgacgtgcagctcatccgctcctggtccctggccacgttccgcaccctgaagccagaggagcagcgccaagccctgcacagcctggagctgcactaccaggccttcctgcgggacagccaggacgcgggcggcttcggacccgaggaccggctgatggctgagcgcgagtacggctcctgcagccaccactaccagcagctgctgcagagcctggaacagggtgcacaggaagagtctcgctgccagcgctgcatctccgagctcaaagacatccggctgcagctggaggcctgtgagacgcgcaccgtgcaccgcctgcggctgccgctggacaaagagccggcacgggagtgtgcccagcgcatcgccgagcagcagaaggcacaggcagaggtggaggggctgggcaagggggtcgcccggctctctgccgaggccgagaaggtcttggccctaccagagccatcgcctgcggcccccacgctgcgctcggagctggagctgacgctgggcaagctggagcaggtccgcagcctgtctgccatctacctggagaagctcaagaccatcagcctggtgatccgcggcacgcagggggccgaggaggtgctcagggcccacgaggagcagctcaaggaggcccaggccgtgccggccaccctcccggagctcgaggccaccaaggcctctctgaagaagctgcgggcccaggccgaggcacagcagcccacgttcgacgccctgcgggatgagctgcggggggcacaggaggtgggggagcgactgcagcagcggcacggggagcgggacgtggaggtggagcgctggcgggagcgggtcgcccagttgcttgagcgctggcaggctgtgctggcccagaccgacgtgcggcagcgcgagctcgagcaactgggccgccagctgcgttactaccgcgagagtgcagaccccttgggcgcctggctgcaggacgccaggcggcggcaggagcagatccaggccatgccgctggccgacagccaggctgtgcgggagcagctgcggcaggagcaggccctgctggaggagatcgagcgccacggcgagaaggtcgaggagtgccagaggtttgcgaaacagtacatcaacgccatcaaggactatgaactccagctggtgacgtacaaggcgcagcttgagccggtggcctccccggccaagaagcccaaggtccagtcgggatcagagagtgtcatccaggagtacgtggacctgcgtacgcactacagcgagctgaccacactgacgagccagtacatcaagttcatcagcgagactctgcggcgcatggaggaggaggagaggctggctgagcagcagcgggcagaggagcgcgagcggctggccgaggtggaggccgcgctggagaagcagcggcagctggccgaggcgcacgcccaggcaaaggcacaggcggagcgggaggcgaaggagctgcagcagcgcatgcaggaggaggtggtgcggcgggaggaggcggcggtggacgcgcagcagcagaagcgcagcattcaggaggagctgcagcagctgcggcagagctcggaggcggagatccaggccaaggcccggcaggcagaggcggctgagcgcagccggctgcgcatcgaggaggagatccgcgtggtgcgcctgcagttggaggccaccgagcgccagcgtggcggggctgagggggagctgcaggcactgcgtgcacgggcggaggaggctgaggcacaaaagcgacaggcgcaggaggaggccgagcgcttgcggaggcaggtgcaggacgagagccagcgtaagcggcaggcggaggtggagctggcctcgcgcgtgaaggccgaggccgaggcggcgcgcgagaagcagcgggccctgcaggccctggaggagctgcggctgcaggcggaggaggcggagcggcgcctgcggcaggccgaggtggagcgagcgcggcaggtacaggtggccctggagacggcgcagcgcagtgcagaggcggagctgcagagcaaacgcgcctccttcgccgagaagacggcacagctggagcgctccctgcaggaggaacacgtggctgtggcacagctgcgggaggaggctgagcggcgggcacagcagcaggccgaggccgagcgggcgcgcgaggaggcagagcgggagctggagcgctggcagctcaaggccaacgaggcgctacggctgcggctgcaggcggaggaggtggcgcagcagaagagcctggcgcaggccgaggctgagaagcagaaggaggaggcggagcgcgaggcgcggcggcgcggcaaggcggaggagcaggccgtccggcagcgggagctggctgaacaagagctggagaagcagcggcagctggcggaaggcaccgcgcagcagcgcctggccgcggagcaggagttgatccggctgcgggccgagacggagcagggggagcagcagcggcagctgctggaggaggagctggcccggctgcagcgtgaggcggctgcagccacgcagaaacggcaggagctggaagccgagctggccaaggtgcgggccgagatggaggtgctgctggccagcaaggcgagggctgaggaggagtcgcgctccaccagcgagaagtccaagcagaggctggaggccgaggccggccggttccgcgagctggccgaggaggccgcccgcctgcgtgccctggcggaagaggccaagcggcagcggcagctggccgaggaagacgcggcgcggcagcgggccgaggcggagcgggtgcttgcggagaagctggccgccatcggcgaggccacgcggctcaagacggaggcggagatcgcgctcaaggagaaggaggcggagaacgagcgcctgcggcggctggcggaggacgaggccttccagcggcggcggctggaggagcaggccgcgcaacacaaggctgacatcgaggagcgcctggcccagctgcgcaaggcatcggacagcgagctggagcggcagaaggggctggtggaggacacgctgaggcagcggcggcaggtggaggaggagatcctggcgctgaaggcgagcttcgagaaggcggccgctggcaaggcggagctggagctggagctgggacgcatccgcagcaacgcggaggacacgctgcgcagcaaggagcaggccgagctggaggctgcgaggcagcggcagctggcggcggaggaggagcggcggcgccgtgaggctgaggagcgcgtgcagaagagcctggcggccgaggaggaggccgcacggcagcggaaggcggcgctggaggaagtcgagcggctgaaagccaaggtggaggaggcgcggcgcctgcgggagcgagcggagcaggagtcggcgcggcagctgcagctggcccaggaggccgcccagaagcggctgcaggcggaagagaaggcacacgccttcgcggtgcagcagaaggagcaggagctacagcagacgctgcagcaggagcagagcgtgctggaccagctgcgcggcgaggcggaggcggcccggcgggcggctgaggaggcggaggaggcccgggtgcaggcggagcgtgaggcggcgcagtcccggcggcaggtggaagaggccgagcggctgaagcagtcggcagaggagcaggcacaggcccgggctcaggcacaggcggctgcagagaagctgcgcaaggaggccgagcaagaggcggcgcggcgggcacaggcggagcaggcggccctgcggcagaagcaggcagctgacgcggagatggagaagcataagaaattcgccgagcagacgctgcggcagaaggcgcaggtggagcaggagctgacaacactgcggctgcagctggaggagaccgaccaccagaagaacctgctggacgaggagctgcagcggctgaaggcggaggccacggaggccgcacgccagcgcagccaggtggaggaggagctcttctcggtgcgcgtgcagatggaggagctgagcaagctcaaggcacgcatcgaggctgagaaccgcgcactcatcttgcgtgacaaggacaatacgcagcgcttcctgcaggaggaggctgagaagatgaagcaggtggcggaggaggccgcgcggctgagtgtggcggcccaagaggctgcgcgactgcggcagctggcagaggaggacctggcacagcagcgggccttggcagagaagatgctcaaggagaagatgcaggcggtgcaggaggccacgcgactcaaggctgaggcggaactgctgcagcagcagaaggagcttgcgcaggagcaggcgcggcggctgcaggaggacaaggagcagatggcgcagcagctggcggaggagacgcagggcttccagcggacgctggaggccgagcggcagcggcagctggagatgagcgctgaggctgagcgcctcaagctgcgtgtggccgagatgagccgagcccaggcccgcgctgaggaggacgcccagcgcttccggaagcaggcggaggagatcggtgagaagctgcaccgcacggagctcgccacccaggagaaggtgaccctggtgcagacactggagatccagcgacagcagagtgaccatgatgccgagcgcctgcgggaggccatcgctgagctggagcgtgagaaggagaagctccaacaggaggccaaactgctgcagctcaagtctgaggagatgcagacggtgcagcaggagcagctgctgcaggagacgcaggccctgcagcaaagcttcctctctgaaaaggacagcctgctacagcgggagcgcttcatcgagcaggagaaggccaagctggagcagctcttccaggacgaggtggccaaggcacagcagctgcgtgaggagcagcagcggcagcagcagcagatggagcaggaacggcagcggctggtggccagcatggaggaggcgcggcggcggcagcatgaggccgaggagggcgtgcggcgcaagcaggaggagctgcagcagctggagcagcagcggcggcagcaggaggagctgctggctgaggagaaccagaggctgcgtgagcagctgcagctcctggaggagcagcaccgggccgcgctggcgcactcagaggaggtcactgcctcgcaggtggctgccacaaagaccctgcccaatggccgggatgcacttgatggccccgcggcagaggcagagccggagcacagcttcgatggcctgcggcggaaggtgtcagctcagaggctgcaggaggccggcatcctgagtgcggaggagctgcagcggttggcgcagggccacaccacggtggacgagctcgcacggcgggaagacgtgcgccactacctgcagggccgcagcagtatcgcagggctgttgctgaaggccaccaatgagaagctgagtgtttacgccgccctgcagaggcagctgctgagtcccggcacggccctcatcctgctggaggcgcaggcggcctcaggcttcctgctggaccctgtgcggaaccggcggctgaccgtcaacgaggctgtgaaggagggtgtggtgggccccgagctgcaccacaagctgctgtcggccgagcgcgccgtcactggctacaaggacccctacactggccagcagatctctctcttccaagccatgcagaagggcctcatcgtccgggagcacggcatccgcctgctggaggcccagatcgccacgggcggcgttatcgaccccgtgcacagccaccgcgtgcccgtggacgtggcctaccggcgcggctacttcgacgaggagatgaaccgcgtcctggcggaccccagcgacgacaccaagggcttctttgaccccaacacgcacgagaacctcacgtacctgcagctactggagcgctgcgtggaggaccccgagacgggcctgtgccttctgccactcacggataaggctgccaagggcggggagctggtctacactgactccgaggcccgggacgtctttgagaaggccaccgtgtctgcgccgttcggcaagttccagggcaagacggtgaccatttgggagatcatcaactcggaatacttcacggcagagcagcggcgggacctgctgcggcagttccgcacgggccggatcacagtggagaagatcatcaagatcatcatcacggtggtggaggagcaggagcagaagggccggctttgctttgagggcctgcgcagcctggtgccagccgccgagctgctggagagcagggtcatcgaccgcgagctctaccagcagctgcagcgaggtgagcgctctgtgcgagacgtagccgaggtggacactgtgcggcgggctctccggggtgccaacgtcatcgcgggtgtatggctggaggaggcggggcagaagctgagtatctacaatgccctgaagaaagacctgctgccatccgacatggccgtggccctgttggaagcccaggccggcaccgggcacatcatcgaccccgccaccagcgcccggctgaccgtggacgaggcagtgcgtgctggcctggtgggccccgagtttcatgagaagctgctatcagccgagaaggctgtgacagggtacagggacccctacacagggcagagcgtctccctgttccaggccctgaagaagggcctcattccccgggagcagggcctgcgcctgttggacgcccagctgtccacgggcggcatcgtggaccccagcaagagccaccgcgtgcccctggatgtcgcctgcgcccgaggctgcctggatgaggagaccagcagggccctgtcggcaccaagggccgacgccaaggcctacagtgaccccagcacaggggagccggccacctacggcgagctccagcagcggtgccggcccgaccagctgaccgggctgagcctgctgccgctctcagaaaaggctgctcgggcccggcaggaggagctctactcagagctgcaggcccgtgagacctttgaaaagaccccggttgaggtccccgtgggtggcttcaagggcaggacggtgacggtgtgggagctcatcagctctgagtacttcactgcggagcagcggcaggagctgttgcgtcagttccgcacgggcaaggtcaccgtggagaaggtcatcaagattctcattaccatcgtggaggaggtggagaccctgcggcaggagaggctgtccttcagcggcctccgtgcccctgtgccagccagcgagctcctggcttccggggtcctcagcagagcccagtttgagcagctcaaggacggcaagacgacggtcaaggacctttcggagctgggctccgtgcggacgctgctgcagggcagtggctgcctcgccggcatctacctggaggacaccaaggagaaggtgtccatctacgaggccatgcgccggggcctgctgagagccacaacggctgcgctcctgctggaggcgcaggcggccactggcttcctggtggaccccgtgcggaaccagcgcctgtatgtccacgaggccgtgaaggcgggcgtggtgggccccgagcttcacgagcagctgctgtctgccgagaaggccgtcaccggctacagagacccctactcgggcagcaccatctccctcttccaggccatgcagaagggcctggttctccggcagcacggcatccgcctgctggaggcccagatcgccacgggcggcatcatcgaccccgtgcacagccaccgcgtgcctgtggacgtggcctaccagcgcggctacttcagtgaggagatgaaccgcgtcctggcggaccccagcgacgacaccaagggcttctttgaccccaacacgcatgagaacctcacgtacaggcagctgctggagcggtgcgtggaggaccccgagacgggcttgcgccttctgccactgaaaggggcggagaaggctgaggtggtggagaccacgcaggtgtacactgaggaggagacaagaagggcatttgaagagacacagatcgacattcccggcggcggcagccacggcggctccaccatgtccctgtgggaggtgatgcagtcggacctgatccccgaggagcagcgggcccagctgatggctgacttccaggccggccgggtgaccaaggaacgcatgatcatcatcatcatcgagatcattgagaagacagagatcatccgccagcagggtctggcctcctacgactacgtgcgccgccgcctcacggctgaggacctgttcgaggctcggatcatctctctcgagacctacaacctgctccgggagggcaccaggagcctccgtgaggctctcgaggcggagtccgcctggtgctacctctatggcacgggctccgtggctggtgtctacctgcccggttccaggcagacactgagcatctaccaggctctcaagaaagggctgctgagtgccgaggtggcccgcctgctgctggaggcacaggcagccacaggcttcctgctggacccggtgaagggggagcggctgactgtggatgaggctgtgcggaagggcctcgtggggcccgagctgcacgaccgcctgctctcggctgagcgggcggtcaccggctaccgtgacccctacaccgagcagaccatctcgctcttccaggccatgaagaaggagctgatccctactgaggaggccctgcggctgctggatgcccagctggccaccggcggcatcgtggacccccgcctgggcttccaccttcccctggaggtggcttaccagcgtggctacctcaacaaggacacgcacgaccagctgtcagagcccagcgaggtgcgcagctacgtggacccgtccaccgacgagcgcctcagctacacgcagctgctcaggcggtgccgtcgtgacgacggcaccggccagctgctcctgccactgtcggacgcccgcaagctgaccttccgtggcctgcggaagcagatcaccatggaggagctggtgcgctcgcaggtcatggacgaggccacggcgctgcagctgcgggagggcctgacctccatcgaggaggtcaccaagaacttgcagaagttcctggaaggcaccagctgcatcgctggtgtcttcgtggacgccaccaaggaacggctctcggtgtaccaggccatgaagaagggcatcatccgccccggcacagcctttgagctcctggaggcgcaggcggccaccggttacgtcatcgaccccatcaagggactgaagctgacggtggaggaggctgtgcgtatgggcattgtgggccccgagttcaaggacaagctgctgtcggccgagcgcgccgtcactgggtacaaggacccctactctgggaagctcatctccctcttccaggccatgaagaagggcctgatcctgaaggaccatggcatccgcctgctggaggcccagatcgccacgggcggcatcatcgaccctgaggagagccaccggctgcccgtggaggtggcctacaagcgcggcctcttcgatgaggagatgaacgagatcctgaccgacccctcggacgacaccaagggcttctttgaccctaacacggaggagaacctcacctacctgcagctgatggagcgttgtatcactgacccccagacgggcctgtgtctcttgccgctgaaggagaagaagcgggagcggaagacgtcctccaagtcctccgtgcgcaagcgccgagtggtcatcgtggaccccgagacgggcaaggagatgtcagtgtacgaggcctaccgcaagggcctgattgaccaccagacgtacctggagctgtccgagcaggagtgcgagtgggaggagatcaccatctcctcctcggacggcgtggtcaagtccatgatcatcgaccgccgctccgggcgccagtacgacatcgatgatgccatcgccaagaacctcatcgaccgctcggcactggaccagtaccgcgccggcacgctctccatcaccgagttcgccgacatgctctcgggcaacgccggtggtttccgctcccgttcctcctcggtgggatcctcctcctcctaccccatcagccccgccgtctccaggacccagctggcctcctggtcagaccccactgaggagacgggccccgtggctggcatcctggacacggagacgctggagaaggtgtccatcaccgaggccatgcaccggaacctggtggataacatcacggggcagcggctgctggaggcgcaggcctgcaccgggggcatcatcgaccccagcaccggtgagcgcttccctgtcaccgacgccgtcaacaagggcctggtggacaagatcatggtggaccgcatcaacctggcccagaaggccttctgcggcttcgaggacccacgcaccaagaccaagatgtcggccgcccaggccctgaagaagggctggctctactacgaggccggccagcgcttcctggaggtgcagtacctgaccggcggcttgatcgagcccgacacgccgggccgcgtgcccctggacgaggccctgcagcgcggcacggtggacgcccgcaccgcacagaagctgcgtgacgtgggcgcctactccaagtacctcacctgccctaagaccaagctcaagatctcctataaggacgcgctggaccgcagcatggtggaggagggcacggggctgcggctgctggaggctgccgcgcagtccaccaagggctactacagcccctacagcgtcagcggctccggctctaccgctggctcccgcaccggctcgcgcaccggctcccgggccggctcccgccgcggcagctttgacgccaccggctccggcttctccatgaccttctcttcatcctcctactcctcctcgggctacggccgccgctacgcctcggggtcctcggcctccctggggggccctgagtctgccgtggcctgaggctgcctgcgcccaccccgctctgcatgcggcccagcccggctcccaccgaggcgcgggggccgttttcaacgcttaaaggtgtcttcctcccaagtggtgcctaaagtttaaccaaaaagaccagactaatatattaatatatatctgctgtccagacagcctgtatcttgggggacagggctggcccagccctgctggccgcctcaccccctcgggtctcctcactcccttctacctgccactcacacagccaggtgccttggagggtcccaagctgggccccagcccaccctcctgtcttcccagggtagcccgcctgccagtcctagctgcacagggcagctgggcccaaccctgtctgtagagggccctggtgtttctagcactggcctgcacggtgggccttgctggggacggggggccccagtcagcctctctcccagtctacccagagaagccccttccccatgggaagacgaggccctcgggcccagcccccacagtgctgtctgatctgtgctttccagctcaccccccacactcactcctgagacccctggcctccggcgtcagcctccagcctctgttcccctagtaagtgccttccatgtcggcctctaaccccaggccccgaggacccagacccagtggggaggcggacgttccagccggcatggctgggaactgcagacctgtcctcctggtgggtccaggggcccctccagcttgtggagccccacactggggtgccgcctgcccgtctctctcccatggagccccagccccctttgggcccagggacaccagccaggctctgtgctgaccctcctgttgcacccagccctggtctcagcagcgaccacccctgcctccaccctctgagctttgcatgttccactaaccccgggcgggtggcaggtggaggtgtcaggctgctggcgcctctgcaagggcagaacactaacctgaccgtgggcggggccttgcggtatccgcccccaataaaagcaattccaaccttcagccggttcccagcgcaggaagggcagccctggcggctccgcgtggcggctatggagccctcgggcagcctgtttccctccctggtggttgtgggtcacgttgtcaccctggccgctgtgtggcactggcgcaggggacgtcggtgggcgcaggacgagcaagatgagcgggatcgtgtgcagaagaaaaccttcaccaagtgggtcaacaagcacctcatcaaggcccagaggcacatcagtgacctgtatgaagacctccgcgatggccacaacctcatctccctgctggaggtcctctcgggggacagcctgccccgggagaaggggaggatgcgtttccacaagctgcagaatgtccagattgccctggactacctccggcaccgccaggtgaagctggtgaacatcaggaatgatgacatcgctgacggcaaccccaagctgacccttggcctcatctggacaatcattctgcacttccagatctcagatatccaggtgagtgggcagtcggaggacatgacggccaaggagaagctgctgctgtggtcgcagcgaatggtggaggggtaccagggcctgcgatgcgacaacttcacctccagctggagagacggccgcctcttcaatgccatcatccaccggcacaagcccctgctcatcgacatgaacaaggtgtaccggcagaccaacctggagaacctggaccaggccttctctgtggcggagcgggacctgggagtgacgcggctcctggaccctgaggacgtggatgtccctcagcccgacgagaagtccatcatcacctacgtctcgtcgctgtatgacgccatgccccgcgtgccggacgtgcaggatggggtgagggccaacgagctgcagctgcgctggcaggagtaccgggagctggtgctgctgctgcttcagtggatgcgacaccacacggccgcctttgaggaacgcaggttcccctccagcttcgaggagattgagatcctgtggtctcagttcctgaagtttaaggagatggagctaccagccaaggaggccgacaagaacaggtccaagggcatctaccaatccctggagggagcggtgcaagcaggccagctcaaggtgccccctggctaccacccgctggatgtggagaaggagtggggcaagctgcacgtggccatcctggagcgggagaagcagctccgcagcgagtttgagaggctggagtgtcttcagcgcatcgtgaccaagctgcagatggaggcggggctgtgtgaggagcagctgaaccaggccgacgccctgctgcagtcggatgtccggctgctggctgcaggcaaagtgccacagcgggcgggggaggtggaacgggacttggacaaggcggatagcatgatccggctgctcttcaacgacgtgcagaccctcaaggatggacggcacccgcagggcgagcagatgtaccgcagggtgtaccgtctgcacgagcgcctggtagccatccgcaccgagtacaacctacggctgaaggcaggcgtggcggcccctgcaacccaggtggcccaggtgactctgcagagtgtgcagaggcgccccgagctggaggactccactctgcgctacctgcaggacctgctggcctgggtggaggagaaccagcaccgtgtggatggcgctgagtggggtgtggacctgcccagcgtggaggcgcagctgggcagccaccgaggcctgcaccagtccatcgaagaattccgggccaagatcgagcgggcacggagtgacgagggccagctctcccccgccacccggggtgcctaccgtgactgcctgggtcggctggacctgcagtacgccaagctgctgaactcctccaaggcccgcctcaggtccctggagagcttgcacagctttgtggcagccgccactaaggagctaatgtggctgaatgagaaggaggaggaggaggtgggcttcga

SEQ ID NO: 668 - DNA, 32765 bp, Homo sapiens
  misc_feature (222)..(222): second gene starts at position 222
atggcagaagtagagcagaagaagaagcggaccttccgcaagttcacctaccgcggcgtggacctcgaccagctgctggacatgtcctacgagcagctgatgcagctgtacagtgcgcgccagcggcggcggctgaaccggggcctgcggcggaagcagcactccctgctgaagcgcctgcgcaaggccaagaaggaggcgccgcccatggagaagccggagaccttctcttcatcctcctactcctcctcgggctacggccgccgctacgcctcggggtcctcggcctccctggggggccctgagtctgccgtggcctgaggctgcctgcgcccaccccgctctgcatgcggcccagcccggctcccaccgaggcgcgggggccgttttcaacgcttaaaggtgtcttcctcccaagtggtgcctaaagtttaaccaaaaagaccagactaatatattaatatatatctgctgtccagacagcctgtatcttgggggacagggctggcccagccctgctggccgcctcaccccctcgggtctcctcactcccttctacctgccactcacacagccaggtgccttggagggtcccaagctgggccccagcccaccctcctgtcttcccagggtagcccgcctgccagtcctagctgcacagggcagctgggcccaaccctgtctgtagagggccctggtgtttctagcactggcctgcacggtgggccttgctggggacggggggccccagtcagcctctctcccagtctacccagagaagccccttccccatgggaagacgaggccctcgggcccagcccccacagtgctgtctgatctgtgctttccagctcaccccccacactcactcctgagacccctggcctccggcgtcagcctccagcctctgttcccctagtaagtgccttccatgtcggcctctaaccccaggccccgaggacccagacccagtggggaggcggacgttccagccggcatggctgggaactgcagacctgtcctcctggtgggtccaggggcccctccagcttgtggagccccacactggggtgccgcctgcccgtctctctcccatggagccccagccccctttgggcccagggacaccagccaggctctgtgctgaccctcctgttgcacccagccctggtctcagcagcgaccacccctgcctccaccctctgagctttgcatgttccactaaccccgggcgggtggcaggtggaggtgtcaggctgctggcgcctctgcaagggcagaacactaacctgaccgtgggcggggccttgcggtatccgcccccaataaaagcaattccaaccttgagcccgcgccctcacgctcagcaccccagcctgcctgcccgcccgcctgccctgccgctgcccgctgtcacaccctgtagcgcgggagcttctcgcagcgccccgggccttctcgtggtaccctgcctgctgcctttgcccccgcactgactgcccggctccagcagccatggtggccggcatgctcatgccacgggaccagctgcgggccatctatgaggtgctcttccgcgagggcgtgatggtggccaagaaggaccggcggccccgcagcttgcacccccatgtgcccggcgtcaccaacctgcaggtcatgcgtgccatggcgtccctgcgggcacggggcctggtccgcgagacctttgcctggtgccacttttactggtacctcaccaatgaaggcatcgcccacctccgccagtacctgcacctgccgccagagatcgtgcccgcctctctgcagcgcgtgcgccgccccgtcgccatggtgatgcccgcacgccgcaccccccacgtgcaggctgtgcagggtcccctgggctccccacccaagcgggggccgctgccgacggaggagcagcgggtctaccgtcggaaggagcttgaggaggtgtcacctgagacccctgtggtgcctgctaccacccagcggaccctggccaggccaggcccggagcctgccccagccacagatgagcgggatcgtgtgcagaagaaaaccttcaccaagtgggtcaacaagcacctcatcaaggcccagaggcacatcagtgacctgtatgaagacctccgcgatggccacaacctcatctccctgctggaggtcctctcgggggacagcctgccccgggagaaggggaggatgcgtttccacaagctgcagaatgtccagattgccctggactacctccggcaccgccaggtgaagctggtgaacatcaggaatgatgacatcgctgacggcaaccccaagctgacccttggcctcatctggacaatcattctgcacttccagatctcagatatccaggtgagtgggcagtcggaggacatgacggccaaggagaagctgctgctgtggtcgcagcgaatggtggaggggtaccagggcctgcgatgcgacaacttcacctccagctggagagacggccgcctcttcaatgccatcatccaccggcacaagcccctgctcatcgacatgaacaaggtgtaccggcagaccaacctggagaacctggaccaggccttctctgtggcggagcgggacctgggagtgacgcggctcctggaccctgaggacgtggatgtccctcagcccgacgagaagtccatcatcacctacgtctcgtcgctgtatgacgccatgccccgcgtgccggacgtgcaggatggggtgagggccaacgagctgcagctgcgctggcaggagtaccgggagctggtgctgctgctgcttcagtggatgcgacaccacacggccgcctttgaggaacgcaggttcccctccagcttcgaggagattgagatcctgtggtctcagttcctgaagtttaaggagatggagctaccagccaaggaggccgacaagaacaggtccaagggcatctaccaatccctggagggagcggtgcaagcaggccagctcaaggtgccccctggctaccacccgctggatgtggagaaggagtggggcaagctgcacgtggccatcctggagcgggagaagcagctccgcagcgagtttgagaggctggagtgtcttcagcgcatcgtgaccaagctgcagatggaggcggggctgtgtgaggagcagctgaaccaggccgacgccctgctgcagtcggatgtccggctgctggctgcaggcaaagtgccacagcgggcgggggaggtggaacgggacttggacaaggcggatagcatgatccggctgctcttcaacgacgtgcagaccctcaaggatggacggcacccgcagggcgagcagatgtaccgcagggtgtaccgtctgcacgagcgcctggtagccatccgcaccgagtacaacctacggctgaaggcaggcgtggcggcccctgcaacccaggtggcccaggtgactctgcagagtgtgcagaggcgccccgagctggaggactccactctgcgctacctgcaggacctgctggcctgggtggaggagaaccagcaccgtgtggatggcgctgagtggggtgtggacctgcccagcgtggaggcgcagctgggcagccaccgaggcctgcaccagtccatcgaagaattccgggccaagatcgagcgggcacggagtgacgagggccagctctcccccgccacccggggtgcctaccgtgactgcctgggtcggctggacctgcagtacgccaagctgctgaactcctccaaggcccgcctcaggtccctggagagcttgcacagctttgtggcagccgccactaaggagctaatgtggctgaatgagaaggaggaggaggaggtgggcttcgactggagcgaccgcaacaccaacatgaccgccaagaaggagagctactcggcgctgatgcgggagctggagctgaaggagaagaagatcaaggagctccaaaatgctggggaccggctgctgcgggaggaccacccggcccggcccacggtggagtccttccaggcggccctgcagacgcagtggagctggatgctacagctgtgctgctgtatcgaggcacacctgaaggagaacgctgcctactttcagttcttctcagatgtgcgggaggccgaggggcagttgcagaagctgcaggaggcactgcgtaggaaatacagttgtgatcgctccgccaccgtcacccggctggaggacctgctgcaggatgcccaggacgagaaggaacagctgaacgagtacaagggccacctctcaggcctggccaagcgggccaaggccgtcgtgcagctgaagccccgccacccagcccaccccatgcggggccgcctgcccctgctggccgtgtgcgactataagcaggtggaggtgactgtgcacaagggtgacgagtgccagctggtgggccctgcacagccgtcccactggaaggtgctcagcagctccggcagcgaggccgccgtgccctccgtgtgcttcctggtgcccccgcccaaccaggaggcccaggaggccgtcaccaggctggaggcccagcaccaggccctggtcacgctgtggcaccagttgcacgtggacatgaagagccttctggcctggcagagccttcgccgcgacgtgcagctcatccgctcctggtccctggccacgttccgcaccctgaagccagaggagcagcgccaagccctgcacagcctggagctgcactaccaggccttcctgcgggacagccaggacgcgggcggcttcggacccgaggaccggctgatggctgagcgcgagtacggctcctgcagccaccactaccagcagctgctgcagagcctggaacagggtgcacaggaagagtctcgctgccagcgctgcatctccgagctcaaagacatccggctgcagctggaggcctgtgagacgcgcaccgtgcaccgcctgcggctgccgctggacaaagagccggcacgggagtgtgcccagcgcatcgccgagcagcagaaggcacaggcagaggtggaggggctgggcaagggggtcgcccggctctctgccgaggccgagaaggtcttggccctaccagagccatcgcctgcggcccccacgctgcgctcggagctggagctgacgctgggcaagctggagcaggtccgcagcctgtctgccatctacctggagaagctcaagaccatcagcctggtgatccgcggcacgcagggggccgaggaggtgctcagggcccacgaggagcagctcaaggaggcccaggccgtgccggccaccctcccggagctcgaggccaccaaggcctctctgaagaagctgcgggcccaggccgaggcacagcagcccacgttcgacgccctgcgggatgagctgcggggggcacaggaggtgggggagcgactgcagcagcggcacggggagcgggacgtggaggtggagcgctggcgggagcgggtcgcccagttgcttgagcgctggcaggctgtgctggcccagaccgacgtgcggcagcgcgagctcgagcaactgggccgccagctgcgttactaccgcgagagtgcagaccccttgggcgcctggctgcaggacgccaggcggcggcaggagcagatccaggccatgccgctggccgacagccaggctgtgcgggagcagctgcggcaggagcaggccctgctggaggagatcgagcgccacggcgagaaggtcgaggagtgccagaggtttgcgaaacagtacatcaacgccatcaaggactatgaactccagctggtgacgtacaaggcgcagcttgagccggtggcctccccggccaagaagcccaaggtccagtcgggatcagagagtgtcatccaggagtacgtggacctgcgtacgcactacagcgagctgaccacactgacgagccagtacatcaagttcatcagcgagactctgcggcgcatggaggaggaggagaggctggctgagcagcagcgggcagaggagcgcgagcggctggccgaggtggaggccgcgctggagaagcagcggcagctggccgaggcgcacgcccaggcaaaggcacaggcggagcgggaggcgaaggagctgcagcagcgcatgcaggaggaggtggtgcggcgggaggaggcggcggtggacgcgcagcagcagaagcgcagcattcaggaggagctgcagcagctgcggcagagctcggaggcggagatccaggccaaggcccggcaggcagaggcggctgagcgcagccggctgcgcatcgaggaggagatccgcgtggtgcgcctgcagttggaggccaccgagcgccagcgtggcggggctgagggggagctgcaggcactgcgtgcacgggcggaggaggctgaggcacaaaagcgacaggcgcaggaggaggccgagcgcttgcggaggcaggtgcaggacgagagccagcgtaagcggcaggcggaggtggagctggcctcgcgcgtgaaggccgaggccgaggcggcgcgcgagaagcagcgggccctgcaggccctggaggagctgcggctgcaggcggaggaggcggagcggcgcctgcggcaggccgaggtggagcgagcgcggcaggtacaggtggccctggagacggcgcagcgcagtgcagaggcggagctgcagagcaaacgcgcctccttcgccgagaagacggcacagctggagcgctccctgcaggaggaacacgtggctgtggcacagctgcgggaggaggctgagcggcgggcacagcagcaggccgaggccgagcgggcgcgcgaggaggcagagcgggagctggagcgctggcagctcaaggccaacgaggcgctacggctgcggctgcaggcggaggaggtggcgcagcagaagagcctggcgcaggccgaggctgagaagcagaaggaggaggcggagcgcgaggcgcggcggcgcggcaaggcggaggagcaggccgtccggcagcgggagctggctgaacaagagctggagaagcagcggcagctggcggaaggcaccgcgcagcagcgcctggccgcggagcaggagttgatccggctgcgggccgagacggagcagggggagcagcagcggcagctgctggaggaggagctggcccggctgcagcgtgaggcggctgcagccacgcagaaacggcaggagctggaagccgagctggccaaggtgcgggccgagatggaggtgctgctggccagcaaggcgagggctgaggaggagtcgcgctccaccagcgagaagtccaagcagaggctggaggccgaggccggccggttccgcgagctggccgaggaggccgcccgcctgcgtgccctggcggaagaggccaagcggcagcggcagctggccgaggaagacgcggcgcggcagcgggccgaggcggagcgggtgcttgcggagaagctggccgccatcggcgaggccacgcggctcaagacggaggcggagatcgcgctcaaggagaaggaggcggagaacgagcgcctgcggcggctggcggaggacgaggccttccagcggcggcggctggaggagcaggccgcgcaacacaaggctgacatcgaggagcgcctggcccagctgcgcaaggcatcggacagcgagctggagcggcagaaggggctggtggaggacacgctgaggcagcggcggcaggtggaggaggagatcctggcgctgaaggcgagcttcgagaaggcggccgctggcaaggcggagctggagctggagctgggacgcatccgcagcaacgcggaggacacgctgcgcagcaaggagcaggccgagctggaggctgcgaggcagcggcagctggcggcggaggaggagcggcggcgccgtgaggctgaggagcgcgtgcagaagagcctggcggccgaggaggaggccgcacggcagcggaaggcggcgctggaggaagtcgagcggctgaaagccaaggtggaggaggcgcggcgcctgcgggagcgagcggagcaggagtcggcgcggcagctgcagctggcccaggaggccgcccagaagcggctgcaggcggaagagaaggcacacgccttcgcggtgcagcagaaggagcaggagctacagcagacgctgcagcaggagcagagcgtgctggaccagctgcgcggcgaggcggaggcggcccggcgggcggctgaggaggcggaggaggcccgggtgcaggcggagcgtgaggcggcgcagtcccggcggcaggtggaagaggccgagcggctgaagcagtcggcagaggagcaggcacaggcccgggctcaggcacaggcggctgcagagaagctgcgcaaggaggccgagcaagaggcggcgcggcgggcacaggcggagcaggcggccctgcggcagaagcaggcagctgacgcggagatggagaagcataagaaattcgccgagcagacgctgcggcagaaggcgcaggtggagcaggagctgacaacactgcggctgcagctggaggagaccgaccaccagaagaacctgctggacgaggagctgcagcggctgaaggcggaggccacggaggccgcacgccagcgcagccaggtggaggaggagctcttctcggtgcgcgtgcagatggaggagctgagcaagctcaaggcacgcatcgaggctgagaaccgcgcactcatcttgcgtgacaaggacaatacgcagcgcttcctgcaggaggaggctgagaagatgaagcaggtggcggaggaggccgcgcggctgagtgtggcggcccaagaggctgcgcgactgcggcagctggcagaggaggacctggcacagcagcgggccttggcagagaagatgctcaaggagaagatgcaggcggtgcaggaggccacgcgactcaaggctgaggcggaactgctgcagcagcagaaggagcttgcgcaggagcaggcgcggcggctgcaggaggacaaggagcagatggcgcagcagctggcggaggagacgcagggcttccagcggacgctggaggccgagcggcagcggcagctggagatgagcgctgaggctgagcgcctcaagctgcgtgtggccgagatgagccgagcccaggcccgcgctgaggaggacgcccagcgcttccggaagcaggcggaggagatcggtgagaagctgcaccgcacggagctcgccacccaggagaaggtgaccctggtgcagacactggagatccagcgacagcagagtgaccatgatgccgagcgcctgcgggaggccatcgctgagctggagcgtgagaaggagaagctccaacaggaggccaaactgctgcagctcaagtctgaggagatgcagacggtgcagcaggagcagctgctgcaggagacgcaggccctgcagcaaagcttcctctctgaaaaggacagcctgctacagcgggagcgcttcatcgagcaggagaaggccaagctggagcagctcttccaggacgaggtggccaaggcacagcagctgcgtgaggagcagcagcggcagcagcagcagatggagcaggaacggcagcggctggtggccagcatggaggaggcgcggcggcggcagcatgaggccgaggagggcgtgcggcgcaagcaggaggagctgcagcagctggagcagcagcggcggcagcaggaggagctgctggctgaggagaaccagaggctgcgtgagcagctgcagctcctggaggagcagcaccgggccgcgctggcgcactcagaggaggtcactgcctcgcaggtggctgccacaaagaccctgcccaatggccgggatgcacttgatggccccgcggcagaggcagagccggagcacagcttcgatggcctgcggcggaaggtgtcagctcagaggctgcaggaggccggcatcctgagtgcggaggagctgcagcggttggcgcagggccacaccacggtggacgagctcgcacggcgggaagacgtgcgccactacctgcagggccgcagcagtatcgcagggctgttgctgaaggccaccaatgagaagctgagtgtttacgccgccctgcagaggcagctgctgagtcccggcacggccctcatcctgctggaggcgcaggcggcctcaggcttcctgctggaccctgtgcggaaccggcggctgaccgtcaacgaggctgtgaaggagggtgtggtgggccccgagctgcaccacaagctgctgtcggccgagcgcgccgtcactggctacaaggacccctacactggccagcagatctctctcttccaagccatgcagaagggcctcatcgtccgggagcacggcatccgcctgctggaggcccagatcgccacgggcggcgttatcgaccccgtgcacagccaccgcgtgcccgtggacgtggcctaccggcgcggctacttcgacgaggagatgaaccgcgtcctggcggaccccagcgacgacaccaagggcttctttgaccccaacacgcacgagaacctcacgtacctgcagctactggagcgctgcgtggaggaccccgagacgggcctgtgccttctgccactcacggataaggctgccaagggcggggagctggtctacactgactccgaggcccgggacgtctttgagaaggccaccgtgtctgcgccgttcggcaagttccagggcaagacggtgaccatttgggagatcatcaactcggaatacttcacggcagagcagcggcgggacctgctgcggcagttccgcacgggccggatcacagtggagaagatcatcaagatcatcatcacggtggtggaggagcaggagcagaagggccggctttgctttgagggcctgcgcagcctggtgccagccgccgagctgctggagagcagggtcatcgaccgcgagctctaccagcagctgcagcgaggtgagcgctctgtgcgagacgtagccgaggtggacactgtgcggcgggctctccggggtgccaacgtcatcgcgggtgtatggctggaggaggcggggcagaagctgagtatctacaatgccctgaagaaagacctgctgccatccgacatggccgtggccctgttggaagcccaggccggcaccgggcacatcatcgaccccgccaccagcgcccggctgaccgtggacgaggcagtgcgtgctggcctggtgggccccgagtttcatgagaagctgctatcagccgagaaggctgtgacagggtacagggacccctacacagggcagagcgtctccctgttccaggccctgaagaagggcctcattccccgggagcagggcctgcgcctgttggacgcccagctgtccacgggcggcatcgtggaccccagcaagagccaccgcgtgcccctggatgtcgcctgcgcccgaggctgcctggatgaggagaccagcagggccctgtcggcaccaagggccgacgccaaggcctacagtgaccccagcacaggggagccggccacctacggcgagctccagcagcggtgccggcccgaccagctgaccgggctgagcctgctgccgctctcagaaaaggctgctcgggcccggcaggaggagctctactcagagctgcaggcccgtgagacctttgaaaagaccccggttgaggtccccgtgggtggcttcaagggcaggacggtgacggtgtgggagctcatcagctctgagtacttcactgcggagcagcggcaggagctgttgcgtcagttccgcacgggcaaggtcaccgtggagaaggtcatcaagattctcattaccatcgtggaggaggtggagaccctgcggcaggagaggctgtccttcagcggcctccgtgcccctgtgccagccagcgagctcctggcttccggggtcctcagcagagcccagtttgagcagctcaaggacggcaagacgacggtcaaggacctttcggagctgggctccgtgcggacgctgctgcagggcagtggctgcctcgccggcatctacctggaggacaccaaggagaaggtgtccatctacgaggccatgcgccggggcctgctgagagccacaacggctgcgctcctgctggaggcgcaggcggccactggcttcctggtggaccccgtgcggaaccagcgcctgtatgtccacgaggccgtgaaggcgggcgtggtgggccccgagcttcacgagcagctgctgtctgccgagaaggccgtcaccggctacagagacccctactcgggcagcaccatctccctcttccaggccatgcagaagggcctggttctccggcagcacggcatccgcctgctggaggcccagatcgccacgggcggcatcatcgaccccgtgcacagccaccgcgtgcctgtggacgtggcctaccagcgcggctacttcagtgaggagatgaaccgcgtcctggcggaccccagcgacgacaccaagggcttctttgaccccaacacgcatgagaacctcacgtacaggcagctgctggagcggtgcgtggaggaccccgagacgggcttgcgccttctgccactgaaaggggcggagaaggctgaggtggtggagaccacgcaggtgtacactgaggaggagacaagaagggcatttgaagagacacagatcgacattcccggcggcggcagccacggcggctccaccatgtccctgtgggaggtgatgcagtcggacctgatccccgaggagcagcgggcccagctgatggctgacttccaggccggccgggtgaccaaggaacgcatgatcatcatcatcatcgagatcattgagaagacagagatcatccgccagcagggtctggcctcctacgactacgtgcgccgccgcctcacggctgaggacctgttcgaggctcggatcatctctctcgagacctacaacctgctccgggagggcaccaggagcctccgtgaggctctcgaggcggagtccgcctggtgctacctctatggcacgggctccgtggctggtgtctacctgcccggttccaggcagacactgagcatctaccaggctctcaagaaagggctgctgagtgccgaggtggcccgcctgctgctggaggcacaggcagccacaggcttcctgctggacccggtgaagggggagcggctgactgtggatgaggctgtgcggaagggcctcgtggggcccgagctgcacgaccgcctgctctcggctgagcgggcggtcaccggctaccgtgacccctacaccgagcagaccatctcgctcttccaggccatgaagaaggagctgatccctactgaggaggccctgcggctgctggatgcccagctggccaccggcggcatcgtggacccccgcctgggcttccaccttcccctggaggtggcttaccagcgtggctacctcaacaaggacacgcacgaccagctgtcagagcccagcgaggtgcgcagctacgtggacccgtccaccgacgagcgcctcagctacacgcagctgctcaggcggtgccgtcgtgacgacggcaccggccagctgctcctgccactgtcggacgcccgcaagctgaccttccgtggcctgcggaagcagatcaccatggaggagctggtgcgctcgcaggtcatggacgaggccacggcgctgcagctgcgggagggcctgacctccatcgaggaggtcaccaagaacttgcagaagttcctggaaggcaccagctgcatcgctggtgtcttcgtggacgccaccaaggaacggctctcggtgtaccaggccatgaagaagggcatcatccgccccggcacagcctttgagctcctggaggcgcaggcggccaccggttacgtcatcgaccccatcaagggactgaagctgacggtggaggaggctgtgcgtatgggcattgtgggccccgagttcaaggacaagctgctgtcggccgagcgcgccgtcactgggtacaaggacccctactctgggaagctcatctccctcttccaggccatgaagaagggcctgatcctgaaggaccatggcatccgcctgctggaggcccagatcgccacgggcggcatcatcgaccctgaggagagccaccggctgcccgtggaggtggcctacaagcgcggcctcttcgatgaggagatgaacgagatcctgaccgacccctcggacgacaccaagggcttctttgaccctaacacggaggagaacctcacctacctgcagctgatggagcgttgtatcactgacccccagacgggcctgtgtctcttgccgctgaaggagaagaagcgggagcggaagacgtcctccaagtcctccgtgcgcaagcgccgagtggtcatcgtggaccccgagacgggcaaggagatgtcagtgtacgaggcctaccgcaagggcctgattgaccaccagacgtacctggagctgtccgagcaggagtgcgagtgggaggagatcaccatctcctcctcggacggcgtggtcaagtccatgatcatcgaccgccgctccgggcgccagtacgacatcgatgatgccatcgccaagaacctcatcgaccgctcggcactggaccagtaccgcgccggcacgctctccatcaccgagttcgccgacatgctctcgggcaacgccggtggtttccgctcccgttcctcctcggtgggatcctcctcctcctaccccatcagccccgccgtctccaggacccagctggcctcctggtcagaccccactgaggagacgggccccgtggctggcatcctggacacggagacgctggagaaggtgtccatcaccgaggccatgcaccggaacctggtggataacatcacggggcagcggctgctggaggcgcaggcctgcaccgggggcatcatcgaccccagcaccggtgagcgcttccctgtcaccgacgccgtcaacaagggcctggtggacaagatcatggtggaccgcatcaacctggcccagaaggccttctgcggcttcgaggacccacgcaccaagaccaagatgtcggccgcccaggccctgaagaagggctggctctactacgaggccggccagcgcttcctggaggtgcagtacctgaccggcggcttgatcgagcccgacacgccgggccgcgtgcccctggacgaggccctgcagcgcggcacggtggacgcccgcaccgcacagaagctgcgtgacgtgggcgcctactccaagtacctcacctgccctaagaccaagctcaagatctcctataaggacgcgctggaccgcagcatggtggaggagggcacggggctgcggctgctggaggctgccgcgcagtccaccaagggctactacagcccctacagcgtcagcggctccggctctaccgctggctcccgcaccggctcgcgcaccggctcccgggccggctcccgccgcggcagctttgacgccaccggctccggcttctccatgaccttctcttcatcctcctactcctcctcgggctacggccgccgctacgcctcggggtcctcggcctccctggggggccctgagtctgccgtggcctgaggctgcctgcgcccaccccgctctgcatgcggcccagcccggctcccaccgaggcgcgggggccgttttcaacgcttaaaggtgtcttcctcccaagtggtgcctaaagtttaaccaaaaagaccagactaatatattaatatatatctgctgtccagacagcctgtatcttgggggacagggctggcccagccctgctggccgcctcaccccctcgggtctcctcactcccttctacctgccactcacacagccaggtgccttggagggtcccaagctgggccccagcccaccctcctgtcttcccagggtagcccgcctgccagtcctagctgcacagggcagctgggcccaaccctgtctgtagagggccctggtgtttctagcactggcctgcacggtgggccttgctggggacggggggccccagtcagcctctctcccagtctacccagagaagccccttccccatgggaagacgaggccctcgggcccagcccccacagtgctgtctgatctgtgctttccagctcaccccccacactcactcctgagacccctggcctccggcgtcagcctccagcctctgttcccctagtaagtgccttccatgtcggcctctaaccccaggccccgaggacccagacccagtggggaggcggacgttccagccggcatggctgggaactgcagacctgtcctcctggtgggtccaggggcccctccagcttgtggagccccacactggggtgccgcctgcccgtctctctcccatggagccccagccccctttgggcccagggacaccagccaggctctgtgctgaccctcctgttgcacccagccctggtctcagcagcgaccacccctgcctccaccctctgagctttgcatgttccactaaccccgggcgggtggcaggtggaggtgtcaggctgctggcgcctctgcaagggcagaacactaacctgaccgtgggcggggccttgcggtatccgcccccaataaaagcaattccaaccttgagcccgcgccctcacgctcagcaccccagcctgcctgcccgcccgcctgccctgccgctgcccgctgtcacaccctgtagcgcgggagcttctcgcagcgccccgggccttctcgtggtaccctgcctgctgcctttgcccccgcactgactgcccggctccagcagccatggtggccggcatgctcatgccacgggaccagctgcgggccatctatgaggtgctcttccgcgagggcgtgatggtggccaagaaggaccggcggccccgcagcttgcacccccatgtgcccggcgtcaccaacctgcaggtcatgcgtgccatggcgtccctgcgggcacggggcctggtccgcgagacctttgcctggtgccacttttactggtacctcaccaatgaaggcatcgcccacctccgccagtacctgcacctgccgccagagatcgtgcccgcctctctgcagcgcgtgcgccgccccgtcgccatggtgatgcccgcacgccgcaccccccacgtgcaggctgtgcagggtcccctgggctccccacccaagcgggggccgctgccgacggaggagcagcgggtctaccgtcggaaggagcttgaggaggtgtcacctgagacccctgtggtgcctgctaccacccagcggaccctggccaggccaggcccggagcctgccccagccacagatgagcgggatcgtgtgcagaagaaaaccttcaccaagtgggtcaacaagcacctcatcaaggcccagaggcacatcagtgacctgtatgaagacctccgcgatggccacaacctcatctccctgctggaggtcctctcgggggacagcctgccccgggagaaggggaggatgcgtttccacaagctgcagaatgtccagattgccctggactacctccggcaccgccaggtgaagctggtgaacatcaggaatgatgacatcgctgacggcaaccccaagctgacccttggcctcatctggacaatcattctgcacttccagatctcagatatccaggtgagtgggcagtcggaggacatgacggccaaggagaagctgctgctgtggtcgcagcgaatggtggaggggtaccagggcctgcgatgcgacaacttcacctccagctggagagacggccgcctcttcaatgccatcatccaccggcacaagcccctgctcatcgacatgaacaaggtgtaccggcagaccaacctggagaacctggaccaggccttctctgtggcggagcgggacctgggagtgacgcggctcctggaccctgaggacgtggatgtccctcagcccgacgagaagtccatcatcacctacgtctcgtcgctgtatgacgccatgccccgcgtgccggacgtgcaggatggggtgagggccaacgagctgcagctgcgctggcaggagtaccgggagctggtgctgctgctgcttcagtggatgcgacaccacacggccgcctttgaggaacgcaggttcccctccagcttcgaggagattgagatcctgtggtctcagttcctgaagtttaaggagatggagctaccagccaaggaggccgacaagaacaggtccaagggcatctaccaatccctggagggagcggtgcaagcaggccagctcaaggtgccccctggctaccacccgctggatgtggagaaggagtggggcaagctgcacgtggccatcctggagcgggagaagcagctccgcagcgagtttgagaggctggagtgtcttcagcgcatcgtgaccaagctgcagatggaggcggggctgtgtgaggagcagctgaaccaggccgacgccctgctgcagtcggatgtccggctgctggctgcaggcaaagtgccacagcgggcgggggaggtggaacgggacttggacaaggcggatagcatgatccggctgctcttcaacgacgtgcagaccctcaaggatggacggcacccgcagggcgagcagatgtaccgcagggtgtaccgtctgcacgagcgcctggtagccatccgcaccgagtacaacctacggctgaaggcaggcgtggcggcccctgcaacccaggtggcccaggtgactctgcagagtgtgcagaggcgccccgagctggaggactccactctgcgctacctgcaggacctgctggcctgggtggaggagaaccagcaccgtgtggatggcgctgagtggggtgtggacctgcccagcgtggaggcgcagctgggcagccaccgaggcctgcaccagtccatcgaagaattccgggccaagatcgagcgggcacggagtgacgagggccagctctcccccgccacccggggtgcctaccgtgactgcctgggtcggctggacctgcagtacgccaagctgctgaactcctccaaggcccgcctcaggtccctggagagcttgcacagctttgtggcagccgccactaaggagctaatgtggctgaatgagaaggaggaggaggaggtgggcttcgactggagcgaccgcaacaccaacatgaccgccaagaaggagagctactcggcgctgatgcgggagctggagctgaaggagaagaagatcaaggagctccaaaatgctggggaccggctgctgcgggaggaccacccggcccggcccacggtggagtccttccaggcggccctgcagacgcagtggagctggatgctacagctgtgctgctgtatcgaggcacacctgaaggagaacgctgcctactttcagttcttctcagatgtgcgggaggccgaggggcagttgcagaagctgcaggaggcactgcgtaggaaatacagttgtgatcgctccgccaccgtcacccggctggaggacctgctgcaggatgcccaggacgagaaggaacagctgaacgagtacaagggccacctctcaggcctggccaagcgggccaaggccgtcgtgcagctgaagccccgccacccagcccaccccatgcggggccgcctgcccctgctggccgtgtgcgactataagcaggtggaggtgactgtgcacaagggtgacgagtgccagctggtgggccctgcacagccgtcccactggaaggtgctcagcagctccggcagcgaggccgccgtgccctccgtgtgcttcctggtgcccccgcccaaccaggaggcccaggaggccgtcaccaggctggaggcccagcaccaggccctggtcacgctgtggcaccagttgcacgtggacatgaagagccttctggcctggcagagccttcgccgcgacgtgcagctcatccgctcctggtccctggccacgttccgcaccctgaagccagaggagcagcgccaagccctgcacagcctggagctgcactaccaggccttcctgcgggacagccaggacgcgggcggcttcggacccgaggaccggctgatggctgagcgcgagtacggctcctgcagccaccactaccagcagctgctgcagagcctggaacagggtgcacaggaagagtctcgctgccagcgctgcatctccgagctcaaagacatccggctgcagctggaggcctgtgagacgcgcaccgtgcaccgcctgcggctgccgctggacaaagagccggcacgggagtgtgcccagcgcatcgccgagcagcagaaggcacaggcagaggtggaggggctgggcaagggggtcgcccggctctctgccgaggccgagaaggtcttggccctaccagagccatcgcctgcggcccccacgctgcgctcggagctggagctgacgctgggcaagctggagcaggtccgcagcctgtctgccatctacctggagaagctcaagaccatcagcctggtgatccgcggcacgcagggggccgaggaggtgctcagggcccacgaggagcagctcaaggaggcccaggccgtgccggccaccctcccggagctcgaggccaccaaggcctctctgaagaagctgcgggcccaggccgaggcacagcagcccacgttcgacgccctgcgggatgagctgcggggggcacaggaggtgggggagcgactgcagcagcggcacggggagcgggacgtggaggtggagcgctggcgggagcgggtcgcccagttgcttgagcgctggcaggctgtgctggcccagaccgacgtgcggcagcgcgagctcgagcaactgggccgccagctgcgttactaccgcgagagtgcagaccccttgggcgcctggctgcaggacgccaggcggcggcaggagcagatccaggccatgccgctggccgacagccaggctgtgcgggagcagctgcggcaggagcaggccctgctggaggagatcgagcgccacggcgagaaggtcgaggagtgccagaggtttgcgaaacagtacatcaacgccatcaaggactatgaactccagctggtgacgtacaaggcgcagcttgagccggtggcctccccggccaagaagcccaaggtccagtcgggatcagagagtgtcatccaggagtacgtggacctgcgtacgcactacagcgagctgaccacactgacgagccagtacatcaagttcatcagcgagactctgcggcgcatggaggaggaggagaggctggctgagcagcagcgggcagaggagcgcgagcggctggccgaggtggaggccgcgctggagaagcagcggcagctggccgaggcgcacgcccaggcaaaggcacaggcggagcgggaggcgaaggagctgcagcagcgcatgcaggaggaggtggtgcggcgggaggaggcggcggtggacgcgcagcagcagaagcgcagcattcaggaggagctgcagcagctgcggcagagctcggaggcggagatccaggccaaggcccggcaggcagaggcggctgagcgcagccggctgcgcatcgaggaggagatccgcgtggtgcgcctgcagttggaggccaccgagcgccagcgtggcggggctgagggggagctgcaggcactgcgtgcacgggcggaggaggctgaggcacaaaagcgacaggcgcaggaggaggccgagcgcttgcggaggcaggtgcaggacgagagccagcgtaagcggcaggcggaggtggagctggcctcgcgcgtgaaggccgaggccgaggcggcgcgcgagaagcagcgggccctgcaggccctggaggagctgcggctgcaggcggaggaggcggagcggcgcctgcggcaggccgaggtggagcgagcgcggcaggtacaggtggccctggagacggcgcagcgcagtgcagaggcggagctgcagagcaaacgcgcctccttcgccgagaagacggcacagctggagcgctccctgcaggaggaacacgtggctgtggcacagctgcgggaggaggctgagcggcgggcacagcagcaggccgaggccgagcgggcgcgcgaggaggcagagcgggagctggagcgctggcagctcaaggccaacgaggcgctacggctgcggctgcaggcggaggaggtggcgcagcagaagagcctggcgcaggccgaggctgagaagcagaaggaggaggcggagcgcgaggcgcggcggcgcggcaaggcggaggagcaggccgtccggcagcgggagctggctgaacaagagctggagaagcagcggcagctggcggaaggcaccgcgcagcagcgcctggccgcggagcaggagttgatccggctgcgggccgagacggagcagggggagcagcagcggcagctgctggaggaggagctggcccggctgcagcgtgaggcggctgcagccacgcagaaacggcaggagctggaagccgagctggccaaggtgcgggccgagatggaggtgctgctggccagcaaggcgagggctgaggaggagtcgcgctccaccagcgagaagtccaagcagaggctggaggccgaggccggccggttccgcgagctggccgaggaggccgcccgcctgcgtgccctggcggaagaggccaagcggcagcggcagctggccgaggaagacgcggcgcggcagcgggccgaggcggagcgggtgcttgcggagaagctggccgccatcggcgaggccacgcggctcaagacggaggcggagatcgcgctcaaggagaaggaggcggagaacgagcgcctgcggcggctggcggaggacgaggccttccagcggcggcggctggaggagcaggccgcgcaacacaaggctgacatcgaggagcgcctggcccagctgcgcaaggcatcggacagcgagctggagcggcagaaggggctggtggaggacacgctgaggcagcggcggcaggtggaggaggagatcctggcgctgaaggcgagcttcgagaaggcggccgctggcaaggcggagctggagctggagctgggacgcatccgcagcaacgcggaggacacgctgcgcagcaaggagcaggccgagctggaggctgcgaggcagcggcagctggcggcggaggaggagcggcggcgccgtgaggctgaggagcgcgtgcagaagagcctggcggccgaggaggaggccgcacggcagcggaaggcggcgctggaggaagtcgagcggctgaaagccaaggtggaggaggcgcggcgcctgcgggagcgagcggagcaggagtcggcgcggcagctgcagctggcccaggaggccgcccagaagcggctgcaggcggaagagaaggcacacgccttcgcggtgcagcagaaggagcaggagctacagcagacgctgcagcaggagcagagcgtgctggaccagctgcgcggcgaggcggaggcggcccggcgggcggctgaggaggcggaggaggcccgggtgcaggcggagcgtgaggcggcgcagtcccggcggcaggtggaagaggccgagcggctgaagcagtcggcagaggagcaggcacaggcccgggctcaggcacaggcggctgcagagaagctgcgcaaggaggccgagcaagaggcggcgcggcgggcacaggcggagcaggcggccctgcggcagaagcaggcagctgacgcggagatggagaagcataagaaattcgccgagcagacgctgcggcagaaggcgcaggtggagcaggagctgacaacactgcggctgcagctggaggagaccgaccaccagaagaacctgctggacgaggagctgcagcggctgaaggcggaggccacggaggccgcacgccagcgcagccaggtggaggaggagctcttctcggtgcgcgtgcagatggaggagctgagcaagctcaaggcacgcatcgaggctgagaaccgcgcactcatcttgcgtgacaaggacaatacgcagcgcttcctgcaggaggaggctgagaagatgaagcaggtggcggaggaggccgcgcggctgagtgtggcggcccaagaggctgcgcgactgcggcagctggcagaggaggacctggcacagcagcgggccttggcagagaagatgctcaaggagaagatgcaggcggtgcaggaggccacgcgactcaaggctgaggcggaactgctgcagcagcagaaggagcttgcgcaggagcaggcgcggcggctgcaggaggacaaggagcagatggcgcagcagctggcggaggagacgcagggcttccagcggacgctggaggccgagcggcagcggcagctggagatgagcgctgaggctgagcgcctcaagctgcgtgtggccgagatgagccgagcccaggcccgcgctgaggaggacgcccagcgcttccggaagcaggcggaggagatcggtgagaagctgcaccgcacggagctcgccacccaggagaaggtgaccctggtgcagacactggagatccagcgacagcagagtgaccatgatgccgagcgcctgcgggaggccatcgctgagctggagcgtgagaaggagaagctccaacaggaggccaaactgctgcagctcaagtctgaggagatgcagacggtgcagcaggagcagctgctgcaggagacgcaggccctgcagcaaagcttcctctctgaaaaggacagcctgctacagcgggagcgcttcatcgagcaggagaaggccaagctggagcagctcttccaggacgaggtggccaaggcacagcagctgcgtgaggagcagcagcggcagcagcagcagatggagcaggaacggcagcggctggtggccagcatggaggaggcgcggcggcggcagcatgaggccgaggagggcgtgcggcgcaagcaggaggagctgcagcagctggagcagcagcggcggcagcaggaggagctgctggctgaggagaaccagaggctgcgtgagcagctgcagctcctggaggagcagcaccgggccgcgctggcgcactcagaggaggtcactgcctcgcaggtggctgccacaaagaccctgcccaatggccgggatgcacttgatggccccgcggcagaggcagagccggagcacagcttcgatggcctgcggcggaaggtgtcagctcagaggctgcaggaggccggcatcctgagtgcggaggagctgcagcggttggcgcagggccacaccacggtggacgagctcgcacggcgggaagacgtgcgccactacctgcagggccgcagcagtatcgcagggctgttgctgaaggccaccaatgagaagctgagtgtttacgccgccctgcagaggcagctgctgagtcccggcacggccctcatcctgctggaggcgcaggcggcctcaggcttcctgctggaccctgtgcggaaccggcggctgaccgtcaacgaggctgtgaaggagggtgtggtgggccccgagctgcaccacaagctgctgtcggccgagcgcgccgtcactggctacaaggacccctacactggccagcagatctctctcttccaagccatgcagaagggcctcatcgtccgggagcacggcatccgcctgctggaggcccagatcgccacgggcggcgttatcgaccccgtgcacagccaccgcgtgcccgtggacgtggcctaccggcgcggctacttcgacgaggagatgaaccgcgtcctggcggaccccagcgacgacaccaagggcttctttgaccccaacacgcacgagaacctcacgtacctgcagctactggagcgctgcgtggaggaccccgagacgggcctgtgccttctgccactcacggataaggctgccaagggcggggagctggtctacactgactccgaggcccgggacgtctttgagaaggccaccgtgtctgcgccgttcggcaagttccagggcaagacggtgaccatttgggagatcatcaactcggaatacttcacggcagagcagcggcgggacctgctgcggcagttccgcacgggccggatcacagtggagaagatcatcaagatcatcatcacggtggtggaggagcaggagcagaagggccggctttgctttgagggcctgcgcagcctggtgccagccgccgagctgctggagagcagggtcatcgaccgcgagctctaccagcagctgcagcgaggtgagcgctctgtgcgagacgtagccgaggtggacactgtgcggcgggctctccggggtgccaacgtcatcgcgggtgtatggctggaggaggcggggcagaagctgagtatctacaatgccctgaagaaagacctgctgccatccgacatggccgtggccctgttggaagcccaggccggcaccgggcacatcatcgaccccgccaccagcgcccggctgaccgtggacgaggcagtgcgtgctggcctggtgggccccgagtttcatgagaagctgctatcagccgagaaggctgtgacagggtacagggacccctacacagggcagagcgtctccctgttccaggccctgaagaagggcctcattccccgggagcagggcctgcgcctgttggacgcccagctgtccacgggcggcatcgtggaccccagcaagagccaccgcgtgcccctggatgtcgcctgcgcccgaggctgcctggatgaggagaccagcagggccctgtcggcaccaagggccgacgccaaggcctacagtgaccccagcacaggggagccggccacctacggcgagctccagcagcggtgccggcccgaccagctgaccgggctgagcctgctgccgctctcagaaaaggctgctcgggcccggcaggaggagctctactcagagctgcaggcccgtgagacctttgaaaagaccccggttgaggtccccgtgggtggcttcaagggcaggacggtgacggtgtgggagctcatcagctctgagtacttcactgcggagcagcggcaggagctgttgcgtcagttccgcacgggcaaggtcaccgtggagaaggtcatcaagattctcattaccatcgtggaggaggtggagaccctgcggcaggagaggctgtccttcagcggcctccgtgcccctgtgccagccagcgagctcctggcttccggggtcctcagcagagcccagtttgagcagctcaaggacggcaagacgacggtcaaggacctttcggagctgggctccgtgcggacgctgctgcagggcagtggctgcctcgccggcatctacctggaggacaccaaggagaaggtgtccatctacgaggccatgcgccggggcctgctgagagccacaacggctgcgctcctgctggaggcgcaggcggccactggcttcctggtggaccccgtgcggaaccagcgcctgtatgtccacgaggccgtgaaggcgggcgtggtgggccccgagcttcacgagcagctgctgtctgccgagaaggccgtcaccggctacagagacccctactcgggcagcaccatctccctcttccaggccatgcagaagggcctggttctccggcagcacggcatccgcctgctggaggcccagatcgccacgggcggcatcatcgaccccgtgcacagccaccgcgtgcctgtggacgtggcctaccagcgcggctacttcagtgaggagatgaaccgcgtcctggcggaccccagcgacgacaccaagggcttctttgaccccaacacgcatgagaacctcacgtacaggcagctgctggagcggtgcgtggaggaccccgagacgggcttgcgccttctgccactgaaaggggcggagaaggctgaggtggtggagaccacgcaggtgtacactgaggaggagacaagaagggcatttgaagagacacagatcgacattcccggcggcggcagccacggcggctccaccatgtccctgtgggaggtgatgcagtcggacctgatccccgaggagcagcgggcccagctgatggctgacttccaggccggccgggtgaccaaggaacgcatgatcatcatcatcatcgagatcattgagaagacagagatcatccgccagcagggtctggcctcctacgactacgtgcgccgccgcctcacggctgaggacctgttcgaggctcggatcatctctctcgagacctacaacctgctccgggagggcaccaggagcctccgtgaggctctcgaggcggagtccgcctggtgctacctctatggcacgggctccgtggctggtgtctacctgcccggttccaggcagacactgagcatctaccaggctctcaagaaagggctgctgagtgccgaggtggcccgcctgctgctggaggcacaggcagccacaggcttcctgctggacccggtgaagggggagcggctgactgtggatgaggctgtgcggaagggcctcgtggggcccgagctgcacgaccgcctgctctcggctgagcgggcggtcaccggctaccgtgacccctacaccgagcagaccatctcgctcttccaggccatgaagaaggagctgatccctactgaggaggccctgcggctgctggatgcccagctggccaccggcggcatcgtggacccccgcctgggcttccaccttcccctggaggtggcttaccagcgtggctacctcaacaaggacacgcacgaccagctgtcagagcccagcgaggtgcgcagctacgtggacccgtccaccgacgagcgcctcagctacacgcagctgctcaggcggtgccgtcgtgacgacggcaccggccagctgctcctgccactgtcggacgcccgcaagctgaccttccgtggcctgcggaagcagatcaccatggaggagctggtgcgctcgcaggtcatggacgaggccacggcgctgcagctgcgggagggcctgacctccatcgaggaggtcaccaagaacttgcagaagttcctggaaggcaccagctgcatcgctggtgtcttcgtggacgccaccaaggaacggctctcggtgtaccaggccatgaagaagggcatcatccgccccggcacagcctttgagctcctggaggcgcaggcggccaccggttacgtcatcgaccccatcaagggactgaagctgacggtggaggaggctgtgcgtatgggcattgtgggccccgagttcaaggacaagctgctgtcggccgagcgcgccgtcactgggtacaaggacccctactctgggaagctcatctccctcttccaggccatgaagaagggcctgatcctgaaggaccatggcatccgcctgctggaggcccagatcgccacgggcggcatcatcgaccctgaggagagccaccggctgcccgtggaggtggcctacaagcgcggcctcttcgatgaggagatgaacgagatcctgaccgacccctcggacgacaccaagggcttctttgaccctaacacggaggagaacctcacctacctgcagctgatggagcgttgtatcactgacccccagacgggcctgtgtctcttgccgctgaaggagaagaagcgggagcggaagacgtcctccaagtcctccgtgcgcaagcgccgagtggtcatcgtggaccccgagacgggcaaggagatgtcagtgtacgaggcctaccgcaagggcctgattgaccaccagacgtacctggagctgtccgagcaggagtgcgagtgggaggagatcaccatctcctcctcggacggcgtggtcaagtccatgatcatcgaccgccgctccgggcgccagtacgacatcgatgatgccatcgccaagaacctcatcgaccgctcggcactggaccagtaccgcgccggcacgctctccatcaccgagttcgccgacatgctctcgggcaacgccggtggtttccgctcccgttcctcctcggtgggatcctcctcctcctaccccatcagccccgccgtctccaggacccagctggcctcctggtcagaccccactgaggagacgggccccgtggctggcatcctggacacggagacgctggagaaggtgtccatcaccgaggccatgcaccggaacctggtggataacatcacggggcagcggctgctggaggcgcaggcctgcaccgggggcatcatcgaccccagcaccggtgagcgcttccctgtcaccgacgccgtcaacaagggcctggtggacaagatcatggtggaccgcatcaacctggcccagaaggccttctgcggcttcgaggacccacgcaccaagaccaagatgtcggccgcccaggccctgaagaagggctggctctactacgaggccggccagcgcttcctggaggtgcagtacctgaccggcggcttgatcgagcccgacacgccgggccgcgtgcccctggacgaggccctgcagcgcggcacggtggacgcccgcaccgcacagaagctgcgtgacgtgggcgcctactccaagtacctcacctgccctaagaccaagctcaagatctcctataaggacgcgctggaccgcagcatggtggaggagggcacggggctgcggctgctggaggctgccgcgcagtccaccaagggctactacagcccctacagcgtcagcggctccggctctaccgctggctcccgcaccggctcgcgcaccggctcccgggccggctcccgccgcggcagctttgacgccaccggctccggcttctccatgaccttctcttcatcctcctactcctcctcgggctacggccgccgctacgcctcggggtcctcggcctccctggggggccctgagtctgccgtggcctgaggctgcctgcgcccaccccgctctgcatgcggcccagcccggctcccaccgaggcgcgggggccgttttcaacgcttaaaggtgtcttcctcccaagtggtgcctaaagtttaaccaaaaagaccagactaatatattaatatatatctgctgtccagacagcctgtatcttgggggacagggctggcccagccctgctggccgcctcaccccctcgggtctcctcactcccttctacctgccactcacacagccaggtgccttggagggtcccaagctgggccccagcccaccctcctgtcttcccagggtagcccgcctgccagtcctagctgcacagggcagctgggcccaaccctgtctgtagagggccctggtgtttctagcactggcctgcacggtgggccttgctggggacggggggccccagtcagcctctctcccagtctacccagagaagccccttccccatgggaagacgaggccctcgggcccagcccccacagtgctgtctgatctgtgctttccagctcaccccccacactcactcctgagacccctggcctccggcgtcagcctccagcctctgttcccctagtaagtgccttccatgtcggcctctaaccccaggccccgaggacccagacccagtggggaggcggacgttccagccggcatggctgggaactgcagacctgtcctcctggtgggtccaggggcccctccagcttgtggagccccacactggggtgccgcctgcccgtctctctcccatggagccccagccccctttgggcccagggacaccagccaggctctgtgctgaccctcctgttgcacccagccctggtctcagcagcgaccacccctgcctccaccctctgagctttgcatgttccactaaccccgggcgggtggcaggtggaggtgtcaggctgctggcgcctctgcaagggcagaacactaacctgaccgtgggcggggccttgcggtatccgcccccaataaaagcaattccaaccttgagcccgcgccctcacgctcagcaccccagcctgcctgcccgcccgcctgccctgccgctgcccgctgtcacaccctgtagcgcgggagcttctcgcagcgccccgggccttctcgtggtaccctgcctgctgcctttgcccccgcactgactgcccggctccagcagccatggtggccggcatgctcatgccacgggaccagctgcgggccatctatgaggtgctcttccgcgagggcgtgatggtggccaagaaggaccggcggccccgcagcttgcacccccatgtgcccggcgtcaccaacctgcaggtcatgcgtgccatggcgtccctgcgggcacggggcctggtccgcgagacctttgcctggtgccacttttactggtacctcaccaatgaaggcatcgcccacctccgccagtacctgcacctgccgccagagatcgtgcccgcctctctgcagcgcgtgcgccgccccgtcgccatggtgatgcccgcacgccgcaccccccacgtgcaggctgtgcagggtcccctgggctccccacccaagcgggggccgctgccgacggaggagcagcgggtctaccgtcggaaggagcttgaggaggtgtcacctgagacccctgtggtgcctgctaccacccagcggaccctggccaggccaggcccggagcctgccccagccacagatgagcgggatcgtgtgcagaagaaaaccttcaccaagtgggtcaacaagcacctcatcaaggcccagaggcacatcagtgacctgtatgaagacctccgcgatggccacaacctcatctccctgctggaggtcctctcgggggacagcctgccccgggagaaggggaggatgcgtttccacaagctgcagaatgtccagattgccctggactacctccggcaccgcca

SEQ ID NO: 669 - DNA, 32765 bp, Homo sapiens
  misc_feature (222)..(222): second gene starts at position 222
atggcagaagtagagcagaagaagaagcggaccttccgcaagttcacctaccgcggcgtggacctcgaccagctgctggacatgtcctacgagcagctgatgcagctgtacagtgcgcgccagcggcggcggctgaaccggggcctgcggcggaagcagcactccctgctgaagcgcctgcgcaaggccaagaaggaggcgccgcccatggagaagccggagaccttctcttcatcctcctactcctcctcgggctacggccgccgctacgcctcggggtcctcggcctccctggggggccctgagtctgccgtggcctgaggctgcctgcgcccaccccgctctgcatgcggcccagcccggctcccaccgaggcgcgggggccgttttcaacgcttaaaggtgtcttcctcccaagtggtgcctaaagtttaaccaaaaagaccagactaatatattaatatatatctgctgtccagacagcctgtatcttgggggacagggctggcccagccctgctggccgcctcaccccctcgggtctcctcactcccttctacctgccactcacacagccaggtgccttggagggtcccaagctgggccccagcccaccctcctgtcttcccagggtagcccgcctgccagtcctagctgcacagggcagctgggcccaaccctgtctgtagagggccctggtgtttctagcactggcctgcacggtgggccttgctggggacggggggccccagtcagcctctctcccagtctacccagagaagccccttccccatgggaagacgaggccctcgggcccagcccccacagtgctgtctgatctgtgctttccagctcaccccccacactcactcctgagacccctggcctccggcgtcagcctccagcctctgttcccctagtaagtgccttccatgtcggcctctaaccccaggccccgaggacccagacccagtggggaggcggacgttccagccggcatggctgggaactgcagacctgtcctcctggtgggtccaggggcccctccagcttgtggagccccacactggggtgccgcctgcccgtctctctcccatggagccccagccccctttgggcccagggacaccagccaggctctgtgctgaccctcctgttgcacccagccctggtctcagcagcgaccacccctgcctccaccctctgagctttgcatgttccactaaccccgggcgggtggcaggtggaggtgtcaggctgctggcgcctctgcaagggcagaacactaacctgaccgtgggcggggccttgcggtatccgcccccaataaaagcaattccaaccttagagtggccgccgggtgctggaggctccgctgcaccccgcgccccgcgcccgccggcatggccggcccgctgcccgacgagcaggacttcatccaggcctacgaggaggtgcgcgagaagtacaaagatgagcgggatcgtgtgcagaagaaaaccttcaccaagtgggtcaacaagcacctcatcaaggcccagaggcacatcagtgacctgtatgaagacctccgcgatggccacaacctcatctccctgctggaggtcctctcgggggacagcctgccccgggagaaggggaggatgcgtttccacaagctgcagaatgtccagattgccctggactacctccggcaccgccaggtgaagctggtgaacatcaggaatgatgacatcgctgacggcaaccccaagctgacccttggcctcatctggacaatcattctgcacttccagatctcagatatccaggtgagtgggcagtcggaggacatgacggccaaggagaagctgctgctgtggtcgcagcgaatggtggaggggtaccagggcctgcgatgcgacaacttcacctccagctggagagacggccgcctcttcaatgccatcatccaccggcacaagcccctgctcatcgacatgaacaaggtgtaccggcagaccaacctggagaacctggaccaggccttctctgtggcggagcgggacctgggagtgacgcggctcctggaccctgaggacgtggatgtccctcagcccgacgagaagtccatcatcacctacgtctcgtcgctgtatgacgccatgccccgcgtgccggacgtgcaggatggggtgagggccaacgagctgcagctgcgctggcaggagtaccgggagctggtgctgctgctgcttcagtggatgcgacaccacacggccgcctttgaggaacgcaggttcccctccagcttcgaggagattgagatcctgtggtctcagttcctgaagtttaaggagatggagctaccagccaaggaggccgacaagaacaggtccaagggcatctaccaatccctggagggagcggtgcaagcaggccagctcaaggtgccccctggctaccacccgctggatgtggagaaggagtggggcaagctgcacgtggccatcctggagcgggagaagcagctccgcagcgagtttgagaggctggagtgtcttcagcgcatcgtgaccaagctgcagatggaggcggggctgtgtgaggagcagctgaaccaggccgacgccctgctgcagtcggatgtccggctgctggctgcaggcaaagtgccacagcgggcgggggaggtggaacgggacttggacaaggcggatagcatgatccggctgctcttcaacgacgtgcagaccctcaaggatggacggcacccgcagggcgagcagatgtaccgcagggtgtaccgtctgcacgagcgcctggtagccatccgcaccgagtacaacctacggctgaaggcaggcgtggcggcccctgcaacccaggtggcccaggtgactctgcagagtgtgcagaggcgccccgagctggaggactccactctgcgctacctgcaggacctgctggcctgggtggaggagaaccagcaccgtgtggatggcgctgagtggggtgtggacctgcccagcgtggaggcgcagctgggcagccaccgaggcctgcaccagtccatcgaagaattccgggccaagatcgagcgggcacggagtgacgagggccagctctcccccgccacccggggtgcctaccgtgactgcctgggtcggctggacctgcagtacgccaagctgctgaactcctccaaggcccgcctcaggtccctggagagcttgcacagctttgtggcagccgccactaaggagctaatgtggctgaatgagaaggaggaggaggaggtgggcttcgactggagcgaccgcaacaccaacatgaccgccaagaaggagagctactcggcgctgatgcgggagctggagctgaaggagaagaagatcaaggagctccaaaatgctggggaccggctgctgcgggaggaccacccggcccggcccacggtggagtccttccaggcggccctgcagacgcagtggagctggatgctacagctgtgctgctgtatcgaggcacacctgaaggagaacgctgcctactttcagttcttctcagatgtgcgggaggccgaggggcagttgcagaagctgcaggaggcactgcgtaggaaatacagttgtgatcgctccgccaccgtcacccggctggaggacctgctgcaggatgcccaggacgagaaggaacagctgaacgagtacaagggccacctctcaggcctggccaagcgggccaaggccgtcgtgcagctgaagccccgccacccagcccaccccatgcggggccgcctgcccctgctggccgtgtgcgactataagcaggtggaggtgactgtgcacaagggtgacgagtgccagctggtgggccctgcacagccgtcccactggaaggtgctcagcagctccggcagcgaggccgccgtgccctccgtgtgcttcctggtgcccccgcccaaccaggaggcccaggaggccgtcaccaggctggaggcccagcaccaggccctggtcacgctgtggcaccagttgcacgtggacatgaagagccttctggcctggcagagccttcgccgcgacgtgcagctcatccgctcctggtccctggccacgttccgcaccctgaagccagaggagcagcgccaagccctgcacagcctggagctgcactaccaggccttcctgcgggacagccaggacgcgggcggcttcggacccgaggaccggctgatggctgagcgcgagtacggctcctgcagccaccactaccagcagctgctgcagagcctggaacagggtgcacaggaagagtctcgctgccagcgctgcatctccgagctcaaagacatccggctgcagctggaggcctgtgagacgcgcaccgtgcaccgcctgcggctgccgctggacaaagagccggcacgggagtgtgcccagcgcatcgccgagcagcagaaggcacaggcagaggtggaggggctgggcaagggggtcgcccggctctctgccgaggccgagaaggtcttggccctaccagagccatcgcctgcggcccccacgctgcgctcggagctggagctgacgctgggcaagctggagcaggtccgcagcctgtctgccatctacctggagaagctcaagaccatcagcctggtgatccgcggcacgcagggggccgaggaggtgctcagggcccacgaggagcagctcaaggaggcccaggccgtgccggccaccctcccggagctcgaggccaccaaggcctctctgaagaagctgcgggcccaggccgaggcacagcagcccacgttcgacgccctgcgggatgagctgcggggggcacaggaggtgggggagcgactgcagcagcggcacggggagcgggacgtggaggtggagcgctggcgggagcgggtcgcccagttgcttgagcgctggcaggctgtgctggcccagaccgacgtgcggcagcgcgagctcgagcaactgggccgccagctgcgttactaccgcgagagtgcagaccccttgggcgcctggctgcaggacgccaggcggcggcaggagcagatccaggccatgccgctggccgacagccaggctgtgcgggagcagctgcggcaggagcaggccctgctggaggagatcgagcgccacggcgagaaggtcgaggagtgccagaggtttgcgaaacagtacatcaacgccatcaaggactatgaactccagctggtgacgtacaaggcgcagcttgagccggtggcctccccggccaagaagcccaaggtccagtcgggatcagagagtgtcatccaggagtacgtggacctgcgtacgcactacagcgagctgaccacactgacgagccagtacatcaagttcatcagcgagactctgcggcgcatggaggaggaggagaggctggctgagcagcagcgggcagaggagcgcgagcggctggccgaggtggaggccgcgctggagaagcagcggcagctggccgaggcgcacgcccaggcaaaggcacaggcggagcgggaggcgaaggagctgcagcagcgcatgcaggaggaggtggtgcggcgggaggaggcggcggtggacgcgcagcagcagaagcgcagcattcaggaggagctgcagcagctgcggcagagctcggaggcggagatccaggccaaggcccggcaggcagaggcggctgagcgcagccggctgcgcatcgaggaggagatccgcgtggtgcgcctgcagttggaggccaccgagcgccagcgtggcggggctgagggggagctgcaggcactgcgtgcacgggcggaggaggctgaggcacaaaagcgacaggcgcaggaggaggccgagcgcttgcggaggcaggtgcaggacgagagccagcgtaagcggcaggcggaggtggagctggcctcgcgcgtgaaggccgaggccgaggcggcgcgcgagaagcagcgggccctgcaggccctggaggagctgcggctgcaggcggaggaggcggagcggcgcctgcggcaggccgaggtggagcgagcgcggcaggtacaggtggccctggagacggcgcagcgcagtgcagaggcggagctgcagagcaaacgcgcctccttcgccgagaagacggcacagctggagcgctccctgcaggaggaacacgtggctgtggcacagctgcgggaggaggctgagcggcgggcacagcagcaggccgaggccgagcgggcgcgcgaggaggcagagcgggagctggagcgctggcagctcaaggccaacgaggcgctacggctgcggctgcaggcggaggaggtggcgcagcagaagagcctggcgcaggccgaggctgagaagcagaaggaggaggcggagcgcgaggcgcggcggcgcggcaaggcggaggagcaggccgtccggcagcgggagctggctgaacaagagctggagaagcagcggcagctggcggaaggcaccgcgcagcagcgcctggccgcggagcaggagttgatccggctgcgggccgagacggagcagggggagcagcagcggcagctgctggaggaggagctggcccggctgcagcgtgaggcggctgcagccacgcagaaacggcaggagctggaagccgagctggccaaggtgcgggccgagatggaggtgctgctggccagcaaggcgagggctgaggaggagtcgcgctccaccagcgagaagtccaagcagaggctggaggccgaggccggccggttccgcgagctggccgaggaggccgcccgcctgcgtgccctggcggaagaggccaagcggcagcggcagctggccgaggaagacgcggcgcggcagcgggccgaggcggagcgggtgcttgcggagaagctggccgccatcggcgaggccacgcggctcaagacggaggcggagatcgcgctcaaggagaaggaggcggagaacgagcgcctgcggcggctggcggaggacgaggccttccagcggcggcggctggaggagcaggccgcgcaacacaaggctgacatcgaggagcgcctggcccagctgcgcaaggcatcggacagcgagctggagcggcagaaggggctggtggaggacacgctgaggcagcggcggcaggtggaggaggagatcctggcgctgaaggcgagcttcgagaaggcggccgctggcaaggcggagctggagctggagctgggacgcatccgcagcaacgcggaggacacgctgcgcagcaaggagcaggccgagctggaggctgcgaggcagcggcagctggcggcggaggaggagcggcggcgccgtgaggctgaggagcgcgtgcagaagagcctggcggccgaggaggaggccgcacggcagcggaaggcggcgctggaggaagtcgagcggctgaaagccaaggtggaggaggcgcggcgcctgcgggagcgagcggagcaggagtcggcgcggcagctgcagctggcccaggaggccgcccagaagcggctgcaggcggaagagaaggcacacgccttcgcggtgcagcagaaggagcaggagctacagcagacgctgcagcaggagcagagcgtgctggaccagctgcgcggcgaggcggaggcggcccggcgggcggctgaggaggcggaggaggcccgggtgcaggcggagcgtgaggcggcgcagtcccggcggcaggtggaagaggccgagcggctgaagcagtcggcagaggagcaggcacaggcccgggctcaggcacaggcggctgcagagaagctgcgcaaggaggccgagcaagaggcggcgcggcgggcacaggcggagcaggcggccctgcggcagaagcaggcagctgacgcggagatggagaagcataagaaattcgccgagcagacgctgcggcagaaggcgcaggtggagcaggagctgacaacactgcggctgcagctggaggagaccgaccaccagaagaacctgctggacgaggagctgcagcggctgaaggcggaggccacggaggccgcacgccagcgcagccaggtggaggaggagctcttctcggtgcgcgtgcagatggaggagctgagcaagctcaaggcacgcatcgaggctgagaaccgcgcactcatcttgcgtgacaaggacaatacgcagcgcttcctgcaggaggaggctgagaagatgaagcaggtggcggaggaggccgcgcggctgagtgtggcggcccaagaggctgcgcgactgcggcagctggcagaggaggacctggcacagcagcgggccttggcagagaagatgctcaaggagaagatgcaggcggtgcaggaggccacgcgactcaaggctgaggcggaactgctgcagcagcagaaggagcttgcgcaggagcaggcgcggcggctgcaggaggacaaggagcagatggcgcagcagctggcggaggagacgcagggcttccagcggacgctggaggccgagcggcagcggcagctggagatgagcgctgaggctgagcgcctcaagctgcgtgtggccgagatgagccgagcccaggcccgcgctgaggaggacgcccagcgcttccggaagcaggcggaggagatcggtgagaagctgcaccgcacggagctcgccacccaggagaaggtgaccctggtgcagacactggagatccagcgacagcagagtgaccatgatgccgagcgcctgcgggaggccatcgctgagctggagcgtgagaaggagaagctccaacaggaggccaaactgctgcagctcaagtctgaggagatgcagacggtgcagcaggagcagctgctgcaggagacgcaggccctgcagcaaagcttcctctctgaaaaggacagcctgctacagcgggagcgcttcatcgagcaggagaaggccaagctggagcagctcttccaggacgaggtggccaaggcacagcagctgcgtgaggagcagcagcggcagcagcagcagatggagcaggaacggcagcggctggtggccagcatggaggaggcgcggcggcggcagcatgaggccgaggagggcgtgcggcgcaagcaggaggagctgcagcagctggagcagcagcggcggcagcaggaggagctgctggctgaggagaaccagaggctgcgtgagcagctgcagctcctggaggagcagcaccgggccgcgctggcgcactcagaggaggtcactgcctcgcaggtggctgccacaaagaccctgcccaatggccgggatgcacttgatggccccgcggcagaggcagagccggagcacagcttcgatggcctgcggcggaaggtgtcagctcagaggctgcaggaggccggcatcctgagtgcggaggagctgcagcggttggcgcagggccacaccacggtggacgagctcgcacggcgggaagacgtgcgccactacctgcagggccgcagcagtatcgcagggctgttgctgaaggccaccaatgagaagctgagtgtttacgccgccctgcagaggcagctgctgagtcccggcacggccctcatcctgctggaggcgcaggcggcctcaggcttcctgctggaccctgtgcggaaccggcggctgaccgtcaacgaggctgtgaaggagggtgtggtgggccccgagctgcaccacaagctgctgtcggccgagcgcgccgtcactggctacaaggacccctacactggccagcagatctctctcttccaagccatgcagaagggcctcatcgtccgggagcacggcatccgcctgctggaggcccagatcgccacgggcggcgttatcgaccccgtgcacagccaccgcgtgcccgtggacgtggcctaccggcgcggctacttcgacgaggagatgaaccgcgtcctggcggaccccagcgacgacaccaagggcttctttgaccccaacacgcacgagaacctcacgtacctgcagctactggagcgctgcgtggaggaccccgagacgggcctgtgccttctgccactcacggataaggctgccaagggcggggagctggtctacactgactccgaggcccgggacgtctttgagaaggccaccgtgtctgcgccgttcggcaagttccagggcaagacggtgaccatttgggagatcatcaactcggaatacttcacggcagagcagcggcgggacctgctgcggcagttccgcacgggccggatcacagtggagaagatcatcaagatcatcatcacggtggtggaggagcaggagcagaagggccggctttgctttgagggcctgcgcagcctggtgccagccgccgagctgctggagagcagggtcatcgaccgcgagctctaccagcagctgcagcgaggtgagcgctctgtgcgagacgtagccgaggtggacactgtgcggcgggctctccggggtgccaacgtcatcgcgggtgtatggctggaggaggcggggcagaagctgagtatctacaatgccctgaagaaagacctgctgccatccgacatggccgtggccctgttggaagcccaggccggcaccgggcacatcatcgaccccgccaccagcgcccggctgaccgtggacgaggcagtgcgtgctggcctggtgggccccgagtttcatgagaagctgctatcagccgagaaggctgtgacagggtacagggacccctacacagggcagagcgtctccctgttccaggccctgaagaagggcctcattccccgggagcagggcctgcgcctgttggacgcccagctgtccacgggcggcatcgtggaccccagcaagagccaccgcgtgcccctggatgtcgcctgcgcccgaggctgcctggatgaggagaccagcagggccctgtcggcaccaagggccgacgccaaggcctacagtgaccccagcacaggggagccggccacctacggcgagctccagcagcggtgccggcccgaccagctgaccgggctgagcctgctgccgctctcagaaaaggctgctcgggcccggcaggaggagctctactcagagctgcaggcccgtgagacctttgaaaagaccccggttgaggtccccgtgggtggcttcaagggcaggacggtgacggtgtgggagctcatcagctctgagtacttcactgcggagcagcggcaggagctgttgcgtcagttccgcacgggcaaggtcaccgtggagaaggtcatcaagattctcattaccatcgtggaggaggtggagaccctgcggcaggagaggctgtccttcagcggcctccgtgcccctgtgccagccagcgagctcctggcttccggggtcctcagcagagcccagtttgagcagctcaaggacggcaagacgacggtcaaggacctttcggagctgggctccgtgcggacgctgctgcagggcagtggctgcctcgccggcatctacctggaggacaccaaggagaaggtgtccatctacgaggccatgcgccggggcctgctgagagccacaacggctgcgctcctgctggaggcgcaggcggccactggcttcctggtggaccccgtgcggaaccagcgcctgtatgtccacgaggccgtgaaggcgggcgtggtgggccccgagcttcacgagcagctgctgtctgccgagaaggccgtcaccggctacagagacccctactcgggcagcaccatctccctcttccaggccatgcagaagggcctggttctccggcagcacggcatccgcctgctggaggcccagatcgccacgggcggcatcatcgaccccgtgcacagccaccgcgtgcctgtggacgtggcctaccagcgcggctacttcagtgaggagatgaaccgcgtcctggcggaccccagcgacgacaccaagggcttctttgaccccaacacgcatgagaacctcacgtacaggcagctgctggagcggtgcgtggaggaccccgagacgggcttgcgccttctgccactgaaaggggcggagaaggctgaggtggtggagaccacgcaggtgtacactgaggaggagacaagaagggcatttgaagagacacagatcgacattcccggcggcggcagccacggcggctccaccatgtccctgtgggaggtgatgcagtcggacctgatccccgaggagcagcgggcccagctgatggctgacttccaggccggccgggtgaccaaggaacgcatgatcatcatcatcatcgagatcattgagaagacagagatcatccgccagcagggtctggcctcctacgactacgtgcgccgccgcctcacggctgaggacctgttcgaggctcggatcatctctctcgagacctacaacctgctccgggagggcaccaggagcctccgtgaggctctcgaggcggagtccgcctggtgctacctctatggcacgggctccgtggctggtgtctacctgcccggttccaggcagacactgagcatctaccaggctctcaagaaagggctgctgagtgccgaggtggcccgcctgctgctggaggcacaggcagccacaggcttcctgctggacccggtgaagggggagcggctgactgtggatgaggctgtgcggaagggcctcgtggggcccgagctgcacgaccgcctgctctcggctgagcgggcggtcaccggctaccgtgacccctacaccgagcagaccatctcgctcttccaggccatgaagaaggagctgatccctactgaggaggccctgcggctgctggatgcccagctggccaccggcggcatcgtggacccccgcctgggcttccaccttcccctggaggtggcttaccagcgtggctacctcaacaaggacacgcacgaccagctgtcagagcccagcgaggtgcgcagctacgtggacccgtccaccgacgagcgcctcagctacacgcagctgctcaggcggtgccgtcgtgacgacggcaccggccagctgctcctgccactgtcggacgcccgcaagctgaccttccgtggcctgcggaagcagatcaccatggaggagctggtgcgctcgcaggtcatggacgaggccacggcgctgcagctgcgggagggcctgacctccatcgaggaggtcaccaagaacttgcagaagttcctggaaggcaccagctgcatcgctggtgtcttcgtggacgccaccaaggaacggctctcggtgtaccaggccatgaagaagggcatcatccgccccggcacagcctttgagctcctggaggcgcaggcggccaccggttacgtcatcgaccccatcaagggactgaagctgacggtggaggaggctgtgcgtatgggcattgtgggccccgagttcaaggacaagctgctgtcggccgagcgcgccgtcactgggtacaaggacccctactctgggaagctcatctccctcttccaggccatgaagaagggcctgatcctgaaggaccatggcatccgcctgctggaggcccagatcgccacgggcggcatcatcgaccctgaggagagccaccggctgcccgtggaggtggcctacaagcgcggcctcttcgatgaggagatgaacgagatcctgaccgacccctcggacgacaccaagggcttctttgaccctaacacggaggagaacctcacctacctgcagctgatggagcgttgtatcactgacccccagacgggcctgtgtctcttgccgctgaaggagaagaagcgggagcggaagacgtcctccaagtcctccgtgcgcaagcgccgagtggtcatcgtggaccccgagacgggcaaggagatgtcagtgtacgaggcctaccgcaagggcctgattgaccaccagacgtacctggagctgtccgagcaggagtgcgagtgggaggagatcaccatctcctcctcggacggcgtggtcaagtccatgatcatcgaccgccgctccgggcgccagtacgacatcgatgatgccatcgccaagaacctcatcgaccgctcggcactggaccagtaccgcgccggcacgctctccatcaccgagttcgccgacatgctctcgggcaacgccggtggtttccgctcccgttcctcctcggtgggatcctcctcctcctaccccatcagccccgccgtctccaggacccagctggcctcctggtcagaccccactgaggagacgggccccgtggctggcatcctggacacggagacgctggagaaggtgtccatcaccgaggccatgcaccggaacctggtggataacatcacggggcagcggctgctggaggcgcaggcctgcaccgggggcatcatcgaccccagcaccggtgagcgcttccctgtcaccgacgccgtcaacaagggcctggtggacaagatcatggtggaccgcatcaacctggcccagaaggccttctgcggcttcgaggacccacgcaccaagaccaagatgtcggccgcccaggccctgaagaagggctggctctactacgaggccggccagcgcttcctggaggtgcagtacctgaccggcggcttgatcgagcccgacacgccgggccgcgtgcccctggacgaggccctgcagcgcggcacggtggacgcccgcaccgcacagaagctgcgtgacgtgggcgcctactccaagtacctcacctgccctaagaccaagctcaagatctcctataaggacgcgctggaccgcagcatggtggaggagggcacggggctgcggctgctggaggctgccgcgcagtccaccaagggctactacagcccctacagcgtcagcggctccggctctaccgctggctcccgcaccggctcgcgcaccggctcccgggccggctcccgccgcggcagctttgacgccaccggctccggcttctccatgaccttctcttcatcctcctactcctcctcgggctacggccgccgctacgcctcggggtcctcggcctccctggggggccctgagtctgccgtggcctgaggctgcctgcgcccaccccgctctgcatgcggcccagcccggctcccaccgaggcgcgggggccgttttcaacgcttaaaggtgtcttcctcccaagtggtgcctaaagtttaaccaaaaagaccagactaatatattaatatatatctgctgtccagacagcctgtatcttgggggacagggctggcccagccctgctggccgcctcaccccctcgggtctcctcactcccttctacctgccactcacacagccaggtgccttggagggtcccaagctgggccccagcccaccctcctgtcttcccagggtagcccgcctgccagtcctagctgcacagggcagctgggcccaaccctgtctgtagagggccctggtgtttctagcactggcctgcacggtgggccttgctggggacggggggccccagtcagcctctctcccagtctacccagagaagccccttccccatgggaagacgaggccctcgggcccagcccccacagtgctgtctgatctgtgctttccagctcaccccccacactcactcctgagacccctggcctccggcgtcagcctccagcctctgttcccctagtaagtgccttccatgtcggcctctaaccccaggccccgaggacccagacccagtggggaggcggacgttccagccggcatggctgggaactgcagacctgtcctcctggtgggtccaggggcccctccagcttgtggagccccacactggggtgccgcctgcccgtctctctcccatggagccccagccccctttgggcccagggacaccagccaggctctgtgctgaccctcctgttgcacccagccctggtctcagcagcgaccacccctgcctccaccctctgagctttgcatgttccactaaccccgggcgggtggcaggtggaggtgtcaggctgctggcgcctctgcaagggcagaacactaacctgaccgtgggcggggccttgcggtatccgcccccaataaaagcaattccaaccttagagtggccgccgggtgctggaggctccgctgcaccccgcgccccgcgcccgccggcatggccggcccgctgcccgacgagcaggacttcatccaggcctacgaggaggtgcgcgagaagtacaaagatgagcgggatcgtgtgcagaagaaaaccttcaccaagtgggtcaacaagcacctcatcaaggcccagaggcacatcagtgacctgtatgaagacctccgcgatggccacaacctcatctccctgctggaggtcctctcgggggacagcctgccccgggagaaggggaggatgcgtttccacaagctgcagaatgtccagattgccctggactacctccggcaccgccaggtgaagctggtgaacatcaggaatgatgacatcgctgacggcaaccccaagctgacccttggcctcatctggacaatcattctgcacttccagatctcagatatccaggtgagtgggcagtcggaggacatgacggccaaggagaagctgctgctgtggtcgcagcgaatggtggaggggtaccagggcctgcgatgcgacaacttcacctccagctggagagacggccgcctcttcaatgccatcatccaccggcacaagcccctgctcatcgacatgaacaaggtgtaccggcagaccaacctggagaacctggaccaggccttctctgtggcggagcgggacctgggagtgacgcggctcctggaccctgaggacgtggatgtccctcagcccgacgagaagtccatcatcacctacgtctcgtcgctgtatgacgccatgccccgcgtgccggacgtgcaggatggggtgagggccaacgagctgcagctgcgctggcaggagtaccgggagctggtgctgctgctgcttcagtggatgcgacaccacacggccgcctttgaggaacgcaggttcccctccagcttcgaggagattgagatcctgtggtctcagttcctgaagtttaaggagatggagctaccagccaaggaggccgacaagaacaggtccaagggcatctaccaatccctggagggagcggtgcaagcaggccagctcaaggtgccccctggctaccacccgctggatgtggagaaggagtggggcaagctgcacgtggccatcctggagcgggagaagcagctccgcagcgagtttgagaggctggagtgtcttcagcgcatcgtgaccaagctgcagatggaggcggggctgtgtgaggagcagctgaaccaggccgacgccctgctgcagtcggatgtccggctgctggctgcaggcaaagtgccacagcgggcgggggaggtggaacgggacttggacaaggcggatagcatgatccggctgctcttcaacgacgtgcagaccctcaaggatggacggcacccgcagggcgagcagatgtaccgcagggtgtaccgtctgcacgagcgcctggtagccatccgcaccgagtacaacctacggctgaaggcaggcgtggcggcccctgcaacccaggtggcccaggtgactctgcagagtgtgcagaggcgccccgagctggaggactccactctgcgctacctgcaggacctgctggcctgggtggaggagaaccagcaccgtgtggatggcgctgagtggggtgtggacctgcccagcgtggaggcgcagctgggcagccaccgaggcctgcaccagtccatcgaagaattccgggccaagatcgagcgggcacggagtgacgagggccagctctcccccgccacccggggtgcctaccgtgactgcctgggtcggctggacctgcagtacgccaagctgctgaactcctccaaggcccgcctcaggtccctggagagcttgcacagctttgtggcagccgccactaaggagctaatgtggctgaatgagaaggaggaggaggaggtgggcttcgactggagcgaccgcaacaccaacatgaccgccaagaaggagagctactcggcgctgatgcgggagctggagctgaaggagaagaagatcaaggagctccaaaatgctggggaccggctgctgcgggaggaccacccggcccggcccacggtggagtccttccaggcggccctgcagacgcagtggagctggatgctacagctgtgctgctgtatcgaggcacacctgaaggagaacgctgcctactttcagttcttctcagatgtgcgggaggccgaggggcagttgcagaagctgcaggaggcactgcgtaggaaatacagttgtgatcgctccgccaccgtcacccggctggaggacctgctgcaggatgcccaggacgagaaggaacagctgaacgagtacaagggccacctctcaggcctggccaagcgggccaaggccgtcgtgcagctgaagccccgccacccagcccaccccatgcggggccgcctgcccctgctggccgtgtgcgactataagcaggtggaggtgactgtgcacaagggtgacgagtgccagctggtgggccctgcacagccgtcccactggaaggtgctcagcagctccggcagcgaggccgccgtgccctccgtgtgcttcctggtgcccccgcccaaccaggaggcccaggaggccgtcaccaggctggaggcccagcaccaggccctggtcacgctgtggcaccagttgcacgtggacatgaagagccttctggcctggcagagccttcgccgcgacgtgcagctcatccgctcctggtccctggccacgttccgcaccctgaagccagaggagcagcgccaagccctgcacagcctggagctgcactaccaggccttcctgcgggacagccaggacgcgggcggcttcggacccgaggaccggctgatggctgagcgcgagtacggctcctgcagccaccactaccagcagctgctgcagagcctggaacagggtgcacaggaagagtctcgctgccagcgctgcatctccgagctcaaagacatccggctgcagctggaggcctgtgagacgcgcaccgtgcaccgcctgcggctgccgctggacaaagagccggcacgggagtgtgcccagcgcatcgccgagcagcagaaggcacaggcagaggtggaggggctgggcaagggggtcgcccggctctctgccgaggccgagaaggtcttggccctaccagagccatcgcctgcggcccccacgctgcgctcggagctggagctgacgctgggcaagctggagcaggtccgcagcctgtctgccatctacctggagaagctcaagaccatcagcctggtgatccgcggcacgcagggggccgaggaggtgctcagggcccacgaggagcagctcaaggaggcccaggccgtgccggccaccctcccggagctcgaggccaccaaggcctctctgaagaagctgcgggcccaggccgaggcacagcagcccacgttcgacgccctgcgggatgagctgcggggggcacaggaggtgggggagcgactgcagcagcggcacggggagcgggacgtggaggtggagcgctggcgggagcgggtcgcccagttgcttgagcgctggcaggctgtgctggcccagaccgacgtgcggcagcgcgagctcgagcaactgggccgccagctgcgttactaccgcgagagtgcagaccccttgggcgcctggctgcaggacgccaggcggcggcaggagcagatccaggccatgccgctggccgacagccaggctgtgcgggagcagctgcggcaggagcaggccctgctggaggagatcgagcgccacggcgagaaggtcgaggagtgccagaggtttgcgaaacagtacatcaacgccatcaaggactatgaactccagctggtgacgtacaaggcgcagcttgagccggtggcctccccggccaagaagcccaaggtccagtcgggatcagagagtgtcatccaggagtacgtggacctgcgtacgcactacagcgagctgaccacactgacgagccagtacatcaagttcatcagcgagactctgcggcgcatggaggaggaggagaggctggctgagcagcagcgggcagaggagcgcgagcggctggccgaggtggaggccgcgctggagaagcagcggcagctggccgaggcgcacgcccaggcaaaggcacaggcggagcgggaggcgaaggagctgcagcagcgcatgcaggaggaggtggtgcggcgggaggaggcggcggtggacgcgcagcagcagaagcgcagcattcaggaggagctgcagcagctgcggcagagctcggaggcggagatccaggccaaggcccggcaggcagaggcggctgagcgcagccggctgcgcatcgaggaggagatccgcgtggtgcgcctgcagttggaggccaccgagcgccagcgtggcggggctgagggggagctgcaggcactgcgtgcacgggcggaggaggctgaggcacaaaagcgacaggcgcaggaggaggccgagcgcttgcggaggcaggtgcaggacgagagccagcgtaagcggcaggcggaggtggagctggcctcgcgcgtgaaggccgaggccgaggcggcgcgcgagaagcagcgggccctgcaggccctggaggagctgcggctgcaggcggaggaggcggagcggcgcctgcggcaggccgaggtggagcgagcgcggcaggtacaggtggccctggagacggcgcagcgcagtgcagaggcggagctgcagagcaaacgcgcctccttcgccgagaagacggcacagctggagcgctccctgcaggaggaacacgtggctgtggcacagctgcgggaggaggctgagcggcgggcacagcagcaggccgaggccgagcgggcgcgcgaggaggcagagcgggagctggagcgctggcagctcaaggccaacgaggcgctacggctgcggctgcaggcggaggaggtggcgcagcagaagagcctggcgcaggccgaggctgagaagcagaaggaggaggcggagcgcgaggcgcggcggcgcggcaaggcggaggagcaggccgtccggcagcgggagctggctgaacaagagctggagaagcagcggcagctggcggaaggcaccgcgcagcagcgcctggccgcggagcaggagttgatccggctgcgggccgagacggagcagggggagcagcagcggcagctgctggaggaggagctggcccggctgcagcgtgaggcggctgcagccacgcagaaacggcaggagctggaagccgagctggccaaggtgcgggccgagatggaggtgctgctggccagcaaggcgagggctgaggaggagtcgcgctccaccagcgagaagtccaagcagaggctggaggccgaggccggccggttccgcgagctggccgaggaggccgcccgcctgcgtgccctggcggaagaggccaagcggcagcggcagctggccgaggaagacgcggcgcggcagcgggccgaggcggagcgggtgcttgcggagaagctggccgccatcggcgaggccacgcggctcaagacggaggcggagatcgcgctcaaggagaaggaggcggagaacgagcgcctgcggcggctggcggaggacgaggccttccagcggcggcggctggaggagcaggccgcgcaacacaaggctgacatcgaggagcgcctggcccagctgcgcaaggcatcggacagcgagctggagcggcagaaggggctggtggaggacacgctgaggcagcggcggcaggtggaggaggagatcctggcgctgaaggcgagcttcgagaaggcggccgctggcaaggcggagctggagctggagctgggacgcatccgcagcaacgcggaggacacgctgcgcagcaaggagcaggccgagctggaggctgcgaggcagcggcagctggcggcggaggaggagcggcggcgccgtgaggctgaggagcgcgtgcagaagagcctggcggccgaggaggaggccgcacggcagcggaaggcggcgctggaggaagtcgagcggctgaaagccaaggtggaggaggcgcggcgcctgcgggagcgagcggagcaggagtcggcgcggcagctgcagctggcccaggaggccgcccagaagcggctgcaggcggaagagaaggcacacgccttcgcggtgcagcagaaggagcaggagctacagcagacgctgcagcaggagcagagcgtgctggaccagctgcgcggcgaggcggaggcggcccggcgggcggctgaggaggcggaggaggcccgggtgcaggcggagcgtgaggcggcgcagtcccggcggcaggtggaagaggccgagcggctgaagcagtcggcagaggagcaggcacaggcccgggctcaggcacaggcggctgcagagaagctgcgcaaggaggccgagcaagaggcggcgcggcgggcacaggcggagcaggcggccctgcggcagaagcaggcagctgacgcggagatggagaagcataagaaattcgccgagcagacgctgcggcagaaggcgcaggtggagcaggagctgacaacactgcggctgcagctggaggagaccgaccaccagaagaacctgctggacgaggagctgcagcggctgaaggcggaggccacggaggccgcacgccagcgcagccaggtggaggaggagctcttctcggtgcgcgtgcagatggaggagctgagcaagctcaaggcacgcatcgaggctgagaaccgcgcactcatcttgcgtgacaaggacaatacgcagcgcttcctgcaggaggaggctgagaagatgaagcaggtggcggaggaggccgcgcggctgagtgtggcggcccaagaggctgcgcgactgcggcagctggcagaggaggacctggcacagcagcgggccttggcagagaagatgctcaaggagaagatgcaggcggtgcaggaggccacgcgactcaaggctgaggcggaactgctgcagcagcagaaggagcttgcgcaggagcaggcgcggcggctgcaggaggacaaggagcagatggcgcagcagctggcggaggagacgcagggcttccagcggacgctggaggccgagcggcagcggcagctggagatgagcgctgaggctgagcgcctcaagctgcgtgtggccgagatgagccgagcccaggcccgcgctgaggaggacgcccagcgcttccggaagcaggcggaggagatcggtgagaagctgcaccgcacggagctcgccacccaggagaaggtgaccctggtgcagacactggagatccagcgacagcagagtgaccatgatgccgagcgcctgcgggaggccatcgctgagctggagcgtgagaaggagaagctccaacaggaggccaaactgctgcagctcaagtctgaggagatgcagacggtgcagcaggagcagctgctgcaggagacgcaggccctgcagcaaagcttcctctctgaaaaggacagcctgctacagcgggagcgcttcatcgagcaggagaaggccaagctggagcagctcttccaggacgaggtggccaaggcacagcagctgcgtgaggagcagcagcggcagcagcagcagatggagcaggaacggcagcggctggtggccagcatggaggaggcgcggcggcggcagcatgaggccgaggagggcgtgcggcgcaagcaggaggagctgcagcagctggagcagcagcggcggcagcaggaggagctgctggctgaggagaaccagaggctgcgtgagcagctgcagctcctggaggagcagcaccgggccgcgctggcgcactcagaggaggtcactgcctcgcaggtggctgccacaaagaccctgcccaatggccgggatgcacttgatggccccgcggcagaggcagagccggagcacagcttcgatggcctgcggcggaaggtgtcagctcagaggctgcaggaggccggcatcctgagtgcggaggagctgcagcggttggcgcagggccacaccacggtggacgagctcgcacggcgggaagacgtgcgccactacctgcagggccgcagcagtatcgcagggctgttgctgaaggccaccaatgagaagctgagtgtttacgccgccctgcagaggcagctgctgagtcccggcacggccctcatcctgctggaggcgcaggcggcctcaggcttcctgctggaccctgtgcggaaccggcggctgaccgtcaacgaggctgtgaaggagggtgtggtgggccccgagctgcaccacaagctgctgtcggccgagcgcgccgtcactggctacaaggacccctacactggccagcagatctctctcttccaagccatgcagaagggcctcatcgtccgggagcacggcatccgcctgctggaggcccagatcgccacgggcggcgttatcgaccccgtgcacagccaccgcgtgcccgtggacgtggcctaccggcgcggctacttcgacgaggagatgaaccgcgtcctggcggaccccagcgacgacaccaagggcttctttgaccccaacacgcacgagaacctcacgtacctgcagctactggagcgctgcgtggaggaccccgagacgggcctgtgccttctgccactcacggataaggctgccaagggcggggagctggtctacactgactccgaggcccgggacgtctttgagaaggccaccgtgtctgcgccgttcggcaagttccagggcaagacggtgaccatttgggagatcatcaactcggaatacttcacggcagagcagcggcgggacctgctgcggcagttccgcacgggccggatcacagtggagaagatcatcaagatcatcatcacggtggtggaggagcaggagcagaagggccggctttgctttgagggcctgcgcagcctggtgccagccgccgagctgctggagagcagggtcatcgaccgcgagctctaccagcagctgcagcgaggtgagcgctctgtgcgagacgtagccgaggtggacactgtgcggcgggctctccggggtgccaacgtcatcgcgggtgtatggctggaggaggcggggcagaagctgagtatctacaatgccctgaagaaagacctgctgccatccgacatggccgtggccctgttggaagcccaggccggcaccgggcacatcatcgaccccgccaccagcgcccggctgaccgtggacgaggcagtgcgtgctggcctggtgggccccgagtttcatgagaagctgctatcagccgagaaggctgtgacagggtacagggacccctacacagggcagagcgtctccctgttccaggccctgaagaagggcctcattccccgggagcagggcctgcgcctgttggacgcccagctgtccacgggcggcatcgtggaccccagcaagagccaccgcgtgcccctggatgtcgcctgcgcccgaggctgcctggatgaggagaccagcagggccctgtcggcaccaagggccgacgccaaggcctacagtgaccccagcacaggggagccggccacctacggcgagctccagcagcggtgccggcccgaccagctgaccgggctgagcctgctgccgctctcagaaaaggctgctcgggcccggcaggaggagctctactcagagctgcaggcccgtgagacctttgaaaagaccccggttgaggtccccgtgggtggcttcaagggcaggacggtgacggtgtgggagctcatcagctctgagtacttcactgcggagcagcggcaggagctgttgcgtcagttccgcacgggcaaggtcaccgtggagaaggtcatcaagattctcattaccatcgtggaggaggtggagaccctgcggcaggagaggctgtccttcagcggcctccgtgcccctgtgccagccagcgagctcctggcttccggggtcctcagcagagcccagtttgagcagctcaaggacggcaagacgacggtcaaggacctttcggagctgggctccgtgcggacgctgctgcagggcagtggctgcctcgccggcatctacctggaggacaccaaggagaaggtgtccatctacgaggccatgcgccggggcctgctgagagccacaacggctgcgctcctgctggaggcgcaggcggccactggcttcctggtggaccccgtgcggaaccagcgcctgtatgtccacgaggccgtgaaggcgggcgtggtgggccccgagcttcacgagcagctgctgtctgccgagaaggccgtcaccggctacagagacccctactcgggcagcaccatctccctcttccaggccatgcagaagggcctggttctccggcagcacggcatccgcctgctggaggcccagatcgccacgggcggcatcatcgaccccgtgcacagccaccgcgtgcctgtggacgtggcctaccagcgcggctacttcagtgaggagatgaaccgcgtcctggcggaccccagcgacgacaccaagggcttctttgaccccaacacgcatgagaacctcacgtacaggcagctgctggagcggtgcgtggaggaccccgagacgggcttgcgccttctgccactgaaaggggcggagaaggctgaggtggtggagaccacgcaggtgtacactgaggaggagacaagaagggcatttgaagagacacagatcgacattcccggcggcggcagccacggcggctccaccatgtccctgtgggaggtgatgcagtcggacctgatccccgaggagcagcgggcccagctgatggctgacttccaggccggccgggtgaccaaggaacgcatgatcatcatcatcatcgagatcattgagaagacagagatcatccgccagcagggtctggcctcctacgactacgtgcgccgccgcctcacggctgaggacctgttcgaggctcggatcatctctctcgagacctacaacctgctccgggagggcaccaggagcctccgtgaggctctcgaggcggagtccgcctggtgctacctctatggcacgggctccgtggctggtgtctacctgcccggttccaggcagacactgagcatctaccaggctctcaagaaagggctgctgagtgccgaggtggcccgcctgctgctggaggcacaggcagccacaggcttcctgctggacccggtgaagggggagcggctgactgtggatgaggctgtgcggaagggcctcgtggggcccgagctgcacgaccgcctgctctcggctgagcgggcggtcaccggctaccgtgacccctacaccgagcagaccatctcgctcttccaggccatgaagaaggagctgatccctactgaggaggccctgcggctgctggatgcccagctggccaccggcggcatcgtggacccccgcctgggcttccaccttcccctggaggtggcttaccagcgtggctacctcaacaaggacacgcacgaccagctgtcagagcccagcgaggtgcgcagctacgtggacccgtccaccgacgagcgcctcagctacacgcagctgctcaggcggtgccgtcgtgacgacggcaccggccagctgctcctgccactgtcggacgcccgcaagctgaccttccgtggcctgcggaagcagatcaccatggaggagctggtgcgctcgcaggtcatggacgaggccacggcgctgcagctgcgggagggcctgacctccatcgaggaggtcaccaagaacttgcagaagttcctggaaggcaccagctgcatcgctggtgtcttcgtggacgccaccaaggaacggctctcggtgtaccaggccatgaagaagggcatcatccgccccggcacagcctttgagctcctggaggcgcaggcggccaccggttacgtcatcgaccccatcaagggactgaagctgacggtggaggaggctgtgcgtatgggcattgtgggccccgagttcaaggacaagctgctgtcggccgagcgcgccgtcactgggtacaaggacccctactctgggaagctcatctccctcttccaggccatgaagaagggcctgatcctgaaggaccatggcatccgcctgctggaggcccagatcgccacgggcggcatcatcgaccctgaggagagccaccggctgcccgtggaggtggcctacaagcgcggcctcttcgatgaggagatgaacgagatcctgaccgacccctcggacgacaccaagggcttctttgaccctaacacggaggagaacctcacctacctgcagctgatggagcgttgtatcactgacccccagacgggcctgtgtctcttgccgctgaaggagaagaagcgggagcggaagacgtcctccaagtcctccgtgcgcaagcgccgagtggtcatcgtggaccccgagacgggcaaggagatgtcagtgtacgaggcctaccgcaagggcctgattgaccaccagacgtacctggagctgtccgagcaggagtgcgagtgggaggagatcaccatctcctcctcggacggcgtggtcaagtccatgatcatcgaccgccgctccgggcgccagtacgacatcgatgatgccatcgccaagaacctcatcgaccgctcggcactggaccagtaccgcgccggcacgctctccatcaccgagttcgccgacatgctctcgggcaacgccggtggtttccgctcccgttcctcctcggtgggatcctcctcctcctaccccatcagccccgccgtctccaggacccagctggcctcctggtcagaccccactgaggagacgggccccgtggctggcatcctggacacggagacgctggagaaggtgtccatcaccgaggccatgcaccggaacctggtggataacatcacggggcagcggctgctggaggcgcaggcctgcaccgggggcatcatcgaccccagcaccggtgagcgcttccctgtcaccgacgccgtcaacaagggcctggtggacaagatcatggtggaccgcatcaacctggcccagaaggccttctgcggcttcgaggacccacgcaccaagaccaagatgtcggccgcccaggccctgaagaagggctggctctactacgaggccggccagcgcttcctggaggtgcagtacctgaccggcggcttgatcgagcccgacacgccgggccgcgtgcccctggacgaggccctgcagcgcggcacggtggacgcccgcaccgcacagaagctgcgtgacgtgggcgcctactccaagtacctcacctgccctaagaccaagctcaagatctcctataaggacgcgctggaccgcagcatggtggaggagggcacggggctgcggctgctggaggctgccgcgcagtccaccaagggctactacagcccctacagcgtcagcggctccggctctaccgctggctcccgcaccggctcgcgcaccggctcccgggccggctcccgccgcggcagctttgacgccaccggctccggcttctccatgaccttctcttcatcctcctactcctcctcgggctacggccgccgctacgcctcggggtcctcggcctccctggggggccctgagtctgccgtggcctgaggctgcctgcgcccaccccgctctgcatgcggcccagcccggctcccaccgaggcgcgggggccgttttcaacgcttaaaggtgtcttcctcccaagtggtgcctaaagtttaaccaaaaagaccagactaatatattaatatatatctgctgtccagacagcctgtatcttgggggacagggctggcccagccctgctggccgcctcaccccctcgggtctcctcactcccttctacctgccactcacacagccaggtgccttggagggtcccaagctgggccccagcccaccctcctgtcttcccagggtagcccgcctgccagtcctagctgcacagggcagctgggcccaaccctgtctgtagagggccctggtgtttctagcactggcctgcacggtgggccttgctggggacggggggccccagtcagcctctctcccagtctacccagagaagccccttccccatgggaagacgaggccctcgggcccagcccccacagtgctgtctgatctgtgctttccagctcaccccccacactcactcctgagacccctggcctccggcgtcagcctccagcctctgttcccctagtaagtgccttccatgtcggcctctaaccccaggccccgaggacccagacccagtggggaggcggacgttccagccggcatggctgggaactgcagacctgtcctcctggtgggtccaggggcccctccagcttgtggagccccacactggggtgccgcctgcccgtctctctcccatggagccccagccccctttgggcccagggacaccagccaggctctgtgctgaccctcctgttgcacccagccctggtctcagcagcgaccacccctgcctccaccctctgagctttgcatgttccactaaccccgggcgggtggcaggtggaggtgtcaggctgctggcgcctctgcaagggcagaacactaacctgaccgtgggcggggccttgcggtatccgcccccaataaaagcaattccaaccttagagtggccgccgggtgctggaggctccgctgcaccccgcgccccgcgcccgccggcatggccggcccgctgcccgacgagcaggacttcatccaggcctacgaggaggtgcgcgagaagtacaaagatgagcgggatcgtgtgcagaagaaaaccttcaccaagtgggtcaacaagcacctcatcaaggcccagaggcacatcagtgacctgtatgaagacctccgcgatggccacaacctcatctccctgctggaggtcctctcgggggacagcctgccccgggagaaggggaggatgcgtttccacaagctgcagaatgtccagattgccctggactacctccggcaccgccaggtgaagctggtgaacatcaggaatgatgacatcgctgacggcaaccccaagctgacccttggcctcatctggacaatcattctgcacttccagatctcagatatccaggtgagtgggcagtcggaggacatgacggccaaggagaagctgctgctgtggtcgcagcgaatggtggaggggtaccagggcctgcgatgcgacaacttcacctccagctggagagacggccgcctcttcaatgccatcatccaccggcacaagcccctgctcatcgacatgaacaaggtgtaccggcagaccaacctggagaacctggaccaggccttctctgtggcggagcgggacctgggagtgacgcggctcctggaccctgaggacgtggatgtccctcagcccgacgagaagtccatcatcacctacgtctcgtcgctgtatgacgccatgccccgcgtgccggacgtgcaggatggggtgagggccaacgagctgcagctgcgctggcaggagtaccgggagctggtgctgctgctgcttcagtggatgcgacaccacacggccgcctttgaggaacgcaggttcccctccagcttcgaggagattgagatcctgtggtctcagttcctgaagtttaaggagatggagctaccagccaaggaggccgacaagaacaggtccaagggcatctaccaatccctggagggagcggtgcaagcaggccagctcaaggtgccccctggctaccacccgctggatgtggagaaggagtggggcaagctgcacgtggccatcctggagcgggagaagcagctccgcagcgagtttgagaggctggagtgtcttcagcgcatcgtgaccaagctgcagatggaggcggggctgtgtgaggagcagctgaaccaggccgacgccctgctgcagtcggatgtccggctgctggctgcaggcaaagtgccacagcgggcgggggaggtggaacgggacttggacaaggcggatagcatgatccggctgctcttcaacgacgtgcagaccctcaaggatggacggcacccgcagggcgagcagatgtaccgcagggtgtaccgtctgcacgagcgcctggtagccatccgcaccgagtacaacctacggctgaaggcaggcgtggcggcccctgcaacccaggtggcccaggtgactctgcagagtgtgcagaggcgccccgagctggaggactccactctgcgctacctgcaggacctgctggcctgggtggaggagaaccagcaccgtgtggatggcgctgagtggggtgtggacctgcccagcgtggaggcgcagctgggcagccaccgaggcctgcaccagtccatcgaagaattccgggccaagatcgagcgggcacggagtgacgagggccagctctcccccgccacccggggtgcctaccgtgactgcctgggtcggctggacctgcagtacgccaagctgctgaactcctccaaggcccgcctcaggtccctggagagcttgcacagctttgtggcagccgccactaaggagctaatgtggctgaatgagaaggaggaggaggaggtgggcttcgactggagcgaccgcaacaccaacatgaccgccaagaaggagagctactcggcgctgatgcgggagctggagctgaaggagaagaagatcaaggagctccaaaatgctgggga

SEQ ID NO: 670 - DNA, 32765 bp, Homo sapiens
  misc_feature (222)..(222): second gene starts at position 222
atggcagaagtagagcagaagaagaagcggaccttccgcaagttcacctaccgcggcgtggacctcgaccagctgctggacatgtcctacgagcagctgatgcagctgtacagtgcgcgccagcggcggcggctgaaccggggcctgcggcggaagcagcactccctgctgaagcgcctgcgcaaggccaagaaggaggcgccgcccatggagaagccggagaccttctcttcatcctcctactcctcctcgggctacggccgccgctacgcctcggggtcctcggcctccctggggggccctgagtctgccgtggcctgaggctgcctgcgcccaccccgctctgcatgcggcccagcccggctcccaccgaggcgcgggggccgttttcaacgcttaaaggtgtcttcctcccaagtggtgcctaaagtttaaccaaaaagaccagactaatatattaatatatatctgctgtccagacagcctgtatcttgggggacagggctggcccagccctgctggccgcctcaccccctcgggtctcctcactcccttctacctgccactcacacagccaggtgccttggagggtcccaagctgggccccagcccaccctcctgtcttcccagggtagcccgcctgccagtcctagctgcacagggcagctgggcccaaccctgtctgtagagggccctggtgtttctagcactggcctgcacggtgggccttgctggggacggggggccccagtcagcctctctcccagtctacccagagaagccccttccccatgggaagacgaggccctcgggcccagcccccacagtgctgtctgatctgtgctttccagctcaccccccacactcactcctgagacccctggcctccggcgtcagcctccagcctctgttcccctagtaagtgccttccatgtcggcctctaaccccaggccccgaggacccagacccagtggggaggcggacgttccagccggcatggctgggaactgcagacctgtcctcctggtgggtccaggggcccctccagcttgtggagccccacactggggtgccgcctgcccgtctctctcccatggagccccagccccctttgggcccagggacaccagccaggctctgtgctgaccctcctgttgcacccagccctggtctcagcagcgaccacccctgcctccaccctctgagctttgcatgttccactaaccccgggcgggtggcaggtggaggtgtcaggctgctggcgcctctgcaagggcagaacactaacctgaccgtgggcggggccttgcggtatccgcccccaataaaagcaattccaaccttattgatcagctgaagccccgcccctggccggcaagccctgccccggacctccgggctcctcccccggctgcggcgctggcctgggcagtgcggtgcggggctggactctgcctggtggtggcacagccgccctcagccccggcgcagacatggacccctcgcgagccatccagaacgagatcagctccctcaaagatgagcgggatcgtgtgcagaagaaaaccttcaccaagtgggtcaacaagcacctcatcaaggcccagaggcacatcagtgacctgtatgaagacctccgcgatggccacaacctcatctccctgctggaggtcctctcgggggacagcctgccccgggagaaggggaggatgcgtttccacaagctgcagaatgtccagattgccctggactacctccggcaccgccaggtgaagctggtgaacatcaggaatgatgacatcgctgacggcaaccccaagctgacccttggcctcatctggacaatcattctgcacttccagatctcagatatccaggtgagtgggcagtcggaggacatgacggccaaggagaagctgctgctgtggtcgcagcgaatggtggaggggtaccagggcctgcgatgcgacaacttcacctccagctggagagacggccgcctcttcaatgccatcatccaccggcacaagcccctgctcatcgacatgaacaaggtgtaccggcagaccaacctggagaacctggaccaggccttctctgtggcggagcgggacctgggagtgacgcggctcctggaccctgaggacgtggatgtccctcagcccgacgagaagtccatcatcacctacgtctcgtcgctgtatgacgccatgccccgcgtgccggacgtgcaggatggggtgagggccaacgagctgcagctgcgctggcaggagtaccgggagctggtgctgctgctgcttcagtggatgcgacaccacacggccgcctttgaggaacgcaggttcccctccagcttcgaggagattgagatcctgtggtctcagttcctgaagtttaaggagatggagctaccagccaaggaggccgacaagaacaggtccaagggcatctaccaatccctggagggagcggtgcaagcaggccagctcaaggtgccccctggctaccacccgctggatgtggagaaggagtggggcaagctgcacgtggccatcctggagcgggagaagcagctccgcagcgagtttgagaggctggagtgtcttcagcgcatcgtgaccaagctgcagatggaggcggggctgtgtgaggagcagctgaaccaggccgacgccctgctgcagtcggatgtccggctgctggctgcaggcaaagtgccacagcgggcgggggaggtggaacgggacttggacaaggcggatagcatgatccggctgctcttcaacgacgtgcagaccctcaaggatggacggcacccgcagggcgagcagatgtaccgcagggtgtaccgtctgcacgagcgcctggtagccatccgcaccgagtacaacctacggctgaaggcaggcgtggcggcccctgcaacccaggtggcccaggtgactctgcagagtgtgcagaggcgccccgagctggaggactccactctgcgctacctgcaggacctgctggcctgggtggaggagaaccagcaccgtgtggatggcgctgagtggggtgtggacctgcccagcgtggaggcgcagctgggcagccaccgaggcctgcaccagtccatcgaagaattccgggccaagatcgagcgggcacggagtgacgagggccagctctcccccgccacccggggtgcctaccgtgactgcctgggtcggctggacctgcagtacgccaagctgctgaactcctccaaggcccgcctcaggtccctggagagcttgcacagctttgtggcagccgccactaaggagctaatgtggctgaatgagaaggaggaggaggaggtgggcttcgactggagcgaccgcaacaccaacatgaccgccaagaaggagagctactcggcgctgatgcgggagctggagctgaaggagaagaagatcaaggagctccaaaatgctggggaccggctgctgcgggaggaccacccggcccggcccacggtggagtccttccaggcggccctgcagacgcagtggagctggatgctacagctgtgctgctgtatcgaggcacacctgaaggagaacgctgcctactttcagttcttctcagatgtgcgggaggccgaggggcagttgcagaagctgcaggaggcactgcgtaggaaatacagttgtgatcgctccgccaccgtcacccggctggaggacctgctgcaggatgcccaggacgagaaggaacagctgaacgagtacaagggccacctctcaggcctggccaagcgggccaaggccgtcgtgcagctgaagccccgccacccagcccaccccatgcggggccgcctgcccctgctggccgtgtgcgactataagcaggtggaggtgactgtgcacaagggtgacgagtgccagctggtgggccctgcacagccgtcccactggaaggtgctcagcagctccggcagcgaggccgccgtgccctccgtgtgcttcctggtgcccccgcccaaccaggaggcccaggaggccgtcaccaggctggaggcccagcaccaggccctggtcacgctgtggcaccagttgcacgtggacatgaagagccttctggcctggcagagccttcgccgcgacgtgcagctcatccgctcctggtccctggccacgttccgcaccctgaagccagaggagcagcgccaagccctgcacagcctggagctgcactaccaggccttcctgcgggacagccaggacgcgggcggcttcggacccgaggaccggctgatggctgagcgcgagtacggctcctgcagccaccactaccagcagctgctgcagagcctggaacagggtgcacaggaagagtctcgctgccagcgctgcatctccgagctcaaagacatccggctgcagctggaggcctgtgagacgcgcaccgtgcaccgcctgcggctgccgctggacaaagagccggcacgggagtgtgcccagcgcatcgccgagcagcagaaggcacaggcagaggtggaggggctgggcaagggggtcgcccggctctctgccgaggccgagaaggtcttggccctaccagagccatcgcctgcggcccccacgctgcgctcggagctggagctgacgctgggcaagctggagcaggtccgcagcctgtctgccatctacctggagaagctcaagaccatcagcctggtgatccgcggcacgcagggggccgaggaggtgctcagggcccacgaggagcagctcaaggaggcccaggccgtgccggccaccctcccggagctcgaggccaccaaggcctctctgaagaagctgcgggcccaggccgaggcacagcagcccacgttcgacgccctgcgggatgagctgcggggggcacaggaggtgggggagcgactgcagcagcggcacggggagcgggacgtggaggtggagcgctggcgggagcgggtcgcccagttgcttgagcgctggcaggctgtgctggcccagaccgacgtgcggcagcgcgagctcgagcaactgggccgccagctgcgttactaccgcgagagtgcagaccccttgggcgcctggctgcaggacgccaggcggcggcaggagcagatccaggccatgccgctggccgacagccaggctgtgcgggagcagctgcggcaggagcaggccctgctggaggagatcgagcgccacggcgagaaggtcgaggagtgccagaggtttgcgaaacagtacatcaacgccatcaaggactatgaactccagctggtgacgtacaaggcgcagcttgagccggtggcctccccggccaagaagcccaaggtccagtcgggatcagagagtgtcatccaggagtacgtggacctgcgtacgcactacagcgagctgaccacactgacgagccagtacatcaagttcatcagcgagactctgcggcgcatggaggaggaggagaggctggctgagcagcagcgggcagaggagcgcgagcggctggccgaggtggaggccgcgctggagaagcagcggcagctggccgaggcgcacgcccaggcaaaggcacaggcggagcgggaggcgaaggagctgcagcagcgcatgcaggaggaggtggtgcggcgggaggaggcggcggtggacgcgcagcagcagaagcgcagcattcaggaggagctgcagcagctgcggcagagctcggaggcggagatccaggccaaggcccggcaggcagaggcggctgagcgcagccggctgcgcatcgaggaggagatccgcgtggtgcgcctgcagttggaggccaccgagcgccagcgtggcggggctgagggggagctgcaggcactgcgtgcacgggcggaggaggctgaggcacaaaagcgacaggcgcaggaggaggccgagcgcttgcggaggcaggtgcaggacgagagccagcgtaagcggcaggcggaggtggagctggcctcgcgcgtgaaggccgaggccgaggcggcgcgcgagaagcagcgggccctgcaggccctggaggagctgcggctgcaggcggaggaggcggagcggcgcctgcggcaggccgaggtggagcgagcgcggcaggtacaggtggccctggagacggcgcagcgcagtgcagaggcggagctgcagagcaaacgcgcctccttcgccgagaagacggcacagctggagcgctccctgcaggaggaacacgtggctgtggcacagctgcgggaggaggctgagcggcgggcacagcagcaggccgaggccgagcgggcgcgcgaggaggcagagcgggagctggagcgctggcagctcaaggccaacgaggcgctacggctgcggctgcaggcggaggaggtggcgcagcagaagagcctggcgcaggccgaggctgagaagcagaaggaggaggcggagcgcgaggcgcggcggcgcggcaaggcggaggagcaggccgtccggcagcgggagctggctgaacaagagctggagaagcagcggcagctggcggaaggcaccgcgcagcagcgcctggccgcggagcaggagttgatccggctgcgggccgagacggagcagggggagcagcagcggcagctgctggaggaggagctggcccggctgcagcgtgaggcggctgcagccacgcagaaacggcaggagctggaagccgagctggccaaggtgcgggccgagatggaggtgctgctggccagcaaggcgagggctgaggaggagtcgcgctccaccagcgagaagtccaagcagaggctggaggccgaggccggccggttccgcgagctggccgaggaggccgcccgcctgcgtgccctggcggaagaggccaagcggcagcggcagctggccgaggaagacgcggcgcggcagcgggccgaggcggagcgggtgcttgcggagaagctggccgccatcggcgaggccacgcggctcaagacggaggcggagatcgcgctcaaggagaaggaggcggagaacgagcgcctgcggcggctggcggaggacgaggccttccagcggcggcggctggaggagcaggccgcgcaacacaaggctgacatcgaggagcgcctggcccagctgcgcaaggcatcggacagcgagctggagcggcagaaggggctggtggaggacacgctgaggcagcggcggcaggtggaggaggagatcctggcgctgaaggcgagcttcgagaaggcggccgctggcaaggcggagctggagctggagctgggacgcatccgcagcaacgcggaggacacgctgcgcagcaaggagcaggccgagctggaggctgcgaggcagcggcagctggcggcggaggaggagcggcggcgccgtgaggctgaggagcgcgtgcagaagagcctggcggccgaggaggaggccgcacggcagcggaaggcggcgctggaggaagtcgagcggctgaaagccaaggtggaggaggcgcggcgcctgcgggagcgagcggagcaggagtcggcgcggcagctgcagctggcccaggaggccgcccagaagcggctgcaggcggaagagaaggcacacgccttcgcggtgcagcagaaggagcaggagctacagcagacgctgcagcaggagcagagcgtgctggaccagctgcgcggcgaggcggaggcggcccggcgggcggctgaggaggcggaggaggcccgggtgcaggcggagcgtgaggcggcgcagtcccggcggcaggtggaagaggccgagcggctgaagcagtcggcagaggagcaggcacaggcccgggctcaggcacaggcggctgcagagaagctgcgcaaggaggccgagcaagaggcggcgcggcgggcacaggcggagcaggcggccctgcggcagaagcaggcagctgacgcggagatggagaagcataagaaattcgccgagcagacgctgcggcagaaggcgcaggtggagcaggagctgacaacactgcggctgcagctggaggagaccgaccaccagaagaacctgctggacgaggagctgcagcggctgaaggcggaggccacggaggccgcacgccagcgcagccaggtggaggaggagctcttctcggtgcgcgtgcagatggaggagctgagcaagctcaaggcacgcatcgaggctgagaaccgcgcactcatcttgcgtgacaaggacaatacgcagcgcttcctgcaggaggaggctgagaagatgaagcaggtggcggaggaggccgcgcggctgagtgtggcggcccaagaggctgcgcgactgcggcagctggcagaggaggacctggcacagcagcgggccttggcagagaagatgctcaaggagaagatgcaggcggtgcaggaggccacgcgactcaaggctgaggcggaactgctgcagcagcagaaggagcttgcgcaggagcaggcgcggcggctgcaggaggacaaggagcagatggcgcagcagctggcggaggagacgcagggcttccagcggacgctggaggccgagcggcagcggcagctggagatgagcgctgaggctgagcgcctcaagctgcgtgtggccgagatgagccgagcccaggcccgcgctgaggaggacgcccagcgcttccggaagcaggcggaggagatcggtgagaagctgcaccgcacggagctcgccacccaggagaaggtgaccctggtgcagacactggagatccagcgacagcagagtgaccatgatgccgagcgcctgcgggaggccatcgctgagctggagcgtgagaaggagaagctccaacaggaggccaaactgctgcagctcaagtctgaggagatgcagacggtgcagcaggagcagctgctgcaggagacgcaggccctgcagcaaagcttcctctctgaaaaggacagcctgctacagcgggagcgcttcatcgagcaggagaaggccaagctggagcagctcttccaggacgaggtggccaaggcacagcagctgcgtgaggagcagcagcggcagcagcagcagatggagcaggaacggcagcggctggtggccagcatggaggaggcgcggcggcggcagcatgaggccgaggagggcgtgcggcgcaagcaggaggagctgcagcagctggagcagcagcggcggcagcaggaggagctgctggctgaggagaaccagaggctgcgtgagcagctgcagctcctggaggagcagcaccgggccgcgctggcgcactcagaggaggtcactgcctcgcaggtggctgccacaaagaccctgcccaatggccgggatgcacttgatggccccgcggcagaggcagagccggagcacagcttcgatggcctgcggcggaaggtgtcagctcagaggctgcaggaggccggcatcctgagtgcggaggagctgcagcggttggcgcagggccacaccacggtggacgagctcgcacggcgggaagacgtgcgccactacctgcagggccgcagcagtatcgcagggctgttgctgaaggccaccaatgagaagctgagtgtttacgccgccctgcagaggcagctgctgagtcccggcacggccctcatcctgctggaggcgcaggcggcctcaggcttcctgctggaccctgtgcggaaccggcggctgaccgtcaacgaggctgtgaaggagggtgtggtgggccccgagctgcaccacaagctgctgtcggccgagcgcgccgtcactggctacaaggacccctacactggccagcagatctctctcttccaagccatgcagaagggcctcatcgtccgggagcacggcatccgcctgctggaggcccagatcgccacgggcggcgttatcgaccccgtgcacagccaccgcgtgcccgtggacgtggcctaccggcgcggctacttcgacgaggagatgaaccgcgtcctggcggaccccagcgacgacaccaagggcttctttgaccccaacacgcacgagaacctcacgtacctgcagctactggagcgctgcgtggaggaccccgagacgggcctgtgccttctgccactcacggataaggctgccaagggcggggagctggtctacactgactccgaggcccgggacgtctttgagaaggccaccgtgtctgcgccgttcggcaagttccagggcaagacggtgaccatttgggagatcatcaactcggaatacttcacggcagagcagcggcgggacctgctgcggcagttccgcacgggccggatcacagtggagaagatcatcaagatcatcatcacggtggtggaggagcaggagcagaagggccggctttgctttgagggcctgcgcagcctggtgccagccgccgagctgctggagagcagggtcatcgaccgcgagctctaccagcagctgcagcgaggtgagcgctctgtgcgagacgtagccgaggtggacactgtgcggcgggctctccggggtgccaacgtcatcgcgggtgtatggctggaggaggcggggcagaagctgagtatctacaatgccctgaagaaagacctgctgccatccgacatggccgtggccctgttggaagcccaggccggcaccgggcacatcatcgaccccgccaccagcgcccggctgaccgtggacgaggcagtgcgtgctggcctggtgggccccgagtttcatgagaagctgctatcagccgagaaggctgtgacagggtacagggacccctacacagggcagagcgtctccctgttccaggccctgaagaagggcctcattccccgggagcagggcctgcgcctgttggacgcccagctgtccacgggcggcatcgtggaccccagcaagagccaccgcgtgcccctggatgtcgcctgcgcccgaggctgcctggatgaggagaccagcagggccctgtcggcaccaagggccgacgccaaggcctacagtgaccccagcacaggggagccggccacctacggcgagctccagcagcggtgccggcccgaccagctgaccgggctgagcctgctgccgctctcagaaaaggctgctcgggcccggcaggaggagctctactcagagctgcaggcccgtgagacctttgaaaagaccccggttgaggtccccgtgggtggcttcaagggcaggacggtgacggtgtgggagctcatcagctctgagtacttcactgcggagcagcggcaggagctgttgcgtcagttccgcacgggcaaggtcaccgtggagaaggtcatcaagattctcattaccatcgtggaggaggtggagaccctgcggcaggagaggctgtccttcagcggcctccgtgcccctgtgccagccagcgagctcctggcttccggggtcctcagcagagcccagtttgagcagctcaaggacggcaagacgacggtcaaggacctttcggagctgggctccgtgcggacgctgctgcagggcagtggctgcctcgccggcatctacctggaggacaccaaggagaaggtgtccatctacgaggccatgcgccggggcctgctgagagccacaacggctgcgctcctgctggaggcgcaggcggccactggcttcctggtggaccccgtgcggaaccagcgcctgtatgtccacgaggccgtgaaggcgggcgtggtgggccccgagcttcacgagcagctgctgtctgccgagaaggccgtcaccggctacagagacccctactcgggcagcaccatctccctcttccaggccatgcagaagggcctggttctccggcagcacggcatccgcctgctggaggcccagatcgccacgggcggcatcatcgaccccgtgcacagccaccgcgtgcctgtggacgtggcctaccagcgcggctacttcagtgaggagatgaaccgcgtcctggcggaccccagcgacgacaccaagggcttctttgaccccaacacgcatgagaacctcacgtacaggcagctgctggagcggtgcgtggaggaccccgagacgggcttgcgccttctgccactgaaaggggcggagaaggctgaggtggtggagaccacgcaggtgtacactgaggaggagacaagaagggcatttgaagagacacagatcgacattcccggcggcggcagccacggcggctccaccatgtccctgtgggaggtgatgcagtcggacctgatccccgaggagcagcgggcccagctgatggctgacttccaggccggccgggtgaccaaggaacgcatgatcatcatcatcatcgagatcattgagaagacagagatcatccgccagcagggtctggcctcctacgactacgtgcgccgccgcctcacggctgaggacctgttcgaggctcggatcatctctctcgagacctacaacctgctccgggagggcaccaggagcctccgtgaggctctcgaggcggagtccgcctggtgctacctctatggcacgggctccgtggctggtgtctacctgcccggttccaggcagacactgagcatctaccaggctctcaagaaagggctgctgagtgccgaggtggcccgcctgctgctggaggcacaggcagccacaggcttcctgctggacccggtgaagggggagcggctgactgtggatgaggctgtgcggaagggcctcgtggggcccgagctgcacgaccgcctgctctcggctgagcgggcggtcaccggctaccgtgacccctacaccgagcagaccatctcgctcttccaggccatgaagaaggagctgatccctactgaggaggccctgcggctgctggatgcccagctggccaccggcggcatcgtggacccccgcctgggcttccaccttcccctggaggtggcttaccagcgtggctacctcaacaaggacacgcacgaccagctgtcagagcccagcgaggtgcgcagctacgtggacccgtccaccgacgagcgcctcagctacacgcagctgctcaggcggtgccgtcgtgacgacggcaccggccagctgctcctgccactgtcggacgcccgcaagctgaccttccgtggcctgcggaagcagatcaccatggaggagctggtgcgctcgcaggtcatggacgaggccacggcgctgcagctgcgggagggcctgacctccatcgaggaggtcaccaagaacttgcagaagttcctggaaggcaccagctgcatcgctggtgtcttcgtggacgccaccaaggaacggctctcggtgtaccaggccatgaagaagggcatcatccgccccggcacagcctttgagctcctggaggcgcaggcggccaccggttacgtcatcgaccccatcaagggactgaagctgacggtggaggaggctgtgcgtatgggcattgtgggccccgagttcaaggacaagctgctgtcggccgagcgcgccgtcactgggtacaaggacccctactctgggaagctcatctccctcttccaggccatgaagaagggcctgatcctgaaggaccatggcatccgcctgctggaggcccagatcgccacgggcggcatcatcgaccctgaggagagccaccggctgcccgtggaggtggcctacaagcgcggcctcttcgatgaggagatgaacgagatcctgaccgacccctcggacgacaccaagggcttctttgaccctaacacggaggagaacctcacctacctgcagctgatggagcgttgtatcactgacccccagacgggcctgtgtctcttgccgctgaaggagaagaagcgggagcggaagacgtcctccaagtcctccgtgcgcaagcgccgagtggtcatcgtggaccccgagacgggcaaggagatgtcagtgtacgaggcctaccgcaagggcctgattgaccaccagacgtacctggagctgtccgagcaggagtgcgagtgggaggagatcaccatctcctcctcggacggcgtggtcaagtccatgatcatcgaccgccgctccgggcgccagtacgacatcgatgatgccatcgccaagaacctcatcgaccgctcggcactggaccagtaccgcgccggcacgctctccatcaccgagttcgccgacatgctctcgggcaacgccggtggtttccgctcccgttcctcctcggtgggatcctcctcctcctaccccatcagccccgccgtctccaggacccagctggcctcctggtcagaccccactgaggagacgggccccgtggctggcatcctggacacggagacgctggagaaggtgtccatcaccgaggccatgcaccggaacctggtggataacatcacggggcagcggctgctggaggcgcaggcctgcaccgggggcatcatcgaccccagcaccggtgagcgcttccctgtcaccgacgccgtcaacaagggcctggtggacaagatcatggtggaccgcatcaacctggcccagaaggccttctgcggcttcgaggacccacgcaccaagaccaagatgtcggccgcccaggccctgaagaagggctggctctactacgaggccggccagcgcttcctggaggtgcagtacctgaccggcggcttgatcgagcccgacacgccgggccgcgtgcccctggacgaggccctgcagcgcggcacggtggacgcccgcaccgcacagaagctgcgtgacgtgggcgcctactccaagtacctcacctgccctaagaccaagctcaagatctcctataaggacgcgctggaccgcagcatggtggaggagggcacggggctgcggctgctggaggctgccgcgcagtccaccaagggctactacagcccctacagcgtcagcggctccggctctaccgctggctcccgcaccggctcgcgcaccggctcccgggccggctcccgccgcggcagctttgacgccaccggctccggcttctccatgaccttctcttcatcctcctactcctcctcgggctacggccgccgctacgcctcggggtcctcggcctccctggggggccctgagtctgccgtggcctgaggctgcctgcgcccaccccgctctgcatgcggcccagcccggctcccaccgaggcgcgggggccgttttcaacgcttaaaggtgtcttcctcccaagtggtgcctaaagtttaaccaaaaagaccagactaatatattaatatatatctgctgtccagacagcctgtatcttgggggacagggctggcccagccctgctggccgcctcaccccctcgggtctcctcactcccttctacctgccactcacacagccaggtgccttggagggtcccaagctgggccccagcccaccctcctgtcttcccagggtagcccgcctgccagtcctagctgcacagggcagctgggcccaaccctgtctgtagagggccctggtgtttctagcactggcctgcacggtgggccttgctggggacggggggccccagtcagcctctctcccagtctacccagagaagccccttccccatgggaagacgaggccctcgggcccagcccccacagtgctgtctgatctgtgctttccagctcaccccccacactcactcctgagacccctggcctccggcgtcagcctccagcctctgttcccctagtaagtgccttccatgtcggcctctaaccccaggccccgaggacccagacccagtggggaggcggacgttccagccggcatggctgggaactgcagacctgtcctcctggtgggtccaggggcccctccagcttgtggagccccacactggggtgccgcctgcccgtctctctcccatggagccccagccccctttgggcccagggacaccagccaggctctgtgctgaccctcctgttgcacccagccctggtctcagcagcgaccacccctgcctccaccctctgagctttgcatgttccactaaccccgggcgggtggcaggtggaggtgtcaggctgctggcgcctctgcaagggcagaacactaacctgaccgtgggcggggccttgcggtatccgcccccaataaaagcaattccaaccttattgatcagctgaagccccgcccctggccggcaagccctgccccggacctccgggctcctcccccggctgcggcgctggcctgggcagtgcggtgcggggctggactctgcctggtggtggcacagccgccctcagccccggcgcagacatggacccctcgcgagccatccagaacgagatcagctccctcaaagatgagcgggatcgtgtgcagaagaaaaccttcaccaagtgggtcaacaagcacctcatcaaggcccagaggcacatcagtgacctgtatgaagacctccgcgatggccacaacctcatctccctgctggaggtcctctcgggggacagcctgccccgggagaaggggaggatgcgtttccacaagctgcagaatgtccagattgccctggactacctccggcaccgccaggtgaagctggtgaacatcaggaatgatgacatcgctgacggcaaccccaagctgacccttggcctcatctggacaatcattctgcacttccagatctcagatatccaggtgagtgggcagtcggaggacatgacggccaaggagaagctgctgctgtggtcgcagcgaatggtggaggggtaccagggcctgcgatgcgacaacttcacctccagctggagagacggccgcctcttcaatgccatcatccaccggcacaagcccctgctcatcgacatgaacaaggtgtaccggcagaccaacctggagaacctggaccaggccttctctgtggcggagcgggacctgggagtgacgcggctcctggaccctgaggacgtggatgtccctcagcccgacgagaagtccatcatcacctacgtctcgtcgctgtatgacgccatgccccgcgtgccggacgtgcaggatggggtgagggccaacgagctgcagctgcgctggcaggagtaccgggagctggtgctgctgctgcttcagtggatgcgacaccacacggccgcctttgaggaacgcaggttcccctccagcttcgaggagattgagatcctgtggtctcagttcctgaagtttaaggagatggagctaccagccaaggaggccgacaagaacaggtccaagggcatctaccaatccctggagggagcggtgcaagcaggccagctcaaggtgccccctggctaccacccgctggatgtggagaaggagtggggcaagctgcacgtggccatcctggagcgggagaagcagctccgcagcgagtttgagaggctggagtgtcttcagcgcatcgtgaccaagctgcagatggaggcggggctgtgtgaggagcagctgaaccaggccgacgccctgctgcagtcggatgtccggctgctggctgcaggcaaagtgccacagcgggcgggggaggtggaacgggacttggacaaggcggatagcatgatccggctgctcttcaacgacgtgcagaccctcaaggatggacggcacccgcagggcgagcagatgtaccgcagggtgtaccgtctgcacgagcgcctggtagccatccgcaccgagtacaacctacggctgaaggcaggcgtggcggcccctgcaacccaggtggcccaggtgactctgcagagtgtgcagaggcgccccgagctggaggactccactctgcgctacctgcaggacctgctggcctgggtggaggagaaccagcaccgtgtggatggcgctgagtggggtgtggacctgcccagcgtggaggcgcagctgggcagccaccgaggcctgcaccagtccatcgaagaattccgggccaagatcgagcgggcacggagtgacgagggccagctctcccccgccacccggggtgcctaccgtgactgcctgggtcggctggacctgcagtacgccaagctgctgaactcctccaaggcccgcctcaggtccctggagagcttgcacagctttgtggcagccgccactaaggagctaatgtggctgaatgagaaggaggaggaggaggtgggcttcgactggagcgaccgcaacaccaacatgaccgccaagaaggagagctactcggcgctgatgcgggagctggagctgaaggagaagaagatcaaggagctccaaaatgctggggaccggctgctgcgggaggaccacccggcccggcccacggtggagtccttccaggcggccctgcagacgcagtggagctggatgctacagctgtgctgctgtatcgaggcacacctgaaggagaacgctgcctactttcagttcttctcagatgtgcgggaggccgaggggcagttgcagaagctgcaggaggcactgcgtaggaaatacagttgtgatcgctccgccaccgtcacccggctggaggacctgctgcaggatgcccaggacgagaaggaacagctgaacgagtacaagggccacctctcaggcctggccaagcgggccaaggccgtcgtgcagctgaagccccgccacccagcccaccccatgcggggccgcctgcccctgctggccgtgtgcgactataagcaggtggaggtgactgtgcacaagggtgacgagtgccagctggtgggccctgcacagccgtcccactggaaggtgctcagcagctccggcagcgaggccgccgtgccctccgtgtgcttcctggtgcccccgcccaaccaggaggcccaggaggccgtcaccaggctggaggcccagcaccaggccctggtcacgctgtggcaccagttgcacgtggacatgaagagccttctggcctggcagagccttcgccgcgacgtgcagctcatccgctcctggtccctggccacgttccgcaccctgaagccagaggagcagcgccaagccctgcacagcctggagctgcactaccaggccttcctgcgggacagccaggacgcgggcggcttcggacccgaggaccggctgatggctgagcgcgagtacggctcctgcagccaccactaccagcagctgctgcagagcctggaacagggtgcacaggaagagtctcgctgccagcgctgcatctccgagctcaaagacatccggctgcagctggaggcctgtgagacgcgcaccgtgcaccgcctgcggctgccgctggacaaagagccggcacgggagtgtgcccagcgcatcgccgagcagcagaaggcacaggcagaggtggaggggctgggcaagggggtcgcccggctctctgccgaggccgagaaggtcttggccctaccagagccatcgcctgcggcccccacgctgcgctcggagctggagctgacgctgggcaagctggagcaggtccgcagcctgtctgccatctacctggagaagctcaagaccatcagcctggtgatccgcggcacgcagggggccgaggaggtgctcagggcccacgaggagcagctcaaggaggcccaggccgtgccggccaccctcccggagctcgaggccaccaaggcctctctgaagaagctgcgggcccaggccgaggcacagcagcccacgttcgacgccctgcgggatgagctgcggggggcacaggaggtgggggagcgactgcagcagcggcacggggagcgggacgtggaggtggagcgctggcgggagcgggtcgcccagttgcttgagcgctggcaggctgtgctggcccagaccgacgtgcggcagcgcgagctcgagcaactgggccgccagctgcgttactaccgcgagagtgcagaccccttgggcgcctggctgcaggacgccaggcggcggcaggagcagatccaggccatgccgctggccgacagccaggctgtgcgggagcagctgcggcaggagcaggccctgctggaggagatcgagcgccacggcgagaaggtcgaggagtgccagaggtttgcgaaacagtacatcaacgccatcaaggactatgaactccagctggtgacgtacaaggcgcagcttgagccggtggcctccccggccaagaagcccaaggtccagtcgggatcagagagtgtcatccaggagtacgtggacctgcgtacgcactacagcgagctgaccacactgacgagccagtacatcaagttcatcagcgagactctgcggcgcatggaggaggaggagaggctggctgagcagcagcgggcagaggagcgcgagcggctggccgaggtggaggccgcgctggagaagcagcggcagctggccgaggcgcacgcccaggcaaaggcacaggcggagcgggaggcgaaggagctgcagcagcgcatgcaggaggaggtggtgcggcgggaggaggcggcggtggacgcgcagcagcagaagcgcagcattcaggaggagctgcagcagctgcggcagagctcggaggcggagatccaggccaaggcccggcaggcagaggcggctgagcgcagccggctgcgcatcgaggaggagatccgcgtggtgcgcctgcagttggaggccaccgagcgccagcgtggcggggctgagggggagctgcaggcactgcgtgcacgggcggaggaggctgaggcacaaaagcgacaggcgcaggaggaggccgagcgcttgcggaggcaggtgcaggacgagagccagcgtaagcggcaggcggaggtggagctggcctcgcgcgtgaaggccgaggccgaggcggcgcgcgagaagcagcgggccctgcaggccctggaggagctgcggctgcaggcggaggaggcggagcggcgcctgcggcaggccgaggtggagcgagcgcggcaggtacaggtggccctggagacggcgcagcgcagtgcagaggcggagctgcagagcaaacgcgcctccttcgccgagaagacggcacagctggagcgctccctgcaggaggaacacgtggctgtggcacagctgcgggaggaggctgagcggcgggcacagcagcaggccgaggccgagcgggcgcgcgaggaggcagagcgggagctggagcgctggcagctcaaggccaacgaggcgctacggctgcggctgcaggcggaggaggtggcgcagcagaagagcctggcgcaggccgaggctgagaagcagaaggaggaggcggagcgcgaggcgcggcggcgcggcaaggcggaggagcaggccgtccggcagcgggagctggctgaacaagagctggagaagcagcggcagctggcggaaggcaccgcgcagcagcgcctggccgcggagcaggagttgatccggctgcgggccgagacggagcagggggagcagcagcggcagctgctggaggaggagctggcccggctgcagcgtgaggcggctgcagccacgcagaaacggcaggagctggaagccgagctggccaaggtgcgggccgagatggaggtgctgctggccagcaaggcgagggctgaggaggagtcgcgctccaccagcgagaagtccaagcagaggctggaggccgaggccggccggttccgcgagctggccgaggaggccgcccgcctgcgtgccctggcggaagaggccaagcggcagcggcagctggccgaggaagacgcggcgcggcagcgggccgaggcggagcgggtgcttgcggagaagctggccgccatcggcgaggccacgcggctcaagacggaggcggagatcgcgctcaaggagaaggaggcggagaacgagcgcctgcggcggctggcggaggacgaggccttccagcggcggcggctggaggagcaggccgcgcaacacaaggctgacatcgaggagcgcctggcccagctgcgcaaggcatcggacagcgagctggagcggcagaaggggctggtggaggacacgctgaggcagcggcggcaggtggaggaggagatcctggcgctgaaggcgagcttcgagaaggcggccgctggcaaggcggagctggagctggagctgggacgcatccgcagcaacgcggaggacacgctgcgcagcaaggagcaggccgagctggaggctgcgaggcagcggcagctggcggcggaggaggagcggcggcgccgtgaggctgaggagcgcgtgcagaagagcctggcggccgaggaggaggccgcacggcagcggaaggcggcgctggaggaagtcgagcggctgaaagccaaggtggaggaggcgcggcgcctgcgggagcgagcggagcaggagtcggcgcggcagctgcagctggcccaggaggccgcccagaagcggctgcaggcggaagagaaggcacacgccttcgcggtgcagcagaaggagcaggagctacagcagacgctgcagcaggagcagagcgtgctggaccagctgcgcggcgaggcggaggcggcccggcgggcggctgaggaggcggaggaggcccgggtgcaggcggagcgtgaggcggcgcagtcccggcggcaggtggaagaggccgagcggctgaagcagtcggcagaggagcaggcacaggcccgggctcaggcacaggcggctgcagagaagctgcgcaaggaggccgagcaagaggcggcgcggcgggcacaggcggagcaggcggccctgcggcagaagcaggcagctgacgcggagatggagaagcataagaaattcgccgagcagacgctgcggcagaaggcgcaggtggagcaggagctgacaacactgcggctgcagctggaggagaccgaccaccagaagaacctgctggacgaggagctgcagcggctgaaggcggaggccacggaggccgcacgccagcgcagccaggtggaggaggagctcttctcggtgcgcgtgcagatggaggagctgagcaagctcaaggcacgcatcgaggctgagaaccgcgcactcatcttgcgtgacaaggacaatacgcagcgcttcctgcaggaggaggctgagaagatgaagcaggtggcggaggaggccgcgcggctgagtgtggcggcccaagaggctgcgcgactgcggcagctggcagaggaggacctggcacagcagcgggccttggcagagaagatgctcaaggagaagatgcaggcggtgcaggaggccacgcgactcaaggctgaggcggaactgctgcagcagcagaaggagcttgcgcaggagcaggcgcggcggctgcaggaggacaaggagcagatggcgcagcagctggcggaggagacgcagggcttccagcggacgctggaggccgagcggcagcggcagctggagatgagcgctgaggctgagcgcctcaagctgcgtgtggccgagatgagccgagcccaggcccgcgctgaggaggacgcccagcgcttccggaagcaggcggaggagatcggtgagaagctgcaccgcacggagctcgccacccaggagaaggtgaccctggtgcagacactggagatccagcgacagcagagtgaccatgatgccgagcgcctgcgggaggccatcgctgagctggagcgtgagaaggagaagctccaacaggaggccaaactgctgcagctcaagtctgaggagatgcagacggtgcagcaggagcagctgctgcaggagacgcaggccctgcagcaaagcttcctctctgaaaaggacagcctgctacagcgggagcgcttcatcgagcaggagaaggccaagctggagcagctcttccaggacgaggtggccaaggcacagcagctgcgtgaggagcagcagcggcagcagcagcagatggagcaggaacggcagcggctggtggccagcatggaggaggcgcggcggcggcagcatgaggccgaggagggcgtgcggcgcaagcaggaggagctgcagcagctggagcagcagcggcggcagcaggaggagctgctggctgaggagaaccagaggctgcgtgagcagctgcagctcctggaggagcagcaccgggccgcgctggcgcactcagaggaggtcactgcctcgcaggtggctgccacaaagaccctgcccaatggccgggatgcacttgatggccccgcggcagaggcagagccggagcacagcttcgatggcctgcggcggaaggtgtcagctcagaggctgcaggaggccggcatcctgagtgcggaggagctgcagcggttggcgcagggccacaccacggtggacgagctcgcacggcgggaagacgtgcgccactacctgcagggccgcagcagtatcgcagggctgttgctgaaggccaccaatgagaagctgagtgtttacgccgccctgcagaggcagctgctgagtcccggcacggccctcatcctgctggaggcgcaggcggcctcaggcttcctgctggaccctgtgcggaaccggcggctgaccgtcaacgaggctgtgaaggagggtgtggtgggccccgagctgcaccacaagctgctgtcggccgagcgcgccgtcactggctacaaggacccctacactggccagcagatctctctcttccaagccatgcagaagggcctcatcgtccgggagcacggcatccgcctgctggaggcccagatcgccacgggcggcgttatcgaccccgtgcacagccaccgcgtgcccgtggacgtggcctaccggcgcggctacttcgacgaggagatgaaccgcgtcctggcggaccccagcgacgacaccaagggcttctttgaccccaacacgcacgagaacctcacgtacctgcagctactggagcgctgcgtggaggaccccgagacgggcctgtgccttctgccactcacggataaggctgccaagggcggggagctggtctacactgactccgaggcccgggacgtctttgagaaggccaccgtgtctgcgccgttcggcaagttccagggcaagacggtgaccatttgggagatcatcaactcggaatacttcacggcagagcagcggcgggacctgctgcggcagttccgcacgggccggatcacagtggagaagatcatcaagatcatcatcacggtggtggaggagcaggagcagaagggccggctttgctttgagggcctgcgcagcctggtgccagccgccgagctgctggagagcagggtcatcgaccgcgagctctaccagcagctgcagcgaggtgagcgctctgtgcgagacgtagccgaggtggacactgtgcggcgggctctccggggtgccaacgtcatcgcgggtgtatggctggaggaggcggggcagaagctgagtatctacaatgccctgaagaaagacctgctgccatccgacatggccgtggccctgttggaagcccaggccggcaccgggcacatcatcgaccccgccaccagcgcccggctgaccgtggacgaggcagtgcgtgctggcctggtgggccccgagtttcatgagaagctgctatcagccgagaaggctgtgacagggtacagggacccctacacagggcagagcgtctccctgttccaggccctgaagaagggcctcattccccgggagcagggcctgcgcctgttggacgcccagctgtccacgggcggcatcgtggaccccagcaagagccaccgcgtgcccctggatgtcgcctgcgcccgaggctgcctggatgaggagaccagcagggccctgtcggcaccaagggccgacgccaaggcctacagtgaccccagcacaggggagccggccacctacggcgagctccagcagcggtgccggcccgaccagctgaccgggctgagcctgctgccgctctcagaaaaggctgctcgggcccggcaggaggagctctactcagagctgcaggcccgtgagacctttgaaaagaccccggttgaggtccccgtgggtggcttcaagggcaggacggtgacggtgtgggagctcatcagctctgagtacttcactgcggagcagcggcaggagctgttgcgtcagttccgcacgggcaaggtcaccgtggagaaggtcatcaagattctcattaccatcgtggaggaggtggagaccctgcggcaggagaggctgtccttcagcggcctccgtgcccctgtgccagccagcgagctcctggcttccggggtcctcagcagagcccagtttgagcagctcaaggacggcaagacgacggtcaaggacctttcggagctgggctccgtgcggacgctgctgcagggcagtggctgcctcgccggcatctacctggaggacaccaaggagaaggtgtccatctacgaggccatgcgccggggcctgctgagagccacaacggctgcgctcctgctggaggcgcaggcggccactggcttcctggtggaccccgtgcggaaccagcgcctgtatgtccacgaggccgtgaaggcgggcgtggtgggccccgagcttcacgagcagctgctgtctgccgagaaggccgtcaccggctacagagacccctactcgggcagcaccatctccctcttccaggccatgcagaagggcctggttctccggcagcacggcatccgcctgctggaggcccagatcgccacgggcggcatcatcgaccccgtgcacagccaccgcgtgcctgtggacgtggcctaccagcgcggctacttcagtgaggagatgaaccgcgtcctggcggaccccagcgacgacaccaagggcttctttgaccccaacacgcatgagaacctcacgtacaggcagctgctggagcggtgcgtggaggaccccgagacgggcttgcgccttctgccactgaaaggggcggagaaggctgaggtggtggagaccacgcaggtgtacactgaggaggagacaagaagggcatttgaagagacacagatcgacattcccggcggcggcagccacggcggctccaccatgtccctgtgggaggtgatgcagtcggacctgatccccgaggagcagcgggcccagctgatggctgacttccaggccggccgggtgaccaaggaacgcatgatcatcatcatcatcgagatcattgagaagacagagatcatccgccagcagggtctggcctcctacgactacgtgcgccgccgcctcacggctgaggacctgttcgaggctcggatcatctctctcgagacctacaacctgctccgggagggcaccaggagcctccgtgaggctctcgaggcggagtccgcctggtgctacctctatggcacgggctccgtggctggtgtctacctgcccggttccaggcagacactgagcatctaccaggctctcaagaaagggctgctgagtgccgaggtggcccgcctgctgctggaggcacaggcagccacaggcttcctgctggacccggtgaagggggagcggctgactgtggatgaggctgtgcggaagggcctcgtggggcccgagctgcacgaccgcctgctctcggctgagcgggcggtcaccggctaccgtgacccctacaccgagcagaccatctcgctcttccaggccatgaagaaggagctgatccctactgaggaggccctgcggctgctggatgcccagctggccaccggcggcatcgtggacccccgcctgggcttccaccttcccctggaggtggcttaccagcgtggctacctcaacaaggacacgcacgaccagctgtcagagcccagcgaggtgcgcagctacgtggacccgtccaccgacgagcgcctcagctacacgcagctgctcaggcggtgccgtcgtgacgacggcaccggccagctgctcctgccactgtcggacgcccgcaagctgaccttccgtggcctgcggaagcagatcaccatggaggagctggtgcgctcgcaggtcatggacgaggccacggcgctgcagctgcgggagggcctgacctccatcgaggaggtcaccaagaacttgcagaagttcctggaaggcaccagctgcatcgctggtgtcttcgtggacgccaccaaggaacggctctcggtgtaccaggccatgaagaagggcatcatccgccccggcacagcctttgagctcctggaggcgcaggcggccaccggttacgtcatcgaccccatcaagggactgaagctgacggtggaggaggctgtgcgtatgggcattgtgggccccgagttcaaggacaagctgctgtcggccgagcgcgccgtcactgggtacaaggacccctactctgggaagctcatctccctcttccaggccatgaagaagggcctgatcctgaaggaccatggcatccgcctgctggaggcccagatcgccacgggcggcatcatcgaccctgaggagagccaccggctgcccgtggaggtggcctacaagcgcggcctcttcgatgaggagatgaacgagatcctgaccgacccctcggacgacaccaagggcttctttgaccctaacacggaggagaacctcacctacctgcagctgatggagcgttgtatcactgacccccagacgggcctgtgtctcttgccgctgaaggagaagaagcgggagcggaagacgtcctccaagtcctccgtgcgcaagcgccgagtggtcatcgtggaccccgagacgggcaaggagatgtcagtgtacgaggcctaccgcaagggcctgattgaccaccagacgtacctggagctgtccgagcaggagtgcgagtgggaggagatcaccatctcctcctcggacggcgtggtcaagtccatgatcatcgaccgccgctccgggcgccagtacgacatcgatgatgccatcgccaagaacctcatcgaccgctcggcactggaccagtaccgcgccggcacgctctccatcaccgagttcgccgacatgctctcgggcaacgccggtggtttccgctcccgttcctcctcggtgggatcctcctcctcctaccccatcagccccgccgtctccaggacccagctggcctcctggtcagaccccactgaggagacgggccccgtggctggcatcctggacacggagacgctggagaaggtgtccatcaccgaggccatgcaccggaacctggtggataacatcacggggcagcggctgctggaggcgcaggcctgcaccgggggcatcatcgaccccagcaccggtgagcgcttccctgtcaccgacgccgtcaacaagggcctggtggacaagatcatggtggaccgcatcaacctggcccagaaggccttctgcggcttcgaggacccacgcaccaagaccaagatgtcggccgcccaggccctgaagaagggctggctctactacgaggccggccagcgcttcctggaggtgcagtacctgaccggcggcttgatcgagcccgacacgccgggccgcgtgcccctggacgaggccctgcagcgcggcacggtggacgcccgcaccgcacagaagctgcgtgacgtgggcgcctactccaagtacctcacctgccctaagaccaagctcaagatctcctataaggacgcgctggaccgcagcatggtggaggagggcacggggctgcggctgctggaggctgccgcgcagtccaccaagggctactacagcccctacagcgtcagcggctccggctctaccgctggctcccgcaccggctcgcgcaccggctcccgggccggctcccgccgcggcagctttgacgccaccggctccggcttctccatgaccttctcttcatcctcctactcctcctcgggctacggccgccgctacgcctcggggtcctcggcctccctggggggccctgagtctgccgtggcctgaggctgcctgcgcccaccccgctctgcatgcggcccagcccggctcccaccgaggcgcgggggccgttttcaacgcttaaaggtgtcttcctcccaagtggtgcctaaagtttaaccaaaaagaccagactaatatattaatatatatctgctgtccagacagcctgtatcttgggggacagggctggcccagccctgctggccgcctcaccccctcgggtctcctcactcccttctacctgccactcacacagccaggtgccttggagggtcccaagctgggccccagcccaccctcctgtcttcccagggtagcccgcctgccagtcctagctgcacagggcagctgggcccaaccctgtctgtagagggccctggtgtttctagcactggcctgcacggtgggccttgctggggacggggggccccagtcagcctctctcccagtctacccagagaagccccttccccatgggaagacgaggccctcgggcccagcccccacagtgctgtctgatctgtgctttccagctcaccccccacactcactcctgagacccctggcctccggcgtcagcctccagcctctgttcccctagtaagtgccttccatgtcggcctctaaccccaggccccgaggacccagacccagtggggaggcggacgttccagccggcatggctgggaactgcagacctgtcctcctggtgggtccaggggcccctccagcttgtggagccccacactggggtgccgcctgcccgtctctctcccatggagccccagccccctttgggcccagggacaccagccaggctctgtgctgaccctcctgttgcacccagccctggtctcagcagcgaccacccctgcctccaccctctgagctttgcatgttccactaaccccgggcgggtggcaggtggaggtgtcaggctgctggcgcctctgcaagggcagaacactaacctgaccgtgggcggggccttgcggtatccgcccccaataaaagcaattccaaccttattgatcagctgaagccccgcccctggccggcaagccctgccccggacctccgggctcctcccccggctgcggcgctggcctgggcagtgcggtgcggggctggactctgcctggtggtggcacagccgccctcagccccggcgcagacatggacccctcgcgagccatccagaacgagatcagctccctcaaagatgagcgggatcgtgtgcagaagaaaaccttcaccaagtgggtcaacaagcacctcatcaaggcccagaggcacatcagtgacctgtatgaagacctccgcgatggccacaacctcatctccctgctggaggtcctctcgggggacagcctgccccgggagaaggggaggatgcgtttccacaagctgcagaatgtccagattgccctggactacctccggcaccgccaggtgaagctggtgaacatcaggaatgatgacatcgctgacggcaaccccaagctgacccttggcctcatctggacaatcattctgcacttccagatctcagatatccaggtgagtgggcagtcggaggacatgacggccaaggagaagctgctgctgtggtcgcagcgaatggtggaggggtaccagggcctgcgatgcgacaacttcacctccagctggagagacggccgcctcttcaatgccatcatccaccggcacaagcccctgctcatcgacatgaacaaggtgtaccggcagaccaacctggagaacctggaccaggccttctctgtggcggagcgggacctgggagtgacgcggctcctggaccctgaggacgtggatgtccctcagcccgacgagaagtccatcatcacctacgtctcgtcgctgtatgacgccatgccccgcgtgccggacgtgcaggatggggtgagggccaacgagctgcagctgcgctggcaggagtaccgggagctggtgctgctgctgcttcagtggatgcgacaccacacggccgcctttgaggaacgcaggttcccctccagcttcgaggagattgagatcctgtggtctcagttcctgaagtttaaggagatggagctaccagccaaggaggccgacaagaacaggtccaagggcatctaccaatccctggagggagcggtgcaagcaggccagctcaaggtgccccctggctaccacccgctggatgtggagaaggagtggggcaagctgcacgtggccatcctggagcgggagaagcagctccgcagcgagtttgagaggctggagtgtcttcagcgcatcgtgaccaagctgcagatggaggcggggctgtgtgaggagcagctgaaccaggccgacgccctgctgcagtcggatgtccggctgctggctgcaggcaaagtgccacagcgggcgggggaggtggaacgggacttggacaaggcggatagcatgatccggctgctcttcaacgacgtgcagaccctcaaggatggacggcacccgcagggcgagcagatgtaccgcagggtgtaccgtctgcacgagcgcctggtagccatccgcaccgagtacaacctacggctgaaggcaggcgtggcggcccctgcaacccaggtggcccaggtgactctgcagagtgtgcagaggcgccccgagctggaggactccactctgcgctacctgcaggacctgctggcctgggtggaggagaaccagcaccgtgtggatggcgctgagtggggtgtggacctgcccagcgtggaggcgcagctgggcagccaccgaggcctgcaccagtccatcgaagaattccgggccaagatcgagcgggcacggagtgacgagggccagctctcccccgccacccggggtgcctaccgtgactgcctgggtcggctggacctgcagtacgccaagctgctgaactcctccaaggcccgcct

SEQ ID NO: 671 - DNA, 32765 bp, Homo sapiens
  misc_feature (222)..(222): second gene starts at position 222
atggcagaagtagagcagaagaagaagcggaccttccgcaagttcacctaccgcggcgtggacctcgaccagctgctggacatgtcctacgagcagctgatgcagctgtacagtgcgcgccagcggcggcggctgaaccggggcctgcggcggaagcagcactccctgctgaagcgcctgcgcaaggccaagaaggaggcgccgcccatggagaagccggagaccttctcttcatcctcctactcctcctcgggctacggccgccgctacgcctcggggtcctcggcctccctggggggccctgagtctgccgtggcctgaggctgcctgcgcccaccccgctctgcatgcggcccagcccggctcccaccgaggcgcgggggccgttttcaacgcttaaaggtgtcttcctcccaagtggtgcctaaagtttaaccaaaaagaccagactaatatattaatatatatctgctgtccagacagcctgtatcttgggggacagggctggcccagccctgctggccgcctcaccccctcgggtctcctcactcccttctacctgccactcacacagccaggtgccttggagggtcccaagctgggccccagcccaccctcctgtcttcccagggtagcccgcctgccagtcctagctgcacagggcagctgggcccaaccctgtctgtagagggccctggtgtttctagcactggcctgcacggtgggccttgctggggacggggggccccagtcagcctctctcccagtctacccagagaagccccttccccatgggaagacgaggccctcgggcccagcccccacagtgctgtctgatctgtgctttccagctcaccccccacactcactcctgagacccctggcctccggcgtcagcctccagcctctgttcccctagtaagtgccttccatgtcggcctctaaccccaggccccgaggacccagacccagtggggaggcggacgttccagccggcatggctgggaactgcagacctgtcctcctggtgggtccaggggcccctccagcttgtggagccccacactggggtgccgcctgcccgtctctctcccatggagccccagccccctttgggcccagggacaccagccaggctctgtgctgaccctcctgttgcacccagccctggtctcagcagcgaccacccctgcctccaccctctgagctttgcatgttccactaaccccgggcgggtggcaggtggaggtgtcaggctgctggcgcctctgcaagggcagaacactaacctgaccgtgggcggggccttgcggtatccgcccccaataaaagcaattccaaccttgtggccggcatgtcgggggcggggggcgcctttgcctcgccgagggaggtcttgctggagcggccgtgctggctggacgggggctgcgagccggcccgcaggggctacctctaccagcagctgtgctgcgtagatgagcgggatcgtgtgcagaagaaaaccttcaccaagtgggtcaacaagcacctcatcaaggcccagaggcacatcagtgacctgtatgaagacctccgcgatggccacaacctcatctccctgctggaggtcctctcgggggacagcctgccccgggagaaggggaggatgcgtttccacaagctgcagaatgtccagattgccctggactacctccggcaccgccaggtgaagctggtgaacatcaggaatgatgacatcgctgacggcaaccccaagctgacccttggcctcatctggacaatcattctgcacttccagatctcagatatccaggtgagtgggcagtcggaggacatgacggccaaggagaagctgctgctgtggtcgcagcgaatggtggaggggtaccagggcctgcgatgcgacaacttcacctccagctggagagacggccgcctcttcaatgccatcatccaccggcacaagcccctgctcatcgacatgaacaaggtgtaccggcagaccaacctggagaacctggaccaggccttctctgtggcggagcgggacctgggagtgacgcggctcctggaccctgaggacgtggatgtccctcagcccgacgagaagtccatcatcacctacgtctcgtcgctgtatgacgccatgccccgcgtgccggacgtgcaggatggggtgagggccaacgagctgcagctgcgctggcaggagtaccgggagctggtgctgctgctgcttcagtggatgcgacaccacacggccgcctttgaggaacgcaggttcccctccagcttcgaggagattgagatcctgtggtctcagttcctgaagtttaaggagatggagctaccagccaaggaggccgacaagaacaggtccaagggcatctaccaatccctggagggagcggtgcaagcaggccagctcaaggtgccccctggctaccacccgctggatgtggagaaggagtggggcaagctgcacgtggccatcctggagcgggagaagcagctccgcagcgagtttgagaggctggagtgtcttcagcgcatcgtgaccaagctgcagatggaggcggggctgtgtgaggagcagctgaaccaggccgacgccctgctgcagtcggatgtccggctgctggctgcaggcaaagtgccacagcgggcgggggaggtggaacgggacttggacaaggcggatagcatgatccggctgctcttcaacgacgtgcagaccctcaaggatggacggcacccgcagggcgagcagatgtaccgcagggtgtaccgtctgcacgagcgcctggtagccatccgcaccgagtacaacctacggctgaaggcaggcgtggcggcccctgcaacccaggtggcccaggtgactctgcagagtgtgcagaggcgccccgagctggaggactccactctgcgctacctgcaggacctgctggcctgggtggaggagaaccagcaccgtgtggatggcgctgagtggggtgtggacctgcccagcgtggaggcgcagctgggcagccaccgaggcctgcaccagtccatcgaagaattccgggccaagatcgagcgggcacggagtgacgagggccagctctcccccgccacccggggtgcctaccgtgactgcctgggtcggctggacctgcagtacgccaagctgctgaactcctccaaggcccgcctcaggtccctggagagcttgcacagctttgtggcagccgccactaaggagctaatgtggctgaatgagaaggaggaggaggaggtgggcttcgactggagcgaccgcaacaccaacatgaccgccaagaaggagagctactcggcgctgatgcgggagctggagctgaaggagaagaagatcaaggagctccaaaatgctggggaccggctgctgcgggaggaccacccggcccggcccacggtggagtccttccaggcggccctgcagacgcagtggagctggatgctacagctgtgctgctgtatcgaggcacacctgaaggagaacgctgcctactttcagttcttctcagatgtgcgggaggccgaggggcagttgcagaagctgcaggaggcactgcgtaggaaatacagttgtgatcgctccgccaccgtcacccggctggaggacctgctgcaggatgcccaggacgagaaggaacagctgaacgagtacaagggccacctctcaggcctggccaagcgggccaaggccgtcgtgcagctgaagccccgccacccagcccaccccatgcggggccgcctgcccctgctggccgtgtgcgactataagcaggtggaggtgactgtgcacaagggtgacgagtgccagctggtgggccctgcacagccgtcccactggaaggtgctcagcagctccggcagcgaggccgccgtgccctccgtgtgcttcctggtgcccccgcccaaccaggaggcccaggaggccgtcaccaggctggaggcccagcaccaggccctggtcacgctgtggcaccagttgcacgtggacatgaagagccttctggcctggcagagccttcgccgcgacgtgcagctcatccgctcctggtccctggccacgttccgcaccctgaagccagaggagcagcgccaagccctgcacagcctggagctgcactaccaggccttcctgcgggacagccaggacgcgggcggcttcggacccgaggaccggctgatggctgagcgcgagtacggctcctgcagccaccactaccagcagctgctgcagagcctggaacagggtgcacaggaagagtctcgctgccagcgctgcatctccgagctcaaagacatccggctgcagctggaggcctgtgagacgcgcaccgtgcaccgcctgcggctgccgctggacaaagagccggcacgggagtgtgcccagcgcatcgccgagcagcagaaggcacaggcagaggtggaggggctgggcaagggggtcgcccggctctctgccgaggccgagaaggtcttggccctaccagagccatcgcctgcggcccccacgctgcgctcggagctggagctgacgctgggcaagctggagcaggtccgcagcctgtctgccatctacctggagaagctcaagaccatcagcctggtgatccgcggcacgcagggggccgaggaggtgctcagggcccacgaggagcagctcaaggaggcccaggccgtgccggccaccctcccggagctcgaggccaccaaggcctctctgaagaagctgcgggcccaggccgaggcacagcagcccacgttcgacgccctgcgggatgagctgcggggggcacaggaggtgggggagcgactgcagcagcggcacggggagcgggacgtggaggtggagcgctggcgggagcgggtcgcccagttgcttgagcgctggcaggctgtgctggcccagaccgacgtgcggcagcgcgagctcgagcaactgggccgccagctgcgttactaccgcgagagtgcagaccccttgggcgcctggctgcaggacgccaggcggcggcaggagcagatccaggccatgccgctggccgacagccaggctgtgcgggagcagctgcggcaggagcaggccctgctggaggagatcgagcgccacggcgagaaggtcgaggagtgccagaggtttgcgaaacagtacatcaacgccatcaaggactatgaactccagctggtgacgtacaaggcgcagcttgagccggtggcctccccggccaagaagcccaaggtccagtcgggatcagagagtgtcatccaggagtacgtggacctgcgtacgcactacagcgagctgaccacactgacgagccagtacatcaagttcatcagcgagactctgcggcgcatggaggaggaggagaggctggctgagcagcagcgggcagaggagcgcgagcggctggccgaggtggaggccgcgctggagaagcagcggcagctggccgaggcgcacgcccaggcaaaggcacaggcggagcgggaggcgaaggagctgcagcagcgcatgcaggaggaggtggtgcggcgggaggaggcggcggtggacgcgcagcagcagaagcgcagcattcaggaggagctgcagcagctgcggcagagctcggaggcggagatccaggccaaggcccggcaggcagaggcggctgagcgcagccggctgcgcatcgaggaggagatccgcgtggtgcgcctgcagttggaggccaccgagcgccagcgtggcggggctgagggggagctgcaggcactgcgtgcacgggcggaggaggctgaggcacaaaagcgacaggcgcaggaggaggccgagcgcttgcggaggcaggtgcaggacgagagccagcgtaagcggcaggcggaggtggagctggcctcgcgcgtgaaggccgaggccgaggcggcgcgcgagaagcagcgggccctgcaggccctggaggagctgcggctgcaggcggaggaggcggagcggcgcctgcggcaggccgaggtggagcgagcgcggcaggtacaggtggccctggagacggcgcagcgcagtgcagaggcggagctgcagagcaaacgcgcctccttcgccgagaagacggcacagctggagcgctccctgcaggaggaacacgtggctgtggcacagctgcgggaggaggctgagcggcgggcacagcagcaggccgaggccgagcgggcgcgcgaggaggcagagcgggagctggagcgctggcagctcaaggccaacgaggcgctacggctgcggctgcaggcggaggaggtggcgcagcagaagagcctggcgcaggccgaggctgagaagcagaaggaggaggcggagcgcgaggcgcggcggcgcggcaaggcggaggagcaggccgtccggcagcgggagctggctgaacaagagctggagaagcagcggcagctggcggaaggcaccgcgcagcagcgcctggccgcggagcaggagttgatccggctgcgggccgagacggagcagggggagcagcagcggcagctgctggaggaggagctggcccggctgcagcgtgaggcggctgcagccacgcagaaacggcaggagctggaagccgagctggccaaggtgcgggccgagatggaggtgctgctggccagcaaggcgagggctgaggaggagtcgcgctccaccagcgagaagtccaagcagaggctggaggccgaggccggccggttccgcgagctggccgaggaggccgcccgcctgcgtgccctggcggaagaggccaagcggcagcggcagctggccgaggaagacgcggcgcggcagcgggccgaggcggagcgggtgcttgcggagaagctggccgccatcggcgaggccacgcggctcaagacggaggcggagatcgcgctcaaggagaaggaggcggagaacgagcgcctgcggcggctggcggaggacgaggccttccagcggcggcggctggaggagcaggccgcgcaacacaaggctgacatcgaggagcgcctggcccagctgcgcaaggcatcggacagcgagctggagcggcagaaggggctggtggaggacacgctgaggcagcggcggcaggtggaggaggagatcctggcgctgaaggcgagcttcgagaaggcggccgctggcaaggcggagctggagctggagctgggacgcatccgcagcaacgcggaggacacgctgcgcagcaaggagcaggccgagctggaggctgcgaggcagcggcagctggcggcggaggaggagcggcggcgccgtgaggctgaggagcgcgtgcagaagagcctggcggccgaggaggaggccgcacggcagcggaaggcggcgctggaggaagtcgagcggctgaaagccaaggtggaggaggcgcggcgcctgcgggagcgagcggagcaggagtcggcgcggcagctgcagctggcccaggaggccgcccagaagcggctgcaggcggaagagaaggcacacgccttcgcggtgcagcagaaggagcaggagctacagcagacgctgcagcaggagcagagcgtgctggaccagctgcgcggcgaggcggaggcggcccggcgggcggctgaggaggcggaggaggcccgggtgcaggcggagcgtgaggcggcgcagtcccggcggcaggtggaagaggccgagcggctgaagcagtcggcagaggagcaggcacaggcccgggctcaggcacaggcggctgcagagaagctgcgcaaggaggccgagcaagaggcggcgcggcgggcacaggcggagcaggcggccctgcggcagaagcaggcagctgacgcggagatggagaagcataagaaattcgccgagcagacgctgcggcagaaggcgcaggtggagcaggagctgacaacactgcggctgcagctggaggagaccgaccaccagaagaacctgctggacgaggagctgcagcggctgaaggcggaggccacggaggccgcacgccagcgcagccaggtggaggaggagctcttctcggtgcgcgtgcagatggaggagctgagcaagctcaaggcacgcatcgaggctgagaaccgcgcactcatcttgcgtgacaaggacaatacgcagcgcttcctgcaggaggaggctgagaagatgaagcaggtggcggaggaggccgcgcggctgagtgtggcggcccaagaggctgcgcgactgcggcagctggcagaggaggacctggcacagcagcgggccttggcagagaagatgctcaaggagaagatgcaggcggtgcaggaggccacgcgactcaaggctgaggcggaactgctgcagcagcagaaggagcttgcgcaggagcaggcgcggcggctgcaggaggacaaggagcagatggcgcagcagctggcggaggagacgcagggcttccagcggacgctggaggccgagcggcagcggcagctggagatgagcgctgaggctgagcgcctcaagctgcgtgtggccgagatgagccgagcccaggcccgcgctgaggaggacgcccagcgcttccggaagcaggcggaggagatcggtgagaagctgcaccgcacggagctcgccacccaggagaaggtgaccctggtgcagacactggagatccagcgacagcagagtgaccatgatgccgagcgcctgcgggaggccatcgctgagctggagcgtgagaaggagaagctccaacaggaggccaaactgctgcagctcaagtctgaggagatgcagacggtgcagcaggagcagctgctgcaggagacgcaggccctgcagcaaagcttcctctctgaaaaggacagcctgctacagcgggagcgcttcatcgagcaggagaaggccaagctggagcagctcttccaggacgaggtggccaaggcacagcagctgcgtgaggagcagcagcggcagcagcagcagatggagcaggaacggcagcggctggtggccagcatggaggaggcgcggcggcggcagcatgaggccgaggagggcgtgcggcgcaagcaggaggagctgcagcagctggagcagcagcggcggcagcaggaggagctgctggctgaggagaaccagaggctgcgtgagcagctgcagctcctggaggagcagcaccgggccgcgctggcgcactcagaggaggtcactgcctcgcaggtggctgccacaaagaccctgcccaatggccgggatgcacttgatggccccgcggcagaggcagagccggagcacagcttcgatggcctgcggcggaaggtgtcagctcagaggctgcaggaggccggcatcctgagtgcggaggagctgcagcggttggcgcagggccacaccacggtggacgagctcgcacggcgggaagacgtgcgccactacctgcagggccgcagcagtatcgcagggctgttgctgaaggccaccaatgagaagctgagtgtttacgccgccctgcagaggcagctgctgagtcccggcacggccctcatcctgctggaggcgcaggcggcctcaggcttcctgctggaccctgtgcggaaccggcggctgaccgtcaacgaggctgtgaaggagggtgtggtgggccccgagctgcaccacaagctgctgtcggccgagcgcgccgtcactggctacaaggacccctacactggccagcagatctctctcttccaagccatgcagaagggcctcatcgtccgggagcacggcatccgcctgctggaggcccagatcgccacgggcggcgttatcgaccccgtgcacagccaccgcgtgcccgtggacgtggcctaccggcgcggctacttcgacgaggagatgaaccgcgtcctggcggaccccagcgacgacaccaagggcttctttgaccccaacacgcacgagaacctcacgtacctgcagctactggagcgctgcgtggaggaccccgagacgggcctgtgccttctgccactcacggataaggctgccaagggcggggagctggtctacactgactccgaggcccgggacgtctttgagaaggccaccgtgtctgcgccgttcggcaagttccagggcaagacggtgaccatttgggagatcatcaactcggaatacttcacggcagagcagcggcgggacctgctgcggcagttccgcacgggccggatcacagtggagaagatcatcaagatcatcatcacggtggtggaggagcaggagcagaagggccggctttgctttgagggcctgcgcagcctggtgccagccgccgagctgctggagagcagggtcatcgaccgcgagctctaccagcagctgcagcgaggtgagcgctctgtgcgagacgtagccgaggtggacactgtgcggcgggctctccggggtgccaacgtcatcgcgggtgtatggctggaggaggcggggcagaagctgagtatctacaatgccctgaagaaagacctgctgccatccgacatggccgtggccctgttggaagcccaggccggcaccgggcacatcatcgaccccgccaccagcgcccggctgaccgtggacgaggcagtgcgtgctggcctggtgggccccgagtttcatgagaagctgctatcagccgagaaggctgtgacagggtacagggacccctacacagggcagagcgtctccctgttccaggccctgaagaagggcctcattccccgggagcagggcctgcgcctgttggacgcccagctgtccacgggcggcatcgtggaccccagcaagagccaccgcgtgcccctggatgtcgcctgcgcccgaggctgcctggatgaggagaccagcagggccctgtcggcaccaagggccgacgccaaggcctacagtgaccccagcacaggggagccggccacctacggcgagctccagcagcggtgccggcccgaccagctgaccgggctgagcctgctgccgctctcagaaaaggctgctcgggcccggcaggaggagctctactcagagctgcaggcccgtgagacctttgaaaagaccccggttgaggtccccgtgggtggcttcaagggcaggacggtgacggtgtgggagctcatcagctctgagtacttcactgcggagcagcggcaggagctgttgcgtcagttccgcacgggcaaggtcaccgtggagaaggtcatcaagattctcattaccatcgtggaggaggtggagaccctgcggcaggagaggctgtccttcagcggcctccgtgcccctgtgccagccagcgagctcctggcttccggggtcctcagcagagcccagtttgagcagctcaaggacggcaagacgacggtcaaggacctttcggagctgggctccgtgcggacgctgctgcagggcagtggctgcctcgccggcatctacctggaggacaccaaggagaaggtgtccatctacgaggccatgcgccggggcctgctgagagccacaacggctgcgctcctgctggaggcgcaggcggccactggcttcctggtggaccccgtgcggaaccagcgcctgtatgtccacgaggccgtgaaggcgggcgtggtgggccccgagcttcacgagcagctgctgtctgccgagaaggccgtcaccggctacagagacccctactcgggcagcaccatctccctcttccaggccatgcagaagggcctggttctccggcagcacggcatccgcctgctggaggcccagatcgccacgggcggcatcatcgaccccgtgcacagccaccgcgtgcctgtggacgtggcctaccagcgcggctacttcagtgaggagatgaaccgcgtcctggcggaccccagcgacgacaccaagggcttctttgaccccaacacgcatgagaacctcacgtacaggcagctgctggagcggtgcgtggaggaccccgagacgggcttgcgccttctgccactgaaaggggcggagaaggctgaggtggtggagaccacgcaggtgtacactgaggaggagacaagaagggcatttgaagagacacagatcgacattcccggcggcggcagccacggcggctccaccatgtccctgtgggaggtgatgcagtcggacctgatccccgaggagcagcgggcccagctgatggctgacttccaggccggccgggtgaccaaggaacgcatgatcatcatcatcatcgagatcattgagaagacagagatcatccgccagcagggtctggcctcctacgactacgtgcgccgccgcctcacggctgaggacctgttcgaggctcggatcatctctctcgagacctacaacctgctccgggagggcaccaggagcctccgtgaggctctcgaggcggagtccgcctggtgctacctctatggcacgggctccgtggctggtgtctacctgcccggttccaggcagacactgagcatctaccaggctctcaagaaagggctgctgagtgccgaggtggcccgcctgctgctggaggcacaggcagccacaggcttcctgctggacccggtgaagggggagcggctgactgtggatgaggctgtgcggaagggcctcgtggggcccgagctgcacgaccgcctgctctcggctgagcgggcggtcaccggctaccgtgacccctacaccgagcagaccatctcgctcttccaggccatgaagaaggagctgatccctactgaggaggccctgcggctgctggatgcccagctggccaccggcggcatcgtggacccccgcctgggcttccaccttcccctggaggtggcttaccagcgtggctacctcaacaaggacacgcacgaccagctgtcagagcccagcgaggtgcgcagctacgtggacccgtccaccgacgagcgcctcagctacacgcagctgctcaggcggtgccgtcgtgacgacggcaccggccagctgctcctgccactgtcggacgcccgcaagctgaccttccgtggcctgcggaagcagatcaccatggaggagctggtgcgctcgcaggtcatggacgaggccacggcgctgcagctgcgggagggcctgacctccatcgaggaggtcaccaagaacttgcagaagttcctggaaggcaccagctgcatcgctggtgtcttcgtggacgccaccaaggaacggctctcggtgtaccaggccatgaagaagggcatcatccgccccggcacagcctttgagctcctggaggcgcaggcggccaccggttacgtcatcgaccccatcaagggactgaagctgacggtggaggaggctgtgcgtatgggcattgtgggccccgagttcaaggacaagctgctgtcggccgagcgcgccgtcactgggtacaaggacccctactctgggaagctcatctccctcttccaggccatgaagaagggcctgatcctgaaggaccatggcatccgcctgctggaggcccagatcgccacgggcggcatcatcgaccctgaggagagccaccggctgcccgtggaggtggcctacaagcgcggcctcttcgatgaggagatgaacgagatcctgaccgacccctcggacgacaccaagggcttctttgaccctaacacggaggagaacctcacctacctgcagctgatggagcgttgtatcactgacccccagacgggcctgtgtctcttgccgctgaaggagaagaagcgggagcggaagacgtcctccaagtcctccgtgcgcaagcgccgagtggtcatcgtggaccccgagacgggcaaggagatgtcagtgtacgaggcctaccgcaagggcctgattgaccaccagacgtacctggagctgtccgagcaggagtgcgagtgggaggagatcaccatctcctcctcggacggcgtggtcaagtccatgatcatcgaccgccgctccgggcgccagtacgacatcgatgatgccatcgccaagaacctcatcgaccgctcggcactggaccagtaccgcgccggcacgctctccatcaccgagttcgccgacatgctctcgggcaacgccggtggtttccgctcccgttcctcctcggtgggatcctcctcctcctaccccatcagccccgccgtctccaggacccagctggcctcctggtcagaccccactgaggagacgggccccgtggctggcatcctggacacggagacgctggagaaggtgtccatcaccgaggccatgcaccggaacctggtggataacatcacggggcagcggctgctggaggcgcaggcctgcaccgggggcatcatcgaccccagcaccggtgagcgcttccctgtcaccgacgccgtcaacaagggcctggtggacaagatcatggtggaccgcatcaacctggcccagaaggccttctgcggcttcgaggacccacgcaccaagaccaagatgtcggccgcccaggccctgaagaagggctggctctactacgaggccggccagcgcttcctggaggtgcagtacctgaccggcggcttgatcgagcccgacacgccgggccgcgtgcccctggacgaggccctgcagcgcggcacggtggacgcccgcaccgcacagaagctgcgtgacgtgggcgcctactccaagtacctcacctgccctaagaccaagctcaagatctcctataaggacgcgctggaccgcagcatggtggaggagggcacggggctgcggctgctggaggctgccgcgcagtccaccaagggctactacagcccctacagcgtcagcggctccggctctaccgctggctcccgcaccggctcgcgcaccggctcccgggccggctcccgccgcggcagctttgacgccaccggctccggcttctccatgaccttctcttcatcctcctactcctcctcgggctacggccgccgctacgcctcggggtcctcggcctccctggggggccctgagtctgccgtggcctgaggctgcctgcgcccaccccgctctgcatgcggcccagcccggctcccaccgaggcgcgggggccgttttcaacgcttaaaggtgtcttcctcccaagtggtgcctaaagtttaaccaaaaagaccagactaatatattaatatatatctgctgtccagacagcctgtatcttgggggacagggctggcccagccctgctggccgcctcaccccctcgggtctcctcactcccttctacctgccactcacacagccaggtgccttggagggtcccaagctgggccccagcccaccctcctgtcttcccagggtagcccgcctgccagtcctagctgcacagggcagctgggcccaaccctgtctgtagagggccctggtgtttctagcactggcctgcacggtgggccttgctggggacggggggccccagtcagcctctctcccagtctacccagagaagccccttccccatgggaagacgaggccctcgggcccagcccccacagtgctgtctgatctgtgctttccagctcaccccccacactcactcctgagacccctggcctccggcgtcagcctccagcctctgttcccctagtaagtgccttccatgtcggcctctaaccccaggccccgaggacccagacccagtggggaggcggacgttccagccggcatggctgggaactgcagacctgtcctcctggtgggtccaggggcccctccagcttgtggagccccacactggggtgccgcctgcccgtctctctcccatggagccccagccccctttgggcccagggacaccagccaggctctgtgctgaccctcctgttgcacccagccctggtctcagcagcgaccacccctgcctccaccctctgagctttgcatgttccactaaccccgggcgggtggcaggtggaggtgtcaggctgctggcgcctctgcaagggcagaacactaacctgaccgtgggcggggccttgcggtatccgcccccaataaaagcaattccaaccttgtggccggcatgtcgggggcggggggcgcctttgcctcgccgagggaggtcttgctggagcggccgtgctggctggacgggggctgcgagccggcccgcaggggctacctctaccagcagctgtgctgcgtagatgagcgggatcgtgtgcagaagaaaaccttcaccaagtgggtcaacaagcacctcatcaaggcccagaggcacatcagtgacctgtatgaagacctccgcgatggccacaacctcatctccctgctggaggtcctctcgggggacagcctgccccgggagaaggggaggatgcgtttccacaagctgcagaatgtccagattgccctggactacctccggcaccgccaggtgaagctggtgaacatcaggaatgatgacatcgctgacggcaaccccaagctgacccttggcctcatctggacaatcattctgcacttccagatctcagatatccaggtgagtgggcagtcggaggacatgacggccaaggagaagctgctgctgtggtcgcagcgaatggtggaggggtaccagggcctgcgatgcgacaacttcacctccagctggagagacggccgcctcttcaatgccatcatccaccggcacaagcccctgctcatcgacatgaacaaggtgtaccggcagaccaacctggagaacctggaccaggccttctctgtggcggagcgggacctgggagtgacgcggctcctggaccctgaggacgtggatgtccctcagcccgacgagaagtccatcatcacctacgtctcgtcgctgtatgacgccatgccccgcgtgccggacgtgcaggatggggtgagggccaacgagctgcagctgcgctggcaggagtaccgggagctggtgctgctgctgcttcagtggatgcgacaccacacggccgcctttgaggaacgcaggttcccctccagcttcgaggagattgagatcctgtggtctcagttcctgaagtttaaggagatggagctaccagccaaggaggccgacaagaacaggtccaagggcatctaccaatccctggagggagcggtgcaagcaggccagctcaaggtgccccctggctaccacccgctggatgtggagaaggagtggggcaagctgcacgtggccatcctggagcgggagaagcagctccgcagcgagtttgagaggctggagtgtcttcagcgcatcgtgaccaagctgcagatggaggcggggctgtgtgaggagcagctgaaccaggccgacgccctgctgcagtcggatgtccggctgctggctgcaggcaaagtgccacagcgggcgggggaggtggaacgggacttggacaaggcggatagcatgatccggctgctcttcaacgacgtgcagaccctcaaggatggacggcacccgcagggcgagcagatgtaccgcagggtgtaccgtctgcacgagcgcctggtagccatccgcaccgagtacaacctacggctgaaggcaggcgtggcggcccctgcaacccaggtggcccaggtgactctgcagagtgtgcagaggcgccccgagctggaggactccactctgcgctacctgcaggacctgctggcctgggtggaggagaaccagcaccgtgtggatggcgctgagtggggtgtggacctgcccagcgtggaggcgcagctgggcagccaccgaggcctgcaccagtccatcgaagaattccgggccaagatcgagcgggcacggagtgacgagggccagctctcccccgccacccggggtgcctaccgtgactgcctgggtcggctggacctgcagtacgccaagctgctgaactcctccaaggcccgcctcaggtccctggagagcttgcacagctttgtggcagccgccactaaggagctaatgtggctgaatgagaaggaggaggaggaggtgggcttcgactggagcgaccgcaacaccaacatgaccgccaagaaggagagctactcggcgctgatgcgggagctggagctgaaggagaagaagatcaaggagctccaaaatgctggggaccggctgctgcgggaggaccacccggcccggcccacggtggagtccttccaggcggccctgcagacgcagtggagctggatgctacagctgtgctgctgtatcgaggcacacctgaaggagaacgctgcctactttcagttcttctcagatgtgcgggaggccgaggggcagttgcagaagctgcaggaggcactgcgtaggaaatacagttgtgatcgctccgccaccgtcacccggctggaggacctgctgcaggatgcccaggacgagaaggaacagctgaacgagtacaagggccacctctcaggcctggccaagcgggccaaggccgtcgtgcagctgaagccccgccacccagcccaccccatgcggggccgcctgcccctgctggccgtgtgcgactataagcaggtggaggtgactgtgcacaagggtgacgagtgccagctggtgggccctgcacagccgtcccactggaaggtgctcagcagctccggcagcgaggccgccgtgccctccgtgtgcttcctggtgcccccgcccaaccaggaggcccaggaggccgtcaccaggctggaggcccagcaccaggccctggtcacgctgtggcaccagttgcacgtggacatgaagagccttctggcctggcagagccttcgccgcgacgtgcagctcatccgctcctggtccctggccacgttccgcaccctgaagccagaggagcagcgccaagccctgcacagcctggagctgcactaccaggccttcctgcgggacagccaggacgcgggcggcttcggacccgaggaccggctgatggctgagcgcgagtacggctcctgcagccaccactaccagcagctgctgcagagcctggaacagggtgcacaggaagagtctcgctgccagcgctgcatctccgagctcaaagacatccggctgcagctggaggcctgtgagacgcgcaccgtgcaccgcctgcggctgccgctggacaaagagccggcacgggagtgtgcccagcgcatcgccgagcagcagaaggcacaggcagaggtggaggggctgggcaagggggtcgcccggctctctgccgaggccgagaaggtcttggccctaccagagccatcgcctgcggcccccacgctgcgctcggagctggagctgacgctgggcaagctggagcaggtccgcagcctgtctgccatctacctggagaagctcaagaccatcagcctggtgatccgcggcacgcagggggccgaggaggtgctcagggcccacgaggagcagctcaaggaggcccaggccgtgccggccaccctcccggagctcgaggccaccaaggcctctctgaagaagctgcgggcccaggccgaggcacagcagcccacgttcgacgccctgcgggatgagctgcggggggcacaggaggtgggggagcgactgcagcagcggcacggggagcgggacgtggaggtggagcgctggcgggagcgggtcgcccagttgcttgagcgctggcaggctgtgctggcccagaccgacgtgcggcagcgcgagctcgagcaactgggccgccagctgcgttactaccgcgagagtgcagaccccttgggcgcctggctgcaggacgccaggcggcggcaggagcagatccaggccatgccgctggccgacagccaggctgtgcgggagcagctgcggcaggagcaggccctgctggaggagatcgagcgccacggcgagaaggtcgaggagtgccagaggtttgcgaaacagtacatcaacgccatcaaggactatgaactccagctggtgacgtacaaggcgcagcttgagccggtggcctccccggccaagaagcccaaggtccagtcgggatcagagagtgtcatccaggagtacgtggacctgcgtacgcactacagcgagctgaccacactgacgagccagtacatcaagttcatcagcgagactctgcggcgcatggaggaggaggagaggctggctgagcagcagcgggcagaggagcgcgagcggctggccgaggtggaggccgcgctggagaagcagcggcagctggccgaggcgcacgcccaggcaaaggcacaggcggagcgggaggcgaaggagctgcagcagcgcatgcaggaggaggtggtgcggcgggaggaggcggcggtggacgcgcagcagcagaagcgcagcattcaggaggagctgcagcagctgcggcagagctcggaggcggagatccaggccaaggcccggcaggcagaggcggctgagcgcagccggctgcgcatcgaggaggagatccgcgtggtgcgcctgcagttggaggccaccgagcgccagcgtggcggggctgagggggagctgcaggcactgcgtgcacgggcggaggaggctgaggcacaaaagcgacaggcgcaggaggaggccgagcgcttgcggaggcaggtgcaggacgagagccagcgtaagcggcaggcggaggtggagctggcctcgcgcgtgaaggccgaggccgaggcggcgcgcgagaagcagcgggccctgcaggccctggaggagctgcggctgcaggcggaggaggcggagcggcgcctgcggcaggccgaggtggagcgagcgcggcaggtacaggtggccctggagacggcgcagcgcagtgcagaggcggagctgcagagcaaacgcgcctccttcgccgagaagacggcacagctggagcgctccctgcaggaggaacacgtggctgtggcacagctgcgggaggaggctgagcggcgggcacagcagcaggccgaggccgagcgggcgcgcgaggaggcagagcgggagctggagcgctggcagctcaaggccaacgaggcgctacggctgcggctgcaggcggaggaggtggcgcagcagaagagcctggcgcaggccgaggctgagaagcagaaggaggaggcggagcgcgaggcgcggcggcgcggcaaggcggaggagcaggccgtccggcagcgggagctggctgaacaagagctggagaagcagcggcagctggcggaaggcaccgcgcagcagcgcctggccgcggagcaggagttgatccggctgcgggccgagacggagcagggggagcagcagcggcagctgctggaggaggagctggcccggctgcagcgtgaggcggctgcagccacgcagaaacggcaggagctggaagccgagctggccaaggtgcgggccgagatggaggtgctgctggccagcaaggcgagggctgaggaggagtcgcgctccaccagcgagaagtccaagcagaggctggaggccgaggccggccggttccgcgagctggccgaggaggccgcccgcctgcgtgccctggcggaagaggccaagcggcagcggcagctggccgaggaagacgcggcgcggcagcgggccgaggcggagcgggtgcttgcggagaagctggccgccatcggcgaggccacgcggctcaagacggaggcggagatcgcgctcaaggagaaggaggcggagaacgagcgcctgcggcggctggcggaggacgaggccttccagcggcggcggctggaggagcaggccgcgcaacacaaggctgacatcgaggagcgcctggcccagctgcgcaaggcatcggacagcgagctggagcggcagaaggggctggtggaggacacgctgaggcagcggcggcaggtggaggaggagatcctggcgctgaaggcgagcttcgagaaggcggccgctggcaaggcggagctggagctggagctgggacgcatccgcagcaacgcggaggacacgctgcgcagcaaggagcaggccgagctggaggctgcgaggcagcggcagctggcggcggaggaggagcggcggcgccgtgaggctgaggagcgcgtgcagaagagcctggcggccgaggaggaggccgcacggcagcggaaggcggcgctggaggaagtcgagcggctgaaagccaaggtggaggaggcgcggcgcctgcgggagcgagcggagcaggagtcggcgcggcagctgcagctggcccaggaggccgcccagaagcggctgcaggcggaagagaaggcacacgccttcgcggtgcagcagaaggagcaggagctacagcagacgctgcagcaggagcagagcgtgctggaccagctgcgcggcgaggcggaggcggcccggcgggcggctgaggaggcggaggaggcccgggtgcaggcggagcgtgaggcggcgcagtcccggcggcaggtggaagaggccgagcggctgaagcagtcggcagaggagcaggcacaggcccgggctcaggcacaggcggctgcagagaagctgcgcaaggaggccgagcaagaggcggcgcggcgggcacaggcggagcaggcggccctgcggcagaagcaggcagctgacgcggagatggagaagcataagaaattcgccgagcagacgctgcggcagaaggcgcaggtggagcaggagctgacaacactgcggctgcagctggaggagaccgaccaccagaagaacctgctggacgaggagctgcagcggctgaaggcggaggccacggaggccgcacgccagcgcagccaggtggaggaggagctcttctcggtgcgcgtgcagatggaggagctgagcaagctcaaggcacgcatcgaggctgagaaccgcgcactcatcttgcgtgacaaggacaatacgcagcgcttcctgcaggaggaggctgagaagatgaagcaggtggcggaggaggccgcgcggctgagtgtggcggcccaagaggctgcgcgactgcggcagctggcagaggaggacctggcacagcagcgggccttggcagagaagatgctcaaggagaagatgcaggcggtgcaggaggccacgcgactcaaggctgaggcggaactgctgcagcagcagaaggagcttgcgcaggagcaggcgcggcggctgcaggaggacaaggagcagatggcgcagcagctggcggaggagacgcagggcttccagcggacgctggaggccgagcggcagcggcagctggagatgagcgctgaggctgagcgcctcaagctgcgtgtggccgagatgagccgagcccaggcccgcgctgaggaggacgcccagcgcttccggaagcaggcggaggagatcggtgagaagctgcaccgcacggagctcgccacccaggagaaggtgaccctggtgcagacactggagatccagcgacagcagagtgaccatgatgccgagcgcctgcgggaggccatcgctgagctggagcgtgagaaggagaagctccaacaggaggccaaactgctgcagctcaagtctgaggagatgcagacggtgcagcaggagcagctgctgcaggagacgcaggccctgcagcaaagcttcctctctgaaaaggacagcctgctacagcgggagcgcttcatcgagcaggagaaggccaagctggagcagctcttccaggacgaggtggccaaggcacagcagctgcgtgaggagcagcagcggcagcagcagcagatggagcaggaacggcagcggctggtggccagcatggaggaggcgcggcggcggcagcatgaggccgaggagggcgtgcggcgcaagcaggaggagctgcagcagctggagcagcagcggcggcagcaggaggagctgctggctgaggagaaccagaggctgcgtgagcagctgcagctcctggaggagcagcaccgggccgcgctggcgcactcagaggaggtcactgcctcgcaggtggctgccacaaagaccctgcccaatggccgggatgcacttgatggccccgcggcagaggcagagccggagcacagcttcgatggcctgcggcggaaggtgtcagctcagaggctgcaggaggccggcatcctgagtgcggaggagctgcagcggttggcgcagggccacaccacggtggacgagctcgcacggcgggaagacgtgcgccactacctgcagggccgcagcagtatcgcagggctgttgctgaaggccaccaatgagaagctgagtgtttacgccgccctgcagaggcagctgctgagtcccggcacggccctcatcctgctggaggcgcaggcggcctcaggcttcctgctggaccctgtgcggaaccggcggctgaccgtcaacgaggctgtgaaggagggtgtggtgggccccgagctgcaccacaagctgctgtcggccgagcgcgccgtcactggctacaaggacccctacactggccagcagatctctctcttccaagccatgcagaagggcctcatcgtccgggagcacggcatccgcctgctggaggcccagatcgccacgggcggcgttatcgaccccgtgcacagccaccgcgtgcccgtggacgtggcctaccggcgcggctacttcgacgaggagatgaaccgcgtcctggcggaccccagcgacgacaccaagggcttctttgaccccaacacgcacgagaacctcacgtacctgcagctactggagcgctgcgtggaggaccccgagacgggcctgtgccttctgccactcacggataaggctgccaagggcggggagctggtctacactgactccgaggcccgggacgtctttgagaaggccaccgtgtctgcgccgttcggcaagttccagggcaagacggtgaccatttgggagatcatcaactcggaatacttcacggcagagcagcggcgggacctgctgcggcagttccgcacgggccggatcacagtggagaagatcatcaagatcatcatcacggtggtggaggagcaggagcagaagggccggctttgctttgagggcctgcgcagcctggtgccagccgccgagctgctggagagcagggtcatcgaccgcgagctctaccagcagctgcagcgaggtgagcgctctgtgcgagacgtagccgaggtggacactgtgcggcgggctctccggggtgccaacgtcatcgcgggtgtatggctggaggaggcggggcagaagctgagtatctacaatgccctgaagaaagacctgctgccatccgacatggccgtggccctgttggaagcccaggccggcaccgggcacatcatcgaccccgccaccagcgcccggctgaccgtggacgaggcagtgcgtgctggcctggtgggccccgagtttcatgagaagctgctatcagccgagaaggctgtgacagggtacagggacccctacacagggcagagcgtctccctgttccaggccctgaagaagggcctcattccccgggagcagggcctgcgcctgttggacgcccagctgtccacgggcggcatcgtggaccccagcaagagccaccgcgtgcccctggatgtcgcctgcgcccgaggctgcctggatgaggagaccagcagggccctgtcggcaccaagggccgacgccaaggcctacagtgaccccagcacaggggagccggccacctacggcgagctccagcagcggtgccggcccgaccagctgaccgggctgagcctgctgccgctctcagaaaaggctgctcgggcccggcaggaggagctctactcagagctgcaggcccgtgagacctttgaaaagaccccggttgaggtccccgtgggtggcttcaagggcaggacggtgacggtgtgggagctcatcagctctgagtacttcactgcggagcagcggcaggagctgttgcgtcagttccgcacgggcaaggtcaccgtggagaaggtcatcaagattctcattaccatcgtggaggaggtggagaccctgcggcaggagaggctgtccttcagcggcctccgtgcccctgtgccagccagcgagctcctggcttccggggtcctcagcagagcccagtttgagcagctcaaggacggcaagacgacggtcaaggacctttcggagctgggctccgtgcggacgctgctgcagggcagtggctgcctcgccggcatctacctggaggacaccaaggagaaggtgtccatctacgaggccatgcgccggggcctgctgagagccacaacggctgcgctcctgctggaggcgcaggcggccactggcttcctggtggaccccgtgcggaaccagcgcctgtatgtccacgaggccgtgaaggcgggcgtggtgggccccgagcttcacgagcagctgctgtctgccgagaaggccgtcaccggctacagagacccctactcgggcagcaccatctccctcttccaggccatgcagaagggcctggttctccggcagcacggcatccgcctgctggaggcccagatcgccacgggcggcatcatcgaccccgtgcacagccaccgcgtgcctgtggacgtggcctaccagcgcggctacttcagtgaggagatgaaccgcgtcctggcggaccccagcgacgacaccaagggcttctttgaccccaacacgcatgagaacctcacgtacaggcagctgctggagcggtgcgtggaggaccccgagacgggcttgcgccttctgccactgaaaggggcggagaaggctgaggtggtggagaccacgcaggtgtacactgaggaggagacaagaagggcatttgaagagacacagatcgacattcccggcggcggcagccacggcggctccaccatgtccctgtgggaggtgatgcagtcggacctgatccccgaggagcagcgggcccagctgatggctgacttccaggccggccgggtgaccaaggaacgcatgatcatcatcatcatcgagatcattgagaagacagagatcatccgccagcagggtctggcctcctacgactacgtgcgccgccgcctcacggctgaggacctgttcgaggctcggatcatctctctcgagacctacaacctgctccgggagggcaccaggagcctccgtgaggctctcgaggcggagtccgcctggtgctacctctatggcacgggctccgtggctggtgtctacctgcccggttccaggcagacactgagcatctaccaggctctcaagaaagggctgctgagtgccgaggtggcccgcctgctgctggaggcacaggcagccacaggcttcctgctggacccggtgaagggggagcggctgactgtggatgaggctgtgcggaagggcctcgtggggcccgagctgcacgaccgcctgctctcggctgagcgggcggtcaccggctaccgtgacccctacaccgagcagaccatctcgctcttccaggccatgaagaaggagctgatccctactgaggaggccctgcggctgctggatgcccagctggccaccggcggcatcgtggacccccgcctgggcttccaccttcccctggaggtggcttaccagcgtggctacctcaacaaggacacgcacgaccagctgtcagagcccagcgaggtgcgcagctacgtggacccgtccaccgacgagcgcctcagctacacgcagctgctcaggcggtgccgtcgtgacgacggcaccggccagctgctcctgccactgtcggacgcccgcaagctgaccttccgtggcctgcggaagcagatcaccatggaggagctggtgcgctcgcaggtcatggacgaggccacggcgctgcagctgcgggagggcctgacctccatcgaggaggtcaccaagaacttgcagaagttcctggaaggcaccagctgcatcgctggtgtcttcgtggacgccaccaaggaacggctctcggtgtaccaggccatgaagaagggcatcatccgccccggcacagcctttgagctcctggaggcgcaggcggccaccggttacgtcatcgaccccatcaagggactgaagctgacggtggaggaggctgtgcgtatgggcattgtgggccccgagttcaaggacaagctgctgtcggccgagcgcgccgtcactgggtacaaggacccctactctgggaagctcatctccctcttccaggccatgaagaagggcctgatcctgaaggaccatggcatccgcctgctggaggcccagatcgccacgggcggcatcatcgaccctgaggagagccaccggctgcccgtggaggtggcctacaagcgcggcctcttcgatgaggagatgaacgagatcctgaccgacccctcggacgacaccaagggcttctttgaccctaacacggaggagaacctcacctacctgcagctgatggagcgttgtatcactgacccccagacgggcctgtgtctcttgccgctgaaggagaagaagcgggagcggaagacgtcctccaagtcctccgtgcgcaagcgccgagtggtcatcgtggaccccgagacgggcaaggagatgtcagtgtacgaggcctaccgcaagggcctgattgaccaccagacgtacctggagctgtccgagcaggagtgcgagtgggaggagatcaccatctcctcctcggacggcgtggtcaagtccatgatcatcgaccgccgctccgggcgccagtacgacatcgatgatgccatcgccaagaacctcatcgaccgctcggcactggaccagtaccgcgccggcacgctctccatcaccgagttcgccgacatgctctcgggcaacgccggtggtttccgctcccgttcctcctcggtgggatcctcctcctcctaccccatcagccccgccgtctccaggacccagctggcctcctggtcagaccccactgaggagacgggccccgtggctggcatcctggacacggagacgctggagaaggtgtccatcaccgaggccatgcaccggaacctggtggataacatcacggggcagcggctgctggaggcgcaggcctgcaccgggggcatcatcgaccccagcaccggtgagcgcttccctgtcaccgacgccgtcaacaagggcctggtggacaagatcatggtggaccgcatcaacctggcccagaaggccttctgcggcttcgaggacccacgcaccaagaccaagatgtcggccgcccaggccctgaagaagggctggctctactacgaggccggccagcgcttcctggaggtgcagtacctgaccggcggcttgatcgagcccgacacgccgggccgcgtgcccctggacgaggccctgcagcgcggcacggtggacgcccgcaccgcacagaagctgcgtgacgtgggcgcctactccaagtacctcacctgccctaagaccaagctcaagatctcctataaggacgcgctggaccgcagcatggtggaggagggcacggggctgcggctgctggaggctgccgcgcagtccaccaagggctactacagcccctacagcgtcagcggctccggctctaccgctggctcccgcaccggctcgcgcaccggctcccgggccggctcccgccgcggcagctttgacgccaccggctccggcttctccatgaccttctcttcatcctcctactcctcctcgggctacggccgccgctacgcctcggggtcctcggcctccctggggggccctgagtctgccgtggcctgaggctgcctgcgcccaccccgctctgcatgcggcccagcccggctcccaccgaggcgcgggggccgttttcaacgcttaaaggtgtcttcctcccaagtggtgcctaaagtttaaccaaaaagaccagactaatatattaatatatatctgctgtccagacagcctgtatcttgggggacagggctggcccagccctgctggccgcctcaccccctcgggtctcctcactcccttctacctgccactcacacagccaggtgccttggagggtcccaagctgggccccagcccaccctcctgtcttcccagggtagcccgcctgccagtcctagctgcacagggcagctgggcccaaccctgtctgtagagggccctggtgtttctagcactggcctgcacggtgggccttgctggggacggggggccccagtcagcctctctcccagtctacccagagaagccccttccccatgggaagacgaggccctcgggcccagcccccacagtgctgtctgatctgtgctttccagctcaccccccacactcactcctgagacccctggcctccggcgtcagcctccagcctctgttcccctagtaagtgccttccatgtcggcctctaaccccaggccccgaggacccagacccagtggggaggcggacgttccagccggcatggctgggaactgcagacctgtcctcctggtgggtccaggggcccctccagcttgtggagccccacactggggtgccgcctgcccgtctctctcccatggagccccagccccctttgggcccagggacaccagccaggctctgtgctgaccctcctgttgcacccagccctggtctcagcagcgaccacccctgcctccaccctctgagctttgcatgttccactaaccccgggcgggtggcaggtggaggtgtcaggctgctggcgcctctgcaagggcagaacactaacctgaccgtgggcggggccttgcggtatccgcccccaataaaagcaattccaaccttgtggccggcatgtcgggggcggggggcgcctttgcctcgccgagggaggtcttgctggagcggccgtgctggctggacgggggctgcgagccggcccgcaggggctacctctaccagcagctgtgctgcgtagatgagcgggatcgtgtgcagaagaaaaccttcaccaagtgggtcaacaagcacctcatcaaggcccagaggcacatcagtgacctgtatgaagacctccgcgatggccacaacctcatctccctgctggaggtcctctcgggggacagcctgccccgggagaaggggaggatgcgtttccacaagctgcagaatgtccagattgccctggactacctccggcaccgccaggtgaagctggtgaacatcaggaatgatgacatcgctgacggcaaccccaagctgacccttggcctcatctggacaatcattctgcacttccagatctcagatatccaggtgagtgggcagtcggaggacatgacggccaaggagaagctgctgctgtggtcgcagcgaatggtggaggggtaccagggcctgcgatgcgacaacttcacctccagctggagagacggccgcctcttcaatgccatcatccaccggcacaagcccctgctcatcgacatgaacaaggtgtaccggcagaccaacctggagaacctggaccaggccttctctgtggcggagcgggacctgggagtgacgcggctcctggaccctgaggacgtggatgtccctcagcccgacgagaagtccatcatcacctacgtctcgtcgctgtatgacgccatgccccgcgtgccggacgtgcaggatggggtgagggccaacgagctgcagctgcgctggcaggagtaccgggagctggtgctgctgctgcttcagtggatgcgacaccacacggccgcctttgaggaacgcaggttcccctccagcttcgaggagattgagatcctgtggtctcagttcctgaagtttaaggagatggagctaccagccaaggaggccgacaagaacaggtccaagggcatctaccaatccctggagggagcggtgcaagcaggccagctcaaggtgccccctggctaccacccgctggatgtggagaaggagtggggcaagctgcacgtggccatcctggagcgggagaagcagctccgcagcgagtttgagaggctggagtgtcttcagcgcatcgtgaccaagctgcagatggaggcggggctgtgtgaggagcagctgaaccaggccgacgccctgctgcagtcggatgtccggctgctggctgcaggcaaagtgccacagcgggcgggggaggtggaacgggacttggacaaggcggatagcatgatccggctgctcttcaacgacgtgcagaccctcaaggatggacggcacccgcagggcgagcagatgtaccgcagggtgtaccgtctgcacgagcgcctggtagccatccgcaccgagtacaacctacggctgaaggcaggcgtggcggcccctgcaacccaggtggcccaggtgactctgcagagtgtgcagaggcgccccgagctggaggactccactctgcgctacctgcaggacctgctggcctgggtggaggagaaccagcaccgtgtggatggcgctgagtggggtgtggacctgcccagcgtggaggcgcagctgggcagccaccgaggcctgcaccagtccatcgaagaattccgggccaagatcgagcgggcacggagtgacgagggccagctctcccccgccacccggggtgcctaccgtgactgcctgggtcggctggacctgcagtacgccaagctgctgaactcctccaaggcccgcctcaggtccctggagagcttgcacagctttgtggcagccgccactaaggagctaatgtggctgaatgagaaggaggaggaggaggtgggcttcgactggagcgaccgcaacaccaacatgaccgccaagaaggagagctactcggcgctgatgcgggagctggagctgaaggagaagaagatcaagga

SEQ ID NO: 672 - DNA, 32765 bp, Homo sapiens
  misc_feature (222)..(222): second gene starts at position 222
atggcagaagtagagcagaagaagaagcggaccttccgcaagttcacctaccgcggcgtggacctcgaccagctgctggacatgtcctacgagcagctgatgcagctgtacagtgcgcgccagcggcggcggctgaaccggggcctgcggcggaagcagcactccctgctgaagcgcctgcgcaaggccaagaaggaggcgccgcccatggagaagccggagaccttctcttcatcctcctactcctcctcgggctacggccgccgctacgcctcggggtcctcggcctccctggggggccctgagtctgccgtggcctgaggctgcctgcgcccaccccgctctgcatgcggcccagcccggctcccaccgaggcgcgggggccgttttcaacgcttaaaggtgtcttcctcccaagtggtgcctaaagtttaaccaaaaagaccagactaatatattaatatatatctgctgtccagacagcctgtatcttgggggacagggctggcccagccctgctggccgcctcaccccctcgggtctcctcactcccttctacctgccactcacacagccaggtgccttggagggtcccaagctgggccccagcccaccctcctgtcttcccagggtagcccgcctgccagtcctagctgcacagggcagctgggcccaaccctgtctgtagagggccctggtgtttctagcactggcctgcacggtgggccttgctggggacggggggccccagtcagcctctctcccagtctacccagagaagccccttccccatgggaagacgaggccctcgggcccagcccccacagtgctgtctgatctgtgctttccagctcaccccccacactcactcctgagacccctggcctccggcgtcagcctccagcctctgttcccctagtaagtgccttccatgtcggcctctaaccccaggccccgaggacccagacccagtggggaggcggacgttccagccggcatggctgggaactgcagacctgtcctcctggtgggtccaggggcccctccagcttgtggagccccacactggggtgccgcctgcccgtctctctcccatggagccccagccccctttgggcccagggacaccagccaggctctgtgctgaccctcctgttgcacccagccctggtctcagcagcgaccacccctgcctccaccctctgagctttgcatgttccactaaccccgggcgggtggcaggtggaggtgtcaggctgctggcgcctctgcaagggcagaacactaacctgaccgtgggcggggccttgcggtatccgcccccaataaaagcaattccaacctttgagctgagcctgtgccgagtgagcgtctcgtggggccgccagccttcagctgcctgtgtgccacacggggctgcccagagcaccgtgcctgaggccgagggtccgggcgacgaaggtgtgggggcagcatgtctcagcaccagctccgcgtgccgcagcccgagggcctgggccgaaagagaaccagctcggaggacaacctgtacctggctgtgctcagggcctctgagggcaagaaagatgagcgggatcgtgtgcagaagaaaaccttcaccaagtgggtcaacaagcacctcatcaaggcccagaggcacatcagtgacctgtatgaagacctccgcgatggccacaacctcatctccctgctggaggtcctctcgggggacagcctgccccgggagaaggggaggatgcgtttccacaagctgcagaatgtccagattgccctggactacctccggcaccgccaggtgaagctggtgaacatcaggaatgatgacatcgctgacggcaaccccaagctgacccttggcctcatctggacaatcattctgcacttccagatctcagatatccaggtgagtgggcagtcggaggacatgacggccaaggagaagctgctgctgtggtcgcagcgaatggtggaggggtaccagggcctgcgatgcgacaacttcacctccagctggagagacggccgcctcttcaatgccatcatccaccggcacaagcccctgctcatcgacatgaacaaggtgtaccggcagaccaacctggagaacctggaccaggccttctctgtggcggagcgggacctgggagtgacgcggctcctggaccctgaggacgtggatgtccctcagcccgacgagaagtccatcatcacctacgtctcgtcgctgtatgacgccatgccccgcgtgccggacgtgcaggatggggtgagggccaacgagctgcagctgcgctggcaggagtaccgggagctggtgctgctgctgcttcagtggatgcgacaccacacggccgcctttgaggaacgcaggttcccctccagcttcgaggagattgagatcctgtggtctcagttcctgaagtttaaggagatggagctaccagccaaggaggccgacaagaacaggtccaagggcatctaccaatccctggagggagcggtgcaagcaggccagctcaaggtgccccctggctaccacccgctggatgtggagaaggagtggggcaagctgcacgtggccatcctggagcgggagaagcagctccgcagcgagtttgagaggctggagtgtcttcagcgcatcgtgaccaagctgcagatggaggcggggctgtgtgaggagcagctgaaccaggccgacgccctgctgcagtcggatgtccggctgctggctgcaggcaaagtgccacagcgggcgggggaggtggaacgggacttggacaaggcggatagcatgatccggctgctcttcaacgacgtgcagaccctcaaggatggacggcacccgcagggcgagcagatgtaccgcagggtgtaccgtctgcacgagcgcctggtagccatccgcaccgagtacaacctacggctgaaggcaggcgtggcggcccctgcaacccaggtggcccaggtgactctgcagagtgtgcagaggcgccccgagctggaggactccactctgcgctacctgcaggacctgctggcctgggtggaggagaaccagcaccgtgtggatggcgctgagtggggtgtggacctgcccagcgtggaggcgcagctgggcagccaccgaggcctgcaccagtccatcgaagaattccgggccaagatcgagcgggcacggagtgacgagggccagctctcccccgccacccggggtgcctaccgtgactgcctgggtcggctggacctgcagtacgccaagctgctgaactcctccaaggcccgcctcaggtccctggagagcttgcacagctttgtggcagccgccactaaggagctaatgtggctgaatgagaaggaggaggaggaggtgggcttcgactggagcgaccgcaacaccaacatgaccgccaagaaggagagctactcggcgctgatgcgggagctggagctgaaggagaagaagatcaaggagctccaaaatgctggggaccggctgctgcgggaggaccacccggcccggcccacggtggagtccttccaggcggccctgcagacgcagtggagctggatgctacagctgtgctgctgtatcgaggcacacctgaaggagaacgctgcctactttcagttcttctcagatgtgcgggaggccgaggggcagttgcagaagctgcaggaggcactgcgtaggaaatacagttgtgatcgctccgccaccgtcacccggctggaggacctgctgcaggatgcccaggacgagaaggaacagctgaacgagtacaagggccacctctcaggcctggccaagcgggccaaggccgtcgtgcagctgaagccccgccacccagcccaccccatgcggggccgcctgcccctgctggccgtgtgcgactataagcaggtggaggtgactgtgcacaagggtgacgagtgccagctggtgggccctgcacagccgtcccactggaaggtgctcagcagctccggcagcgaggccgccgtgccctccgtgtgcttcctggtgcccccgcccaaccaggaggcccaggaggccgtcaccaggctggaggcccagcaccaggccctggtcacgctgtggcaccagttgcacgtggacatgaagagccttctggcctggcagagccttcgccgcgacgtgcagctcatccgctcctggtccctggccacgttccgcaccctgaagccagaggagcagcgccaagccctgcacagcctggagctgcactaccaggccttcctgcgggacagccaggacgcgggcggcttcggacccgaggaccggctgatggctgagcgcgagtacggctcctgcagccaccactaccagcagctgctgcagagcctggaacagggtgcacaggaagagtctcgctgccagcgctgcatctccgagctcaaagacatccggctgcagctggaggcctgtgagacgcgcaccgtgcaccgcctgcggctgccgctggacaaagagccggcacgggagtgtgcccagcgcatcgccgagcagcagaaggcacaggcagaggtggaggggctgggcaagggggtcgcccggctctctgccgaggccgagaaggtcttggccctaccagagccatcgcctgcggcccccacgctgcgctcggagctggagctgacgctgggcaagctggagcaggtccgcagcctgtctgccatctacctggagaagctcaagaccatcagcctggtgatccgcggcacgcagggggccgaggaggtgctcagggcccacgaggagcagctcaaggaggcccaggccgtgccggccaccctcccggagctcgaggccaccaaggcctctctgaagaagctgcgggcccaggccgaggcacagcagcccacgttcgacgccctgcgggatgagctgcggggggcacaggaggtgggggagcgactgcagcagcggcacggggagcgggacgtggaggtggagcgctggcgggagcgggtcgcccagttgcttgagcgctggcaggctgtgctggcccagaccgacgtgcggcagcgcgagctcgagcaactgggccgccagctgcgttactaccgcgagagtgcagaccccttgggcgcctggctgcaggacgccaggcggcggcaggagcagatccaggccatgccgctggccgacagccaggctgtgcgggagcagctgcggcaggagcaggccctgctggaggagatcgagcgccacggcgagaaggtcgaggagtgccagaggtttgcgaaacagtacatcaacgccatcaaggactatgaactccagctggtgacgtacaaggcgcagcttgagccggtggcctccccggccaagaagcccaaggtccagtcgggatcagagagtgtcatccaggagtacgtggacctgcgtacgcactacagcgagctgaccacactgacgagccagtacatcaagttcatcagcgagactctgcggcgcatggaggaggaggagaggctggctgagcagcagcgggcagaggagcgcgagcggctggccgaggtggaggccgcgctggagaagcagcggcagctggccgaggcgcacgcccaggcaaaggcacaggcggagcgggaggcgaaggagctgcagcagcgcatgcaggaggaggtggtgcggcgggaggaggcggcggtggacgcgcagcagcagaagcgcagcattcaggaggagctgcagcagctgcggcagagctcggaggcggagatccaggccaaggcccggcaggcagaggcggctgagcgcagccggctgcgcatcgaggaggagatccgcgtggtgcgcctgcagttggaggccaccgagcgccagcgtggcggggctgagggggagctgcaggcactgcgtgcacgggcggaggaggctgaggcacaaaagcgacaggcgcaggaggaggccgagcgcttgcggaggcaggtgcaggacgagagccagcgtaagcggcaggcggaggtggagctggcctcgcgcgtgaaggccgaggccgaggcggcgcgcgagaagcagcgggccctgcaggccctggaggagctgcggctgcaggcggaggaggcggagcggcgcctgcggcaggccgaggtggagcgagcgcggcaggtacaggtggccctggagacggcgcagcgcagtgcagaggcggagctgcagagcaaacgcgcctccttcgccgagaagacggcacagctggagcgctccctgcaggaggaacacgtggctgtggcacagctgcgggaggaggctgagcggcgggcacagcagcaggccgaggccgagcgggcgcgcgaggaggcagagcgggagctggagcgctggcagctcaaggccaacgaggcgctacggctgcggctgcaggcggaggaggtggcgcagcagaagagcctggcgcaggccgaggctgagaagcagaaggaggaggcggagcgcgaggcgcggcggcgcggcaaggcggaggagcaggccgtccggcagcgggagctggctgaacaagagctggagaagcagcggcagctggcggaaggcaccgcgcagcagcgcctggccgcggagcaggagttgatccggctgcgggccgagacggagcagggggagcagcagcggcagctgctggaggaggagctggcccggctgcagcgtgaggcggctgcagccacgcagaaacggcaggagctggaagccgagctggccaaggtgcgggccgagatggaggtgctgctggccagcaaggcgagggctgaggaggagtcgcgctccaccagcgagaagtccaagcagaggctggaggccgaggccggccggttccgcgagctggccgaggaggccgcccgcctgcgtgccctggcggaagaggccaagcggcagcggcagctggccgaggaagacgcggcgcggcagcgggccgaggcggagcgggtgcttgcggagaagctggccgccatcggcgaggccacgcggctcaagacggaggcggagatcgcgctcaaggagaaggaggcggagaacgagcgcctgcggcggctggcggaggacgaggccttccagcggcggcggctggaggagcaggccgcgcaacacaaggctgacatcgaggagcgcctggcccagctgcgcaaggcatcggacagcgagctggagcggcagaaggggctggtggaggacacgctgaggcagcggcggcaggtggaggaggagatcctggcgctgaaggcgagcttcgagaaggcggccgctggcaaggcggagctggagctggagctgggacgcatccgcagcaacgcggaggacacgctgcgcagcaaggagcaggccgagctggaggctgcgaggcagcggcagctggcggcggaggaggagcggcggcgccgtgaggctgaggagcgcgtgcagaagagcctggcggccgaggaggaggccgcacggcagcggaaggcggcgctggaggaagtcgagcggctgaaagccaaggtggaggaggcgcggcgcctgcgggagcgagcggagcaggagtcggcgcggcagctgcagctggcccaggaggccgcccagaagcggctgcaggcggaagagaaggcacacgccttcgcggtgcagcagaaggagcaggagctacagcagacgctgcagcaggagcagagcgtgctggaccagctgcgcggcgaggcggaggcggcccggcgggcggctgaggaggcggaggaggcccgggtgcaggcggagcgtgaggcggcgcagtcccggcggcaggtggaagaggccgagcggctgaagcagtcggcagaggagcaggcacaggcccgggctcaggcacaggcggctgcagagaagctgcgcaaggaggccgagcaagaggcggcgcggcgggcacaggcggagcaggcggccctgcggcagaagcaggcagctgacgcggagatggagaagcataagaaattcgccgagcagacgctgcggcagaaggcgcaggtggagcaggagctgacaacactgcggctgcagctggaggagaccgaccaccagaagaacctgctggacgaggagctgcagcggctgaaggcggaggccacggaggccgcacgccagcgcagccaggtggaggaggagctcttctcggtgcgcgtgcagatggaggagctgagcaagctcaaggcacgcatcgaggctgagaaccgcgcactcatcttgcgtgacaaggacaatacgcagcgcttcctgcaggaggaggctgagaagatgaagcaggtggcggaggaggccgcgcggctgagtgtggcggcccaagaggctgcgcgactgcggcagctggcagaggaggacctggcacagcagcgggccttggcagagaagatgctcaaggagaagatgcaggcggtgcaggaggccacgcgactcaaggctgaggcggaactgctgcagcagcagaaggagcttgcgcaggagcaggcgcggcggctgcaggaggacaaggagcagatggcgcagcagctggcggaggagacgcagggcttccagcggacgctggaggccgagcggcagcggcagctggagatgagcgctgaggctgagcgcctcaagctgcgtgtggccgagatgagccgagcccaggcccgcgctgaggaggacgcccagcgcttccggaagcaggcggaggagatcggtgagaagctgcaccgcacggagctcgccacccaggagaaggtgaccctggtgcagacactggagatccagcgacagcagagtgaccatgatgccgagcgcctgcgggaggccatcgctgagctggagcgtgagaaggagaagctccaacaggaggccaaactgctgcagctcaagtctgaggagatgcagacggtgcagcaggagcagctgctgcaggagacgcaggccctgcagcaaagcttcctctctgaaaaggacagcctgctacagcgggagcgcttcatcgagcaggagaaggccaagctggagcagctcttccaggacgaggtggccaaggcacagcagctgcgtgaggagcagcagcggcagcagcagcagatggagcaggaacggcagcggctggtggccagcatggaggaggcgcggcggcggcagcatgaggccgaggagggcgtgcggcgcaagcaggaggagctgcagcagctggagcagcagcggcggcagcaggaggagctgctggctgaggagaaccagaggctgcgtgagcagctgcagctcctggaggagcagcaccgggccgcgctggcgcactcagaggaggtcactgcctcgcaggtggctgccacaaagaccctgcccaatggccgggatgcacttgatggccccgcggcagaggcagagccggagcacagcttcgatggcctgcggcggaaggtgtcagctcagaggctgcaggaggccggcatcctgagtgcggaggagctgcagcggttggcgcagggccacaccacggtggacgagctcgcacggcgggaagacgtgcgccactacctgcagggccgcagcagtatcgcagggctgttgctgaaggccaccaatgagaagctgagtgtttacgccgccctgcagaggcagctgctgagtcccggcacggccctcatcctgctggaggcgcaggcggcctcaggcttcctgctggaccctgtgcggaaccggcggctgaccgtcaacgaggctgtgaaggagggtgtggtgggccccgagctgcaccacaagctgctgtcggccgagcgcgccgtcactggctacaaggacccctacactggccagcagatctctctcttccaagccatgcagaagggcctcatcgtccgggagcacggcatccgcctgctggaggcccagatcgccacgggcggcgttatcgaccccgtgcacagccaccgcgtgcccgtggacgtggcctaccggcgcggctacttcgacgaggagatgaaccgcgtcctggcggaccccagcgacgacaccaagggcttctttgaccccaacacgcacgagaacctcacgtacctgcagctactggagcgctgcgtggaggaccccgagacgggcctgtgccttctgccactcacggataaggctgccaagggcggggagctggtctacactgactccgaggcccgggacgtctttgagaaggccaccgtgtctgcgccgttcggcaagttccagggcaagacggtgaccatttgggagatcatcaactcggaatacttcacggcagagcagcggcgggacctgctgcggcagttccgcacgggccggatcacagtggagaagatcatcaagatcatcatcacggtggtggaggagcaggagcagaagggccggctttgctttgagggcctgcgcagcctggtgccagccgccgagctgctggagagcagggtcatcgaccgcgagctctaccagcagctgcagcgaggtgagcgctctgtgcgagacgtagccgaggtggacactgtgcggcgggctctccggggtgccaacgtcatcgcgggtgtatggctggaggaggcggggcagaagctgagtatctacaatgccctgaagaaagacctgctgccatccgacatggccgtggccctgttggaagcccaggccggcaccgggcacatcatcgaccccgccaccagcgcccggctgaccgtggacgaggcagtgcgtgctggcctggtgggccccgagtttcatgagaagctgctatcagccgagaaggctgtgacagggtacagggacccctacacagggcagagcgtctccctgttccaggccctgaagaagggcctcattccccgggagcagggcctgcgcctgttggacgcccagctgtccacgggcggcatcgtggaccccagcaagagccaccgcgtgcccctggatgtcgcctgcgcccgaggctgcctggatgaggagaccagcagggccctgtcggcaccaagggccgacgccaaggcctacagtgaccccagcacaggggagccggccacctacggcgagctccagcagcggtgccggcccgaccagctgaccgggctgagcctgctgccgctctcagaaaaggctgctcgggcccggcaggaggagctctactcagagctgcaggcccgtgagacctttgaaaagaccccggttgaggtccccgtgggtggcttcaagggcaggacggtgacggtgtgggagctcatcagctctgagtacttcactgcggagcagcggcaggagctgttgcgtcagttccgcacgggcaaggtcaccgtggagaaggtcatcaagattctcattaccatcgtggaggaggtggagaccctgcggcaggagaggctgtccttcagcggcctccgtgcccctgtgccagccagcgagctcctggcttccggggtcctcagcagagcccagtttgagcagctcaaggacggcaagacgacggtcaaggacctttcggagctgggctccgtgcggacgctgctgcagggcagtggctgcctcgccggcatctacctggaggacaccaaggagaaggtgtccatctacgaggccatgcgccggggcctgctgagagccacaacggctgcgctcctgctggaggcgcaggcggccactggcttcctggtggaccccgtgcggaaccagcgcctgtatgtccacgaggccgtgaaggcgggcgtggtgggccccgagcttcacgagcagctgctgtctgccgagaaggccgtcaccggctacagagacccctactcgggcagcaccatctccctcttccaggccatgcagaagggcctggttctccggcagcacggcatccgcctgctggaggcccagatcgccacgggcggcatcatcgaccccgtgcacagccaccgcgtgcctgtggacgtggcctaccagcgcggctacttcagtgaggagatgaaccgcgtcctggcggaccccagcgacgacaccaagggcttctttgaccccaacacgcatgagaacctcacgtacaggcagctgctggagcggtgcgtggaggaccccgagacgggcttgcgccttctgccactgaaaggggcggagaaggctgaggtggtggagaccacgcaggtgtacactgaggaggagacaagaagggcatttgaagagacacagatcgacattcccggcggcggcagccacggcggctccaccatgtccctgtgggaggtgatgcagtcggacctgatccccgaggagcagcgggcccagctgatggctgacttccaggccggccgggtgaccaaggaacgcatgatcatcatcatcatcgagatcattgagaagacagagatcatccgccagcagggtctggcctcctacgactacgtgcgccgccgcctcacggctgaggacctgttcgaggctcggatcatctctctcgagacctacaacctgctccgggagggcaccaggagcctccgtgaggctctcgaggcggagtccgcctggtgctacctctatggcacgggctccgtggctggtgtctacctgcccggttccaggcagacactgagcatctaccaggctctcaagaaagggctgctgagtgccgaggtggcccgcctgctgctggaggcacaggcagccacaggcttcctgctggacccggtgaagggggagcggctgactgtggatgaggctgtgcggaagggcctcgtggggcccgagctgcacgaccgcctgctctcggctgagcgggcggtcaccggctaccgtgacccctacaccgagcagaccatctcgctcttccaggccatgaagaaggagctgatccctactgaggaggccctgcggctgctggatgcccagctggccaccggcggcatcgtggacccccgcctgggcttccaccttcccctggaggtggcttaccagcgtggctacctcaacaaggacacgcacgaccagctgtcagagcccagcgaggtgcgcagctacgtggacccgtccaccgacgagcgcctcagctacacgcagctgctcaggcggtgccgtcgtgacgacggcaccggccagctgctcctgccactgtcggacgcccgcaagctgaccttccgtggcctgcggaagcagatcaccatggaggagctggtgcgctcgcaggtcatggacgaggccacggcgctgcagctgcgggagggcctgacctccatcgaggaggtcaccaagaacttgcagaagttcctggaaggcaccagctgcatcgctggtgtcttcgtggacgccaccaaggaacggctctcggtgtaccaggccatgaagaagggcatcatccgccccggcacagcctttgagctcctggaggcgcaggcggccaccggttacgtcatcgaccccatcaagggactgaagctgacggtggaggaggctgtgcgtatgggcattgtgggccccgagttcaaggacaagctgctgtcggccgagcgcgccgtcactgggtacaaggacccctactctgggaagctcatctccctcttccaggccatgaagaagggcctgatcctgaaggaccatggcatccgcctgctggaggcccagatcgccacgggcggcatcatcgaccctgaggagagccaccggctgcccgtggaggtggcctacaagcgcggcctcttcgatgaggagatgaacgagatcctgaccgacccctcggacgacaccaagggcttctttgaccctaacacggaggagaacctcacctacctgcagctgatggagcgttgtatcactgacccccagacgggcctgtgtctcttgccgctgaaggagaagaagcgggagcggaagacgtcctccaagtcctccgtgcgcaagcgccgagtggtcatcgtggaccccgagacgggcaaggagatgtcagtgtacgaggcctaccgcaagggcctgattgaccaccagacgtacctggagctgtccgagcaggagtgcgagtgggaggagatcaccatctcctcctcggacggcgtggtcaagtccatgatcatcgaccgccgctccgggcgccagtacgacatcgatgatgccatcgccaagaacctcatcgaccgctcggcactggaccagtaccgcgccggcacgctctccatcaccgagttcgccgacatgctctcgggcaacgccggtggtttccgctcccgttcctcctcggtgggatcctcctcctcctaccccatcagccccgccgtctccaggacccagctggcctcctggtcagaccccactgaggagacgggccccgtggctggcatcctggacacggagacgctggagaaggtgtccatcaccgaggccatgcaccggaacctggtggataacatcacggggcagcggctgctggaggcgcaggcctgcaccgggggcatcatcgaccccagcaccggtgagcgcttccctgtcaccgacgccgtcaacaagggcctggtggacaagatcatggtggaccgcatcaacctggcccagaaggccttctgcggcttcgaggacccacgcaccaagaccaagatgtcggccgcccaggccctgaagaagggctggctctactacgaggccggccagcgcttcctggaggtgcagtacctgaccggcggcttgatcgagcccgacacgccgggccgcgtgcccctggacgaggccctgcagcgcggcacggtggacgcccgcaccgcacagaagctgcgtgacgtgggcgcctactccaagtacctcacctgccctaagaccaagctcaagatctcctataaggacgcgctggaccgcagcatggtggaggagggcacggggctgcggctgctggaggctgccgcgcagtccaccaagggctactacagcccctacagcgtcagcggctccggctctaccgctggctcccgcaccggctcgcgcaccggctcccgggccggctcccgccgcggcagctttgacgccaccggctccggcttctccatgaccttctcttcatcctcctactcctcctcgggctacggccgccgctacgcctcggggtcctcggcctccctggggggccctgagtctgccgtggcctgaggctgcctgcgcccaccccgctctgcatgcggcccagcccggctcccaccgaggcgcgggggccgttttcaacgcttaaaggtgtcttcctcccaagtggtgcctaaagtttaaccaaaaagaccagactaatatattaatatatatctgctgtccagacagcctgtatcttgggggacagggctggcccagccctgctggccgcctcaccccctcgggtctcctcactcccttctacctgccactcacacagccaggtgccttggagggtcccaagctgggccccagcccaccctcctgtcttcccagggtagcccgcctgccagtcctagctgcacagggcagctgggcccaaccctgtctgtagagggccctggtgtttctagcactggcctgcacggtgggccttgctggggacggggggccccagtcagcctctctcccagtctacccagagaagccccttccccatgggaagacgaggccctcgggcccagcccccacagtgctgtctgatctgtgctttccagctcaccccccacactcactcctgagacccctggcctccggcgtcagcctccagcctctgttcccctagtaagtgccttccatgtcggcctctaaccccaggccccgaggacccagacccagtggggaggcggacgttccagccggcatggctgggaactgcagacctgtcctcctggtgggtccaggggcccctccagcttgtggagccccacactggggtgccgcctgcccgtctctctcccatggagccccagccccctttgggcccagggacaccagccaggctctgtgctgaccctcctgttgcacccagccctggtctcagcagcgaccacccctgcctccaccctctgagctttgcatgttccactaaccccgggcgggtggcaggtggaggtgtcaggctgctggcgcctctgcaagggcagaacactaacctgaccgtgggcggggccttgcggtatccgcccccaataaaagcaattccaacctttgagctgagcctgtgccgagtgagcgtctcgtggggccgccagccttcagctgcctgtgtgccacacggggctgcccagagcaccgtgcctgaggccgagggtccgggcgacgaaggtgtgggggcagcatgtctcagcaccagctccgcgtgccgcagcccgagggcctgggccgaaagagaaccagctcggaggacaacctgtacctggctgtgctcagggcctctgagggcaagaaagatgagcgggatcgtgtgcagaagaaaaccttcaccaagtgggtcaacaagcacctcatcaaggcccagaggcacatcagtgacctgtatgaagacctccgcgatggccacaacctcatctccctgctggaggtcctctcgggggacagcctgccccgggagaaggggaggatgcgtttccacaagctgcagaatgtccagattgccctggactacctccggcaccgccaggtgaagctggtgaacatcaggaatgatgacatcgctgacggcaaccccaagctgacccttggcctcatctggacaatcattctgcacttccagatctcagatatccaggtgagtgggcagtcggaggacatgacggccaaggagaagctgctgctgtggtcgcagcgaatggtggaggggtaccagggcctgcgatgcgacaacttcacctccagctggagagacggccgcctcttcaatgccatcatccaccggcacaagcccctgctcatcgacatgaacaaggtgtaccggcagaccaacctggagaacctggaccaggccttctctgtggcggagcgggacctgggagtgacgcggctcctggaccctgaggacgtggatgtccctcagcccgacgagaagtccatcatcacctacgtctcgtcgctgtatgacgccatgccccgcgtgccggacgtgcaggatggggtgagggccaacgagctgcagctgcgctggcaggagtaccgggagctggtgctgctgctgcttcagtggatgcgacaccacacggccgcctttgaggaacgcaggttcccctccagcttcgaggagattgagatcctgtggtctcagttcctgaagtttaaggagatggagctaccagccaaggaggccgacaagaacaggtccaagggcatctaccaatccctggagggagcggtgcaagcaggccagctcaaggtgccccctggctaccacccgctggatgtggagaaggagtggggcaagctgcacgtggccatcctggagcgggagaagcagctccgcagcgagtttgagaggctggagtgtcttcagcgcatcgtgaccaagctgcagatggaggcggggctgtgtgaggagcagctgaaccaggccgacgccctgctgcagtcggatgtccggctgctggctgcaggcaaagtgccacagcgggcgggggaggtggaacgggacttggacaaggcggatagcatgatccggctgctcttcaacgacgtgcagaccctcaaggatggacggcacccgcagggcgagcagatgtaccgcagggtgtaccgtctgcacgagcgcctggtagccatccgcaccgagtacaacctacggctgaaggcaggcgtggcggcccctgcaacccaggtggcccaggtgactctgcagagtgtgcagaggcgccccgagctggaggactccactctgcgctacctgcaggacctgctggcctgggtggaggagaaccagcaccgtgtggatggcgctgagtggggtgtggacctgcccagcgtggaggcgcagctgggcagccaccgaggcctgcaccagtccatcgaagaattccgggccaagatcgagcgggcacggagtgacgagggccagctctcccccgccacccggggtgcctaccgtgactgcctgggtcggctggacctgcagtacgccaagctgctgaactcctccaaggcccgcctcaggtccctggagagcttgcacagctttgtggcagccgccactaaggagctaatgtggctgaatgagaaggaggaggaggaggtgggcttcgactggagcgaccgcaacaccaacatgaccgccaagaaggagagctactcggcgctgatgcgggagctggagctgaaggagaagaagatcaaggagctccaaaatgctggggaccggctgctgcgggaggaccacccggcccggcccacggtggagtccttccaggcggccctgcagacgcagtggagctggatgctacagctgtgctgctgtatcgaggcacacctgaaggagaacgctgcctactttcagttcttctcagatgtgcgggaggccgaggggcagttgcagaagctgcaggaggcactgcgtaggaaatacagttgtgatcgctccgccaccgtcacccggctggaggacctgctgcaggatgcccaggacgagaaggaacagctgaacgagtacaagggccacctctcaggcctggccaagcgggccaaggccgtcgtgcagctgaagccccgccacccagcccaccccatgcggggccgcctgcccctgctggccgtgtgcgactataagcaggtggaggtgactgtgcacaagggtgacgagtgccagctggtgggccctgcacagccgtcccactggaaggtgctcagcagctccggcagcgaggccgccgtgccctccgtgtgcttcctggtgcccccgcccaaccaggaggcccaggaggccgtcaccaggctggaggcccagcaccaggccctggtcacgctgtggcaccagttgcacgtggacatgaagagccttctggcctggcagagccttcgccgcgacgtgcagctcatccgctcctggtccctggccacgttccgcaccctgaagccagaggagcagcgccaagccctgcacagcctggagctgcactaccaggccttcctgcgggacagccaggacgcgggcggcttcggacccgaggaccggctgatggctgagcgcgagtacggctcctgcagccaccactaccagcagctgctgcagagcctggaacagggtgcacaggaagagtctcgctgccagcgctgcatctccgagctcaaagacatccggctgcagctggaggcctgtgagacgcgcaccgtgcaccgcctgcggctgccgctggacaaagagccggcacgggagtgtgcccagcgcatcgccgagcagcagaaggcacaggcagaggtggaggggctgggcaagggggtcgcccggctctctgccgaggccgagaaggtcttggccctaccagagccatcgcctgcggcccccacgctgcgctcggagctggagctgacgctgggcaagctggagcaggtccgcagcctgtctgccatctacctggagaagctcaagaccatcagcctggtgatccgcggcacgcagggggccgaggaggtgctcagggcccacgaggagcagctcaaggaggcccaggccgtgccggccaccctcccggagctcgaggccaccaaggcctctctgaagaagctgcgggcccaggccgaggcacagcagcccacgttcgacgccctgcgggatgagctgcggggggcacaggaggtgggggagcgactgcagcagcggcacggggagcgggacgtggaggtggagcgctggcgggagcgggtcgcccagttgcttgagcgctggcaggctgtgctggcccagaccgacgtgcggcagcgcgagctcgagcaactgggccgccagctgcgttactaccgcgagagtgcagaccccttgggcgcctggctgcaggacgccaggcggcggcaggagcagatccaggccatgccgctggccgacagccaggctgtgcgggagcagctgcggcaggagcaggccctgctggaggagatcgagcgccacggcgagaaggtcgaggagtgccagaggtttgcgaaacagtacatcaacgccatcaaggactatgaactccagctggtgacgtacaaggcgcagcttgagccggtggcctccccggccaagaagcccaaggtccagtcgggatcagagagtgtcatccaggagtacgtggacctgcgtacgcactacagcgagctgaccacactgacgagccagtacatcaagttcatcagcgagactctgcggcgcatggaggaggaggagaggctggctgagcagcagcgggcagaggagcgcgagcggctggccgaggtggaggccgcgctggagaagcagcggcagctggccgaggcgcacgcccaggcaaaggcacaggcggagcgggaggcgaaggagctgcagcagcgcatgcaggaggaggtggtgcggcgggaggaggcggcggtggacgcgcagcagcagaagcgcagcattcaggaggagctgcagcagctgcggcagagctcggaggcggagatccaggccaaggcccggcaggcagaggcggctgagcgcagccggctgcgcatcgaggaggagatccgcgtggtgcgcctgcagttggaggccaccgagcgccagcgtggcggggctgagggggagctgcaggcactgcgtgcacgggcggaggaggctgaggcacaaaagcgacaggcgcaggaggaggccgagcgcttgcggaggcaggtgcaggacgagagccagcgtaagcggcaggcggaggtggagctggcctcgcgcgtgaaggccgaggccgaggcggcgcgcgagaagcagcgggccctgcaggccctggaggagctgcggctgcaggcggaggaggcggagcggcgcctgcggcaggccgaggtggagcgagcgcggcaggtacaggtggccctggagacggcgcagcgcagtgcagaggcggagctgcagagcaaacgcgcctccttcgccgagaagacggcacagctggagcgctccctgcaggaggaacacgtggctgtggcacagctgcgggaggaggctgagcggcgggcacagcagcaggccgaggccgagcgggcgcgcgaggaggcagagcgggagctggagcgctggcagctcaaggccaacgaggcgctacggctgcggctgcaggcggaggaggtggcgcagcagaagagcctggcgcaggccgaggctgagaagcagaaggaggaggcggagcgcgaggcgcggcggcgcggcaaggcggaggagcaggccgtccggcagcgggagctggctgaacaagagctggagaagcagcggcagctggcggaaggcaccgcgcagcagcgcctggccgcggagcaggagttgatccggctgcgggccgagacggagcagggggagcagcagcggcagctgctggaggaggagctggcccggctgcagcgtgaggcggctgcagccacgcagaaacggcaggagctggaagccgagctggccaaggtgcgggccgagatggaggtgctgctggccagcaaggcgagggctgaggaggagtcgcgctccaccagcgagaagtccaagcagaggctggaggccgaggccggccggttccgcgagctggccgaggaggccgcccgcctgcgtgccctggcggaagaggccaagcggcagcggcagctggccgaggaagacgcggcgcggcagcgggccgaggcggagcgggtgcttgcggagaagctggccgccatcggcgaggccacgcggctcaagacggaggcggagatcgcgctcaaggagaaggaggcggagaacgagcgcctgcggcggctggcggaggacgaggccttccagcggcggcggctggaggagcaggccgcgcaacacaaggctgacatcgaggagcgcctggcccagctgcgcaaggcatcggacagcgagctggagcggcagaaggggctggtggaggacacgctgaggcagcggcggcaggtggaggaggagatcctggcgctgaaggcgagcttcgagaaggcggccgctggcaaggcggagctggagctggagctgggacgcatccgcagcaacgcggaggacacgctgcgcagcaaggagcaggccgagctggaggctgcgaggcagcggcagctggcggcggaggaggagcggcggcgccgtgaggctgaggagcgcgtgcagaagagcctggcggccgaggaggaggccgcacggcagcggaaggcggcgctggaggaagtcgagcggctgaaagccaaggtggaggaggcgcggcgcctgcgggagcgagcggagcaggagtcggcgcggcagctgcagctggcccaggaggccgcccagaagcggctgcaggcggaagagaaggcacacgccttcgcggtgcagcagaaggagcaggagctacagcagacgctgcagcaggagcagagcgtgctggaccagctgcgcggcgaggcggaggcggcccggcgggcggctgaggaggcggaggaggcccgggtgcaggcggagcgtgaggcggcgcagtcccggcggcaggtggaagaggccgagcggctgaagcagtcggcagaggagcaggcacaggcccgggctcaggcacaggcggctgcagagaagctgcgcaaggaggccgagcaagaggcggcgcggcgggcacaggcggagcaggcggccctgcggcagaagcaggcagctgacgcggagatggagaagcataagaaattcgccgagcagacgctgcggcagaaggcgcaggtggagcaggagctgacaacactgcggctgcagctggaggagaccgaccaccagaagaacctgctggacgaggagctgcagcggctgaaggcggaggccacggaggccgcacgccagcgcagccaggtggaggaggagctcttctcggtgcgcgtgcagatggaggagctgagcaagctcaaggcacgcatcgaggctgagaaccgcgcactcatcttgcgtgacaaggacaatacgcagcgcttcctgcaggaggaggctgagaagatgaagcaggtggcggaggaggccgcgcggctgagtgtggcggcccaagaggctgcgcgactgcggcagctggcagaggaggacctggcacagcagcgggccttggcagagaagatgctcaaggagaagatgcaggcggtgcaggaggccacgcgactcaaggctgaggcggaactgctgcagcagcagaaggagcttgcgcaggagcaggcgcggcggctgcaggaggacaaggagcagatggcgcagcagctggcggaggagacgcagggcttccagcggacgctggaggccgagcggcagcggcagctggagatgagcgctgaggctgagcgcctcaagctgcgtgtggccgagatgagccgagcccaggcccgcgctgaggaggacgcccagcgcttccggaagcaggcggaggagatcggtgagaagctgcaccgcacggagctcgccacccaggagaaggtgaccctggtgcagacactggagatccagcgacagcagagtgaccatgatgccgagcgcctgcgggaggccatcgctgagctggagcgtgagaaggagaagctccaacaggaggccaaactgctgcagctcaagtctgaggagatgcagacggtgcagcaggagcagctgctgcaggagacgcaggccctgcagcaaagcttcctctctgaaaaggacagcctgctacagcgggagcgcttcatcgagcaggagaaggccaagctggagcagctcttccaggacgaggtggccaaggcacagcagctgcgtgaggagcagcagcggcagcagcagcagatggagcaggaacggcagcggctggtggccagcatggaggaggcgcggcggcggcagcatgaggccgaggagggcgtgcggcgcaagcaggaggagctgcagcagctggagcagcagcggcggcagcaggaggagctgctggctgaggagaaccagaggctgcgtgagcagctgcagctcctggaggagcagcaccgggccgcgctggcgcactcagaggaggtcactgcctcgcaggtggctgccacaaagaccctgcccaatggccgggatgcacttgatggccccgcggcagaggcagagccggagcacagcttcgatggcctgcggcggaaggtgtcagctcagaggctgcaggaggccggcatcctgagtgcggaggagctgcagcggttggcgcagggccacaccacggtggacgagctcgcacggcgggaagacgtgcgccactacctgcagggccgcagcagtatcgcagggctgttgctgaaggccaccaatgagaagctgagtgtttacgccgccctgcagaggcagctgctgagtcccggcacggccctcatcctgctggaggcgcaggcggcctcaggcttcctgctggaccctgtgcggaaccggcggctgaccgtcaacgaggctgtgaaggagggtgtggtgggccccgagctgcaccacaagctgctgtcggccgagcgcgccgtcactggctacaaggacccctacactggccagcagatctctctcttccaagccatgcagaagggcctcatcgtccgggagcacggcatccgcctgctggaggcccagatcgccacgggcggcgttatcgaccccgtgcacagccaccgcgtgcccgtggacgtggcctaccggcgcggctacttcgacgaggagatgaaccgcgtcctggcggaccccagcgacgacaccaagggcttctttgaccccaacacgcacgagaacctcacgtacctgcagctactggagcgctgcgtggaggaccccgagacgggcctgtgccttctgccactcacggataaggctgccaagggcggggagctggtctacactgactccgaggcccgggacgtctttgagaaggccaccgtgtctgcgccgttcggcaagttccagggcaagacggtgaccatttgggagatcatcaactcggaatacttcacggcagagcagcggcgggacctgctgcggcagttccgcacgggccggatcacagtggagaagatcatcaagatcatcatcacggtggtggaggagcaggagcagaagggccggctttgctttgagggcctgcgcagcctggtgccagccgccgagctgctggagagcagggtcatcgaccgcgagctctaccagcagctgcagcgaggtgagcgctctgtgcgagacgtagccgaggtggacactgtgcggcgggctctccggggtgccaacgtcatcgcgggtgtatggctggaggaggcggggcagaagctgagtatctacaatgccctgaagaaagacctgctgccatccgacatggccgtggccctgttggaagcccaggccggcaccgggcacatcatcgaccccgccaccagcgcccggctgaccgtggacgaggcagtgcgtgctggcctggtgggccccgagtttcatgagaagctgctatcagccgagaaggctgtgacagggtacagggacccctacacagggcagagcgtctccctgttccaggccctgaagaagggcctcattccccgggagcagggcctgcgcctgttggacgcccagctgtccacgggcggcatcgtggaccccagcaagagccaccgcgtgcccctggatgtcgcctgcgcccgaggctgcctggatgaggagaccagcagggccctgtcggcaccaagggccgacgccaaggcctacagtgaccccagcacaggggagccggccacctacggcgagctccagcagcggtgccggcccgaccagctgaccgggctgagcctgctgccgctctcagaaaaggctgctcgggcccggcaggaggagctctactcagagctgcaggcccgtgagacctttgaaaagaccccggttgaggtccccgtgggtggcttcaagggcaggacggtgacggtgtgggagctcatcagctctgagtacttcactgcggagcagcggcaggagctgttgcgtcagttccgcacgggcaaggtcaccgtggagaaggtcatcaagattctcattaccatcgtggaggaggtggagaccctgcggcaggagaggctgtccttcagcggcctccgtgcccctgtgccagccagcgagctcctggcttccggggtcctcagcagagcccagtttgagcagctcaaggacggcaagacgacggtcaaggacctttcggagctgggctccgtgcggacgctgctgcagggcagtggctgcctcgccggcatctacctggaggacaccaaggagaaggtgtccatctacgaggccatgcgccggggcctgctgagagccacaacggctgcgctcctgctggaggcgcaggcggccactggcttcctggtggaccccgtgcggaaccagcgcctgtatgtccacgaggccgtgaaggcgggcgtggtgggccccgagcttcacgagcagctgctgtctgccgagaaggccgtcaccggctacagagacccctactcgggcagcaccatctccctcttccaggccatgcagaagggcctggttctccggcagcacggcatccgcctgctggaggcccagatcgccacgggcggcatcatcgaccccgtgcacagccaccgcgtgcctgtggacgtggcctaccagcgcggctacttcagtgaggagatgaaccgcgtcctggcggaccccagcgacgacaccaagggcttctttgaccccaacacgcatgagaacctcacgtacaggcagctgctggagcggtgcgtggaggaccccgagacgggcttgcgccttctgccactgaaaggggcggagaaggctgaggtggtggagaccacgcaggtgtacactgaggaggagacaagaagggcatttgaagagacacagatcgacattcccggcggcggcagccacggcggctccaccatgtccctgtgggaggtgatgcagtcggacctgatccccgaggagcagcgggcccagctgatggctgacttccaggccggccgggtgaccaaggaacgcatgatcatcatcatcatcgagatcattgagaagacagagatcatccgccagcagggtctggcctcctacgactacgtgcgccgccgcctcacggctgaggacctgttcgaggctcggatcatctctctcgagacctacaacctgctccgggagggcaccaggagcctccgtgaggctctcgaggcggagtccgcctggtgctacctctatggcacgggctccgtggctggtgtctacctgcccggttccaggcagacactgagcatctaccaggctctcaagaaagggctgctgagtgccgaggtggcccgcctgctgctggaggcacaggcagccacaggcttcctgctggacccggtgaagggggagcggctgactgtggatgaggctgtgcggaagggcctcgtggggcccgagctgcacgaccgcctgctctcggctgagcgggcggtcaccggctaccgtgacccctacaccgagcagaccatctcgctcttccaggccatgaagaaggagctgatccctactgaggaggccctgcggctgctggatgcccagctggccaccggcggcatcgtggacccccgcctgggcttccaccttcccctggaggtggcttaccagcgtggctacctcaacaaggacacgcacgaccagctgtcagagcccagcgaggtgcgcagctacgtggacccgtccaccgacgagcgcctcagctacacgcagctgctcaggcggtgccgtcgtgacgacggcaccggccagctgctcctgccactgtcggacgcccgcaagctgaccttccgtggcctgcggaagcagatcaccatggaggagctggtgcgctcgcaggtcatggacgaggccacggcgctgcagctgcgggagggcctgacctccatcgaggaggtcaccaagaacttgcagaagttcctggaaggcaccagctgcatcgctggtgtcttcgtggacgccaccaaggaacggctctcggtgtaccaggccatgaagaagggcatcatccgccccggcacagcctttgagctcctggaggcgcaggcggccaccggttacgtcatcgaccccatcaagggactgaagctgacggtggaggaggctgtgcgtatgggcattgtgggccccgagttcaaggacaagctgctgtcggccgagcgcgccgtcactgggtacaaggacccctactctgggaagctcatctccctcttccaggccatgaagaagggcctgatcctgaaggaccatggcatccgcctgctggaggcccagatcgccacgggcggcatcatcgaccctgaggagagccaccggctgcccgtggaggtggcctacaagcgcggcctcttcgatgaggagatgaacgagatcctgaccgacccctcggacgacaccaagggcttctttgaccctaacacggaggagaacctcacctacctgcagctgatggagcgttgtatcactgacccccagacgggcctgtgtctcttgccgctgaaggagaagaagcgggagcggaagacgtcctccaagtcctccgtgcgcaagcgccgagtggtcatcgtggaccccgagacgggcaaggagatgtcagtgtacgaggcctaccgcaagggcctgattgaccaccagacgtacctggagctgtccgagcaggagtgcgagtgggaggagatcaccatctcctcctcggacggcgtggtcaagtccatgatcatcgaccgccgctccgggcgccagtacgacatcgatgatgccatcgccaagaacctcatcgaccgctcggcactggaccagtaccgcgccggcacgctctccatcaccgagttcgccgacatgctctcgggcaacgccggtggtttccgctcccgttcctcctcggtgggatcctcctcctcctaccccatcagccccgccgtctccaggacccagctggcctcctggtcagaccccactgaggagacgggccccgtggctggcatcctggacacggagacgctggagaaggtgtccatcaccgaggccatgcaccggaacctggtggataacatcacggggcagcggctgctggaggcgcaggcctgcaccgggggcatcatcgaccccagcaccggtgagcgcttccctgtcaccgacgccgtcaacaagggcctggtggacaagatcatggtggaccgcatcaacctggcccagaaggccttctgcggcttcgaggacccacgcaccaagaccaagatgtcggccgcccaggccctgaagaagggctggctctactacgaggccggccagcgcttcctggaggtgcagtacctgaccggcggcttgatcgagcccgacacgccgggccgcgtgcccctggacgaggccctgcagcgcggcacggtggacgcccgcaccgcacagaagctgcgtgacgtgggcgcctactccaagtacctcacctgccctaagaccaagctcaagatctcctataaggacgcgctggaccgcagcatggtggaggagggcacggggctgcggctgctggaggctgccgcgcagtccaccaagggctactacagcccctacagcgtcagcggctccggctctaccgctggctcccgcaccggctcgcgcaccggctcccgggccggctcccgccgcggcagctttgacgccaccggctccggcttctccatgaccttctcttcatcctcctactcctcctcgggctacggccgccgctacgcctcggggtcctcggcctccctggggggccctgagtctgccgtggcctgaggctgcctgcgcccaccccgctctgcatgcggcccagcccggctcccaccgaggcgcgggggccgttttcaacgcttaaaggtgtcttcctcccaagtggtgcctaaagtttaaccaaaaagaccagactaatatattaatatatatctgctgtccagacagcctgtatcttgggggacagggctggcccagccctgctggccgcctcaccccctcgggtctcctcactcccttctacctgccactcacacagccaggtgccttggagggtcccaagctgggccccagcccaccctcctgtcttcccagggtagcccgcctgccagtcctagctgcacagggcagctgggcccaaccctgtctgtagagggccctggtgtttctagcactggcctgcacggtgggccttgctggggacggggggccccagtcagcctctctcccagtctacccagagaagccccttccccatgggaagacgaggccctcgggcccagcccccacagtgctgtctgatctgtgctttccagctcaccccccacactcactcctgagacccctggcctccggcgtcagcctccagcctctgttcccctagtaagtgccttccatgtcggcctctaaccccaggccccgaggacccagacccagtggggaggcggacgttccagccggcatggctgggaactgcagacctgtcctcctggtgggtccaggggcccctccagcttgtggagccccacactggggtgccgcctgcccgtctctctcccatggagccccagccccctttgggcccagggacaccagccaggctctgtgctgaccctcctgttgcacccagccctggtctcagcagcgaccacccctgcctccaccctctgagctttgcatgttccactaaccccgggcgggtggcaggtggaggtgtcaggctgctggcgcctctgcaagggcagaacactaacctgaccgtgggcggggccttgcggtatccgcccccaataaaagcaattccaacctttgagctgagcctgtgccgagtgagcgtctcgtggggccgccagccttcagctgcctgtgtgccacacggggctgcccagagcaccgtgcctgaggccgagggtccgggcgacgaaggtgtgggggcagcatgtctcagcaccagctccgcgtgccgcagcccgagggcctgggccgaaagagaaccagctcggaggacaacctgtacctggctgtgctcagggcctctgagggcaagaaagatgagcgggatcgtgtgcagaagaaaaccttcaccaagtgggtcaacaagcacctcatcaaggcccagaggcacatcagtgacctgtatgaagacctccgcgatggccacaacctcatctccctgctggaggtcctctcgggggacagcctgccccgggagaaggggaggatgcgtttccacaagctgcagaatgtccagattgccctggactacctccggcaccgccaggtgaagctggtgaacatcaggaatgatgacatcgctgacggcaaccccaagctgacccttggcctcatctggacaatcattctgcacttccagatctcagatatccaggtgagtgggcagtcggaggacatgacggccaaggagaagctgctgctgtggtcgcagcgaatggtggaggggtaccagggcctgcgatgcgacaacttcacctccagctggagagacggccgcctcttcaatgccatcatccaccggcacaagcccctgctcatcgacatgaacaaggtgtaccggcagaccaacctggagaacctggaccaggccttctctgtggcggagcgggacctgggagtgacgcggctcctggaccctgaggacgtggatgtccctcagcccgacgagaagtccatcatcacctacgtctcgtcgctgtatgacgccatgccccgcgtgccggacgtgcaggatggggtgagggccaacgagctgcagctgcgctggcaggagtaccgggagctggtgctgctgctgcttcagtggatgcgacaccacacggccgcctttgaggaacgcaggttcccctccagcttcgaggagattgagatcctgtggtctcagttcctgaagtttaaggagatggagctaccagccaaggaggccgacaagaacaggtccaagggcatctaccaatccctggagggagcggtgcaagcaggccagctcaaggtgccccctggctaccacccgctggatgtggagaaggagtggggcaagctgcacgtggccatcctggagcgggagaagcagctccgcagcgagtttgagaggctggagtgtcttcagcgcatcgtgaccaagctgcagatggaggcggggctgtgtgaggagcagctgaaccaggccgacgccctgctgcagtcggatgtccggctgctggctgcaggcaaagtgccacagcgggcgggggaggtggaacgggacttggacaaggcggatagcatgatccggctgctcttcaacgacgtgcagaccctcaaggatggacggcacccgcagggcgagcagatgtaccgcagggtgtaccgtctgcacgagcgcctggtagccatccgcaccgagtacaacctacggctgaaggcaggcgtggcggcccctgcaacccaggtggcccaggtgactctgcagagtgtgcagaggcgccccgagctggaggactccactctgcgctacctgcaggacctgctggcctgggtggaggagaaccagcaccgtgtggatggcgctgagtggggtgtggacctgcccagcgtggaggcgcagctgggcagccaccgaggcctgcaccagtccatcga

SEQ ID NO: 673 - DNA, 32765 bp, Homo sapiens
  misc_feature (222)..(222): second gene starts at position 222
atggcagaagtagagcagaagaagaagcggaccttccgcaagttcacctaccgcggcgtggacctcgaccagctgctggacatgtcctacgagcagctgatgcagctgtacagtgcgcgccagcggcggcggctgaaccggggcctgcggcggaagcagcactccctgctgaagcgcctgcgcaaggccaagaaggaggcgccgcccatggagaagccggagaccttctcttcatcctcctactcctcctcgggctacggccgccgctacgcctcggggtcctcggcctccctggggggccctgagtctgccgtggcctgaggctgcctgcgcccaccccgctctgcatgcggcccagcccggctcccaccgaggcgcgggggccgttttcaacgcttaaaggtgtcttcctcccaagtggtgcctaaagtttaaccaaaaagaccagactaatatattaatatatatctgctgtccagacagcctgtatcttgggggacagggctggcccagccctgctggccgcctcaccccctcgggtctcctcactcccttctacctgccactcacacagccaggtgccttggagggtcccaagctgggccccagcccaccctcctgtcttcccagggtagcccgcctgccagtcctagctgcacagggcagctgggcccaaccctgtctgtagagggccctggtgtttctagcactggcctgcacggtgggccttgctggggacggggggccccagtcagcctctctcccagtctacccagagaagccccttccccatgggaagacgaggccctcgggcccagcccccacagtgctgtctgatctgtgctttccagctcaccccccacactcactcctgagacccctggcctccggcgtcagcctccagcctctgttcccctagtaagtgccttccatgtcggcctctaaccccaggccccgaggacccagacccagtggggaggcggacgttccagccggcatggctgggaactgcagacctgtcctcctggtgggtccaggggcccctccagcttgtggagccccacactggggtgccgcctgcccgtctctctcccatggagccccagccccctttgggcccagggacaccagccaggctctgtgctgaccctcctgttgcacccagccctggtctcagcagcgaccacccctgcctccaccctctgagctttgcatgttccactaaccccgggcgggtggcaggtggaggtgtcaggctgctggcgcctctgcaagggcagaacactaacctgaccgtgggcggggccttgcggtatccgcccccaataaaagcaattccaaccttagtctggctgcggcggcagagctgaagtgagcggagccaccaggaggccatgtcgggtgaggacgctgaggtccgggcagtctctgaagatgtctccaatggaagcagtggctcgcccagccctggggacacactgccctggaaccttgggaaaacgcagcggagccggcgcagcgggggtggcgctgggagcaacgggagtgtcctggacccagctgagcgggcggtcattcgcatcgcagatgagcgggatcgtgtgcagaagaaaaccttcaccaagtgggtcaacaagcacctcatcaaggcccagaggcacatcagtgacctgtatgaagacctccgcgatggccacaacctcatctccctgctggaggtcctctcgggggacagcctgccccgggagaaggggaggatgcgtttccacaagctgcagaatgtccagattgccctggactacctccggcaccgccaggtgaagctggtgaacatcaggaatgatgacatcgctgacggcaaccccaagctgacccttggcctcatctggacaatcattctgcacttccagatctcagatatccaggtgagtgggcagtcggaggacatgacggccaaggagaagctgctgctgtggtcgcagcgaatggtggaggggtaccagggcctgcgatgcgacaacttcacctccagctggagagacggccgcctcttcaatgccatcatccaccggcacaagcccctgctcatcgacatgaacaaggtgtaccggcagaccaacctggagaacctggaccaggccttctctgtggcggagcgggacctgggagtgacgcggctcctggaccctgaggacgtggatgtccctcagcccgacgagaagtccatcatcacctacgtctcgtcgctgtatgacgccatgccccgcgtgccggacgtgcaggatggggtgagggccaacgagctgcagctgcgctggcaggagtaccgggagctggtgctgctgctgcttcagtggatgcgacaccacacggccgcctttgaggaacgcaggttcccctccagcttcgaggagattgagatcctgtggtctcagttcctgaagtttaaggagatggagctaccagccaaggaggccgacaagaacaggtccaagggcatctaccaatccctggagggagcggtgcaagcaggccagctcaaggtgccccctggctaccacccgctggatgtggagaaggagtggggcaagctgcacgtggccatcctggagcgggagaagcagctccgcagcgagtttgagaggctggagtgtcttcagcgcatcgtgaccaagctgcagatggaggcggggctgtgtgaggagcagctgaaccaggccgacgccctgctgcagtcggatgtccggctgctggctgcaggcaaagtgccacagcgggcgggggaggtggaacgggacttggacaaggcggatagcatgatccggctgctcttcaacgacgtgcagaccctcaaggatggacggcacccgcagggcgagcagatgtaccgcagggtgtaccgtctgcacgagcgcctggtagccatccgcaccgagtacaacctacggctgaaggcaggcgtggcggcccctgcaacccaggtggcccaggtgactctgcagagtgtgcagaggcgccccgagctggaggactccactctgcgctacctgcaggacctgctggcctgggtggaggagaaccagcaccgtgtggatggcgctgagtggggtgtggacctgcccagcgtggaggcgcagctgggcagccaccgaggcctgcaccagtccatcgaagaattccgggccaagatcgagcgggcacggagtgacgagggccagctctcccccgccacccggggtgcctaccgtgactgcctgggtcggctggacctgcagtacgccaagctgctgaactcctccaaggcccgcctcaggtccctggagagcttgcacagctttgtggcagccgccactaaggagctaatgtggctgaatgagaaggaggaggaggaggtgggcttcgactggagcgaccgcaacaccaacatgaccgccaagaaggagagctactcggcgctgatgcgggagctggagctgaaggagaagaagatcaaggagctccaaaatgctggggaccggctgctgcgggaggaccacccggcccggcccacggtggagtccttccaggcggccctgcagacgcagtggagctggatgctacagctgtgctgctgtatcgaggcacacctgaaggagaacgctgcctactttcagttcttctcagatgtgcgggaggccgaggggcagttgcagaagctgcaggaggcactgcgtaggaaatacagttgtgatcgctccgccaccgtcacccggctggaggacctgctgcaggatgcccaggacgagaaggaacagctgaacgagtacaagggccacctctcaggcctggccaagcgggccaaggccgtcgtgcagctgaagccccgccacccagcccaccccatgcggggccgcctgcccctgctggccgtgtgcgactataagcaggtggaggtgactgtgcacaagggtgacgagtgccagctggtgggccctgcacagccgtcccactggaaggtgctcagcagctccggcagcgaggccgccgtgccctccgtgtgcttcctggtgcccccgcccaaccaggaggcccaggaggccgtcaccaggctggaggcccagcaccaggccctggtcacgctgtggcaccagttgcacgtggacatgaagagccttctggcctggcagagccttcgccgcgacgtgcagctcatccgctcctggtccctggccacgttccgcaccctgaagccagaggagcagcgccaagccctgcacagcctggagctgcactaccaggccttcctgcgggacagccaggacgcgggcggcttcggacccgaggaccggctgatggctgagcgcgagtacggctcctgcagccaccactaccagcagctgctgcagagcctggaacagggtgcacaggaagagtctcgctgccagcgctgcatctccgagctcaaagacatccggctgcagctggaggcctgtgagacgcgcaccgtgcaccgcctgcggctgccgctggacaaagagccggcacgggagtgtgcccagcgcatcgccgagcagcagaaggcacaggcagaggtggaggggctgggcaagggggtcgcccggctctctgccgaggccgagaaggtcttggccctaccagagccatcgcctgcggcccccacgctgcgctcggagctggagctgacgctgggcaagctggagcaggtccgcagcctgtctgccatctacctggagaagctcaagaccatcagcctggtgatccgcggcacgcagggggccgaggaggtgctcagggcccacgaggagcagctcaaggaggcccaggccgtgccggccaccctcccggagctcgaggccaccaaggcctctctgaagaagctgcgggcccaggccgaggcacagcagcccacgttcgacgccctgcgggatgagctgcggggggcacaggaggtgggggagcgactgcagcagcggcacggggagcgggacgtggaggtggagcgctggcgggagcgggtcgcccagttgcttgagcgctggcaggctgtgctggcccagaccgacgtgcggcagcgcgagctcgagcaactgggccgccagctgcgttactaccgcgagagtgcagaccccttgggcgcctggctgcaggacgccaggcggcggcaggagcagatccaggccatgccgctggccgacagccaggctgtgcgggagcagctgcggcaggagcaggccctgctggaggagatcgagcgccacggcgagaaggtcgaggagtgccagaggtttgcgaaacagtacatcaacgccatcaaggactatgaactccagctggtgacgtacaaggcgcagcttgagccggtggcctccccggccaagaagcccaaggtccagtcgggatcagagagtgtcatccaggagtacgtggacctgcgtacgcactacagcgagctgaccacactgacgagccagtacatcaagttcatcagcgagactctgcggcgcatggaggaggaggagaggctggctgagcagcagcgggcagaggagcgcgagcggctggccgaggtggaggccgcgctggagaagcagcggcagctggccgaggcgcacgcccaggcaaaggcacaggcggagcgggaggcgaaggagctgcagcagcgcatgcaggaggaggtggtgcggcgggaggaggcggcggtggacgcgcagcagcagaagcgcagcattcaggaggagctgcagcagctgcggcagagctcggaggcggagatccaggccaaggcccggcaggcagaggcggctgagcgcagccggctgcgcatcgaggaggagatccgcgtggtgcgcctgcagttggaggccaccgagcgccagcgtggcggggctgagggggagctgcaggcactgcgtgcacgggcggaggaggctgaggcacaaaagcgacaggcgcaggaggaggccgagcgcttgcggaggcaggtgcaggacgagagccagcgtaagcggcaggcggaggtggagctggcctcgcgcgtgaaggccgaggccgaggcggcgcgcgagaagcagcgggccctgcaggccctggaggagctgcggctgcaggcggaggaggcggagcggcgcctgcggcaggccgaggtggagcgagcgcggcaggtacaggtggccctggagacggcgcagcgcagtgcagaggcggagctgcagagcaaacgcgcctccttcgccgagaagacggcacagctggagcgctccctgcaggaggaacacgtggctgtggcacagctgcgggaggaggctgagcggcgggcacagcagcaggccgaggccgagcgggcgcgcgaggaggcagagcgggagctggagcgctggcagctcaaggccaacgaggcgctacggctgcggctgcaggcggaggaggtggcgcagcagaagagcctggcgcaggccgaggctgagaagcagaaggaggaggcggagcgcgaggcgcggcggcgcggcaaggcggaggagcaggccgtccggcagcgggagctggctgaacaagagctggagaagcagcggcagctggcggaaggcaccgcgcagcagcgcctggccgcggagcaggagttgatccggctgcgggccgagacggagcagggggagcagcagcggcagctgctggaggaggagctggcccggctgcagcgtgaggcggctgcagccacgcagaaacggcaggagctggaagccgagctggccaaggtgcgggccgagatggaggtgctgctggccagcaaggcgagggctgaggaggagtcgcgctccaccagcgagaagtccaagcagaggctggaggccgaggccggccggttccgcgagctggccgaggaggccgcccgcctgcgtgccctggcggaagaggccaagcggcagcggcagctggccgaggaagacgcggcgcggcagcgggccgaggcggagcgggtgcttgcggagaagctggccgccatcggcgaggccacgcggctcaagacggaggcggagatcgcgctcaaggagaaggaggcggagaacgagcgcctgcggcggctggcggaggacgaggccttccagcggcggcggctggaggagcaggccgcgcaacacaaggctgacatcgaggagcgcctggcccagctgcgcaaggcatcggacagcgagctggagcggcagaaggggctggtggaggacacgctgaggcagcggcggcaggtggaggaggagatcctggcgctgaaggcgagcttcgagaaggcggccgctggcaaggcggagctggagctggagctgggacgcatccgcagcaacgcggaggacacgctgcgcagcaaggagcaggccgagctggaggctgcgaggcagcggcagctggcggcggaggaggagcggcggcgccgtgaggctgaggagcgcgtgcagaagagcctggcggccgaggaggaggccgcacggcagcggaaggcggcgctggaggaagtcgagcggctgaaagccaaggtggaggaggcgcggcgcctgcgggagcgagcggagcaggagtcggcgcggcagctgcagctggcccaggaggccgcccagaagcggctgcaggcggaagagaaggcacacgccttcgcggtgcagcagaaggagcaggagctacagcagacgctgcagcaggagcagagcgtgctggaccagctgcgcggcgaggcggaggcggcccggcgggcggctgaggaggcggaggaggcccgggtgcaggcggagcgtgaggcggcgcagtcccggcggcaggtggaagaggccgagcggctgaagcagtcggcagaggagcaggcacaggcccgggctcaggcacaggcggctgcagagaagctgcgcaaggaggccgagcaagaggcggcgcggcgggcacaggcggagcaggcggccctgcggcagaagcaggcagctgacgcggagatggagaagcataagaaattcgccgagcagacgctgcggcagaaggcgcaggtggagcaggagctgacaacactgcggctgcagctggaggagaccgaccaccagaagaacctgctggacgaggagctgcagcggctgaaggcggaggccacggaggccgcacgccagcgcagccaggtggaggaggagctcttctcggtgcgcgtgcagatggaggagctgagcaagctcaaggcacgcatcgaggctgagaaccgcgcactcatcttgcgtgacaaggacaatacgcagcgcttcctgcaggaggaggctgagaagatgaagcaggtggcggaggaggccgcgcggctgagtgtggcggcccaagaggctgcgcgactgcggcagctggcagaggaggacctggcacagcagcgggccttggcagagaagatgctcaaggagaagatgcaggcggtgcaggaggccacgcgactcaaggctgaggcggaactgctgcagcagcagaaggagcttgcgcaggagcaggcgcggcggctgcaggaggacaaggagcagatggcgcagcagctggcggaggagacgcagggcttccagcggacgctggaggccgagcggcagcggcagctggagatgagcgctgaggctgagcgcctcaagctgcgtgtggccgagatgagccgagcccaggcccgcgctgaggaggacgcccagcgcttccggaagcaggcggaggagatcggtgagaagctgcaccgcacggagctcgccacccaggagaaggtgaccctggtgcagacactggagatccagcgacagcagagtgaccatgatgccgagcgcctgcgggaggccatcgctgagctggagcgtgagaaggagaagctccaacaggaggccaaactgctgcagctcaagtctgaggagatgcagacggtgcagcaggagcagctgctgcaggagacgcaggccctgcagcaaagcttcctctctgaaaaggacagcctgctacagcgggagcgcttcatcgagcaggagaaggccaagctggagcagctcttccaggacgaggtggccaaggcacagcagctgcgtgaggagcagcagcggcagcagcagcagatggagcaggaacggcagcggctggtggccagcatggaggaggcgcggcggcggcagcatgaggccgaggagggcgtgcggcgcaagcaggaggagctgcagcagctggagcagcagcggcggcagcaggaggagctgctggctgaggagaaccagaggctgcgtgagcagctgcagctcctggaggagcagcaccgggccgcgctggcgcactcagaggaggtcactgcctcgcaggtggctgccacaaagaccctgcccaatggccgggatgcacttgatggccccgcggcagaggcagagccggagcacagcttcgatggcctgcggcggaaggtgtcagctcagaggctgcaggaggccggcatcctgagtgcggaggagctgcagcggttggcgcagggccacaccacggtggacgagctcgcacggcgggaagacgtgcgccactacctgcagggccgcagcagtatcgcagggctgttgctgaaggccaccaatgagaagctgagtgtttacgccgccctgcagaggcagctgctgagtcccggcacggccctcatcctgctggaggcgcaggcggcctcaggcttcctgctggaccctgtgcggaaccggcggctgaccgtcaacgaggctgtgaaggagggtgtggtgggccccgagctgcaccacaagctgctgtcggccgagcgcgccgtcactggctacaaggacccctacactggccagcagatctctctcttccaagccatgcagaagggcctcatcgtccgggagcacggcatccgcctgctggaggcccagatcgccacgggcggcgttatcgaccccgtgcacagccaccgcgtgcccgtggacgtggcctaccggcgcggctacttcgacgaggagatgaaccgcgtcctggcggaccccagcgacgacaccaagggcttctttgaccccaacacgcacgagaacctcacgtacctgcagctactggagcgctgcgtggaggaccccgagacgggcctgtgccttctgccactcacggataaggctgccaagggcggggagctggtctacactgactccgaggcccgggacgtctttgagaaggccaccgtgtctgcgccgttcggcaagttccagggcaagacggtgaccatttgggagatcatcaactcggaatacttcacggcagagcagcggcgggacctgctgcggcagttccgcacgggccggatcacagtggagaagatcatcaagatcatcatcacggtggtggaggagcaggagcagaagggccggctttgctttgagggcctgcgcagcctggtgccagccgccgagctgctggagagcagggtcatcgaccgcgagctctaccagcagctgcagcgaggtgagcgctctgtgcgagacgtagccgaggtggacactgtgcggcgggctctccggggtgccaacgtcatcgcgggtgtatggctggaggaggcggggcagaagctgagtatctacaatgccctgaagaaagacctgctgccatccgacatggccgtggccctgttggaagcccaggccggcaccgggcacatcatcgaccccgccaccagcgcccggctgaccgtggacgaggcagtgcgtgctggcctggtgggccccgagtttcatgagaagctgctatcagccgagaaggctgtgacagggtacagggacccctacacagggcagagcgtctccctgttccaggccctgaagaagggcctcattccccgggagcagggcctgcgcctgttggacgcccagctgtccacgggcggcatcgtggaccccagcaagagccaccgcgtgcccctggatgtcgcctgcgcccgaggctgcctggatgaggagaccagcagggccctgtcggcaccaagggccgacgccaaggcctacagtgaccccagcacaggggagccggccacctacggcgagctccagcagcggtgccggcccgaccagctgaccgggctgagcctgctgccgctctcagaaaaggctgctcgggcccggcaggaggagctctactcagagctgcaggcccgtgagacctttgaaaagaccccggttgaggtccccgtgggtggcttcaagggcaggacggtgacggtgtgggagctcatcagctctgagtacttcactgcggagcagcggcaggagctgttgcgtcagttccgcacgggcaaggtcaccgtggagaaggtcatcaagattctcattaccatcgtggaggaggtggagaccctgcggcaggagaggctgtccttcagcggcctccgtgcccctgtgccagccagcgagctcctggcttccggggtcctcagcagagcccagtttgagcagctcaaggacggcaagacgacggtcaaggacctttcggagctgggctccgtgcggacgctgctgcagggcagtggctgcctcgccggcatctacctggaggacaccaaggagaaggtgtccatctacgaggccatgcgccggggcctgctgagagccacaacggctgcgctcctgctggaggcgcaggcggccactggcttcctggtggaccccgtgcggaaccagcgcctgtatgtccacgaggccgtgaaggcgggcgtggtgggccccgagcttcacgagcagctgctgtctgccgagaaggccgtcaccggctacagagacccctactcgggcagcaccatctccctcttccaggccatgcagaagggcctggttctccggcagcacggcatccgcctgctggaggcccagatcgccacgggcggcatcatcgaccccgtgcacagccaccgcgtgcctgtggacgtggcctaccagcgcggctacttcagtgaggagatgaaccgcgtcctggcggaccccagcgacgacaccaagggcttctttgaccccaacacgcatgagaacctcacgtacaggcagctgctggagcggtgcgtggaggaccccgagacgggcttgcgccttctgccactgaaaggggcggagaaggctgaggtggtggagaccacgcaggtgtacactgaggaggagacaagaagggcatttgaagagacacagatcgacattcccggcggcggcagccacggcggctccaccatgtccctgtgggaggtgatgcagtcggacctgatccccgaggagcagcgggcccagctgatggctgacttccaggccggccgggtgaccaaggaacgcatgatcatcatcatcatcgagatcattgagaagacagagatcatccgccagcagggtctggcctcctacgactacgtgcgccgccgcctcacggctgaggacctgttcgaggctcggatcatctctctcgagacctacaacctgctccgggagggcaccaggagcctccgtgaggctctcgaggcggagtccgcctggtgctacctctatggcacgggctccgtggctggtgtctacctgcccggttccaggcagacactgagcatctaccaggctctcaagaaagggctgctgagtgccgaggtggcccgcctgctgctggaggcacaggcagccacaggcttcctgctggacccggtgaagggggagcggctgactgtggatgaggctgtgcggaagggcctcgtggggcccgagctgcacgaccgcctgctctcggctgagcgggcggtcaccggctaccgtgacccctacaccgagcagaccatctcgctcttccaggccatgaagaaggagctgatccctactgaggaggccctgcggctgctggatgcccagctggccaccggcggcatcgtggacccccgcctgggcttccaccttcccctggaggtggcttaccagcgtggctacctcaacaaggacacgcacgaccagctgtcagagcccagcgaggtgcgcagctacgtggacccgtccaccgacgagcgcctcagctacacgcagctgctcaggcggtgccgtcgtgacgacggcaccggccagctgctcctgccactgtcggacgcccgcaagctgaccttccgtggcctgcggaagcagatcaccatggaggagctggtgcgctcgcaggtcatggacgaggccacggcgctgcagctgcgggagggcctgacctccatcgaggaggtcaccaagaacttgcagaagttcctggaaggcaccagctgcatcgctggtgtcttcgtggacgccaccaaggaacggctctcggtgtaccaggccatgaagaagggcatcatccgccccggcacagcctttgagctcctggaggcgcaggcggccaccggttacgtcatcgaccccatcaagggactgaagctgacggtggaggaggctgtgcgtatgggcattgtgggccccgagttcaaggacaagctgctgtcggccgagcgcgccgtcactgggtacaaggacccctactctgggaagctcatctccctcttccaggccatgaagaagggcctgatcctgaaggaccatggcatccgcctgctggaggcccagatcgccacgggcggcatcatcgaccctgaggagagccaccggctgcccgtggaggtggcctacaagcgcggcctcttcgatgaggagatgaacgagatcctgaccgacccctcggacgacaccaagggcttctttgaccctaacacggaggagaacctcacctacctgcagctgatggagcgttgtatcactgacccccagacgggcctgtgtctcttgccgctgaaggagaagaagcgggagcggaagacgtcctccaagtcctccgtgcgcaagcgccgagtggtcatcgtggaccccgagacgggcaaggagatgtcagtgtacgaggcctaccgcaagggcctgattgaccaccagacgtacctggagctgtccgagcaggagtgcgagtgggaggagatcaccatctcctcctcggacggcgtggtcaagtccatgatcatcgaccgccgctccgggcgccagtacgacatcgatgatgccatcgccaagaacctcatcgaccgctcggcactggaccagtaccgcgccggcacgctctccatcaccgagttcgccgacatgctctcgggcaacgccggtggtttccgctcccgttcctcctcggtgggatcctcctcctcctaccccatcagccccgccgtctccaggacccagctggcctcctggtcagaccccactgaggagacgggccccgtggctggcatcctggacacggagacgctggagaaggtgtccatcaccgaggccatgcaccggaacctggtggataacatcacggggcagcggctgctggaggcgcaggcctgcaccgggggcatcatcgaccccagcaccggtgagcgcttccctgtcaccgacgccgtcaacaagggcctggtggacaagatcatggtggaccgcatcaacctggcccagaaggccttctgcggcttcgaggacccacgcaccaagaccaagatgtcggccgcccaggccctgaagaagggctggctctactacgaggccggccagcgcttcctggaggtgcagtacctgaccggcggcttgatcgagcccgacacgccgggccgcgtgcccctggacgaggccctgcagcgcggcacggtggacgcccgcaccgcacagaagctgcgtgacgtgggcgcctactccaagtacctcacctgccctaagaccaagctcaagatctcctataaggacgcgctggaccgcagcatggtggaggagggcacggggctgcggctgctggaggctgccgcgcagtccaccaagggctactacagcccctacagcgtcagcggctccggctctaccgctggctcccgcaccggctcgcgcaccggctcccgggccggctcccgccgcggcagctttgacgccaccggctccggcttctccatgaccttctcttcatcctcctactcctcctcgggctacggccgccgctacgcctcggggtcctcggcctccctggggggccctgagtctgccgtggcctgaggctgcctgcgcccaccccgctctgcatgcggcccagcccggctcccaccgaggcgcgggggccgttttcaacgcttaaaggtgtcttcctcccaagtggtgcctaaagtttaaccaaaaagaccagactaatatattaatatatatctgctgtccagacagcctgtatcttgggggacagggctggcccagccctgctggccgcctcaccccctcgggtctcctcactcccttctacctgccactcacacagccaggtgccttggagggtcccaagctgggccccagcccaccctcctgtcttcccagggtagcccgcctgccagtcctagctgcacagggcagctgggcccaaccctgtctgtagagggccctggtgtttctagcactggcctgcacggtgggccttgctggggacggggggccccagtcagcctctctcccagtctacccagagaagccccttccccatgggaagacgaggccctcgggcccagcccccacagtgctgtctgatctgtgctttccagctcaccccccacactcactcctgagacccctggcctccggcgtcagcctccagcctctgttcccctagtaagtgccttccatgtcggcctctaaccccaggccccgaggacccagacccagtggggaggcggacgttccagccggcatggctgggaactgcagacctgtcctcctggtgggtccaggggcccctccagcttgtggagccccacactggggtgccgcctgcccgtctctctcccatggagccccagccccctttgggcccagggacaccagccaggctctgtgctgaccctcctgttgcacccagccctggtctcagcagcgaccacccctgcctccaccctctgagctttgcatgttccactaaccccgggcgggtggcaggtggaggtgtcaggctgctggcgcctctgcaagggcagaacactaacctgaccgtgggcggggccttgcggtatccgcccccaataaaagcaattccaaccttagtctggctgcggcggcagagctgaagtgagcggagccaccaggaggccatgtcgggtgaggacgctgaggtccgggcagtctctgaagatgtctccaatggaagcagtggctcgcccagccctggggacacactgccctggaaccttgggaaaacgcagcggagccggcgcagcgggggtggcgctgggagcaacgggagtgtcctggacccagctgagcgggcggtcattcgcatcgcagatgagcgggatcgtgtgcagaagaaaaccttcaccaagtgggtcaacaagcacctcatcaaggcccagaggcacatcagtgacctgtatgaagacctccgcgatggccacaacctcatctccctgctggaggtcctctcgggggacagcctgccccgggagaaggggaggatgcgtttccacaagctgcagaatgtccagattgccctggactacctccggcaccgccaggtgaagctggtgaacatcaggaatgatgacatcgctgacggcaaccccaagctgacccttggcctcatctggacaatcattctgcacttccagatctcagatatccaggtgagtgggcagtcggaggacatgacggccaaggagaagctgctgctgtggtcgcagcgaatggtggaggggtaccagggcctgcgatgcgacaacttcacctccagctggagagacggccgcctcttcaatgccatcatccaccggcacaagcccctgctcatcgacatgaacaaggtgtaccggcagaccaacctggagaacctggaccaggccttctctgtggcggagcgggacctgggagtgacgcggctcctggaccctgaggacgtggatgtccctcagcccgacgagaagtccatcatcacctacgtctcgtcgctgtatgacgccatgccccgcgtgccggacgtgcaggatggggtgagggccaacgagctgcagctgcgctggcaggagtaccgggagctggtgctgctgctgcttcagtggatgcgacaccacacggccgcctttgaggaacgcaggttcccctccagcttcgaggagattgagatcctgtggtctcagttcctgaagtttaaggagatggagctaccagccaaggaggccgacaagaacaggtccaagggcatctaccaatccctggagggagcggtgcaagcaggccagctcaaggtgccccctggctaccacccgctggatgtggagaaggagtggggcaagctgcacgtggccatcctggagcgggagaagcagctccgcagcgagtttgagaggctggagtgtcttcagcgcatcgtgaccaagctgcagatggaggcggggctgtgtgaggagcagctgaaccaggccgacgccctgctgcagtcggatgtccggctgctggctgcaggcaaagtgccacagcgggcgggggaggtggaacgggacttggacaaggcggatagcatgatccggctgctcttcaacgacgtgcagaccctcaaggatggacggcacccgcagggcgagcagatgtaccgcagggtgtaccgtctgcacgagcgcctggtagccatccgcaccgagtacaacctacggctgaaggcaggcgtggcggcccctgcaacccaggtggcccaggtgactctgcagagtgtgcagaggcgccccgagctggaggactccactctgcgctacctgcaggacctgctggcctgggtggaggagaaccagcaccgtgtggatggcgctgagtggggtgtggacctgcccagcgtggaggcgcagctgggcagccaccgaggcctgcaccagtccatcgaagaattccgggccaagatcgagcgggcacggagtgacgagggccagctctcccccgccacccggggtgcctaccgtgactgcctgggtcggctggacctgcagtacgccaagctgctgaactcctccaaggcccgcctcaggtccctggagagcttgcacagctttgtggcagccgccactaaggagctaatgtggctgaatgagaaggaggaggaggaggtgggcttcgactggagcgaccgcaacaccaacatgaccgccaagaaggagagctactcggcgctgatgcgggagctggagctgaaggagaagaagatcaaggagctccaaaatgctggggaccggctgctgcgggaggaccacccggcccggcccacggtggagtccttccaggcggccctgcagacgcagtggagctggatgctacagctgtgctgctgtatcgaggcacacctgaaggagaacgctgcctactttcagttcttctcagatgtgcgggaggccgaggggcagttgcagaagctgcaggaggcactgcgtaggaaatacagttgtgatcgctccgccaccgtcacccggctggaggacctgctgcaggatgcccaggacgagaaggaacagctgaacgagtacaagggccacctctcaggcctggccaagcgggccaaggccgtcgtgcagctgaagccccgccacccagcccaccccatgcggggccgcctgcccctgctggccgtgtgcgactataagcaggtggaggtgactgtgcacaagggtgacgagtgccagctggtgggccctgcacagccgtcccactggaaggtgctcagcagctccggcagcgaggccgccgtgccctccgtgtgcttcctggtgcccccgcccaaccaggaggcccaggaggccgtcaccaggctggaggcccagcaccaggccctggtcacgctgtggcaccagttgcacgtggacatgaagagccttctggcctggcagagccttcgccgcgacgtgcagctcatccgctcctggtccctggccacgttccgcaccctgaagccagaggagcagcgccaagccctgcacagcctggagctgcactaccaggccttcctgcgggacagccaggacgcgggcggcttcggacccgaggaccggctgatggctgagcgcgagtacggctcctgcagccaccactaccagcagctgctgcagagcctggaacagggtgcacaggaagagtctcgctgccagcgctgcatctccgagctcaaagacatccggctgcagctggaggcctgtgagacgcgcaccgtgcaccgcctgcggctgccgctggacaaagagccggcacgggagtgtgcccagcgcatcgccgagcagcagaaggcacaggcagaggtggaggggctgggcaagggggtcgcccggctctctgccgaggccgagaaggtcttggccctaccagagccatcgcctgcggcccccacgctgcgctcggagctggagctgacgctgggcaagctggagcaggtccgcagcctgtctgccatctacctggagaagctcaagaccatcagcctggtgatccgcggcacgcagggggccgaggaggtgctcagggcccacgaggagcagctcaaggaggcccaggccgtgccggccaccctcccggagctcgaggccaccaaggcctctctgaagaagctgcgggcccaggccgaggcacagcagcccacgttcgacgccctgcgggatgagctgcggggggcacaggaggtgggggagcgactgcagcagcggcacggggagcgggacgtggaggtggagcgctggcgggagcgggtcgcccagttgcttgagcgctggcaggctgtgctggcccagaccgacgtgcggcagcgcgagctcgagcaactgggccgccagctgcgttactaccgcgagagtgcagaccccttgggcgcctggctgcaggacgccaggcggcggcaggagcagatccaggccatgccgctggccgacagccaggctgtgcgggagcagctgcggcaggagcaggccctgctggaggagatcgagcgccacggcgagaaggtcgaggagtgccagaggtttgcgaaacagtacatcaacgccatcaaggactatgaactccagctggtgacgtacaaggcgcagcttgagccggtggcctccccggccaagaagcccaaggtccagtcgggatcagagagtgtcatccaggagtacgtggacctgcgtacgcactacagcgagctgaccacactgacgagccagtacatcaagttcatcagcgagactctgcggcgcatggaggaggaggagaggctggctgagcagcagcgggcagaggagcgcgagcggctggccgaggtggaggccgcgctggagaagcagcggcagctggccgaggcgcacgcccaggcaaaggcacaggcggagcgggaggcgaaggagctgcagcagcgcatgcaggaggaggtggtgcggcgggaggaggcggcggtggacgcgcagcagcagaagcgcagcattcaggaggagctgcagcagctgcggcagagctcggaggcggagatccaggccaaggcccggcaggcagaggcggctgagcgcagccggctgcgcatcgaggaggagatccgcgtggtgcgcctgcagttggaggccaccgagcgccagcgtggcggggctgagggggagctgcaggcactgcgtgcacgggcggaggaggctgaggcacaaaagcgacaggcgcaggaggaggccgagcgcttgcggaggcaggtgcaggacgagagccagcgtaagcggcaggcggaggtggagctggcctcgcgcgtgaaggccgaggccgaggcggcgcgcgagaagcagcgggccctgcaggccctggaggagctgcggctgcaggcggaggaggcggagcggcgcctgcggcaggccgaggtggagcgagcgcggcaggtacaggtggccctggagacggcgcagcgcagtgcagaggcggagctgcagagcaaacgcgcctccttcgccgagaagacggcacagctggagcgctccctgcaggaggaacacgtggctgtggcacagctgcgggaggaggctgagcggcgggcacagcagcaggccgaggccgagcgggcgcgcgaggaggcagagcgggagctggagcgctggcagctcaaggccaacgaggcgctacggctgcggctgcaggcggaggaggtggcgcagcagaagagcctggcgcaggccgaggctgagaagcagaaggaggaggcggagcgcgaggcgcggcggcgcggcaaggcggaggagcaggccgtccggcagcgggagctggctgaacaagagctggagaagcagcggcagctggcggaaggcaccgcgcagcagcgcctggccgcggagcaggagttgatccggctgcgggccgagacggagcagggggagcagcagcggcagctgctggaggaggagctggcccggctgcagcgtgaggcggctgcagccacgcagaaacggcaggagctggaagccgagctggccaaggtgcgggccgagatggaggtgctgctggccagcaaggcgagggctgaggaggagtcgcgctccaccagcgagaagtccaagcagaggctggaggccgaggccggccggttccgcgagctggccgaggaggccgcccgcctgcgtgccctggcggaagaggccaagcggcagcggcagctggccgaggaagacgcggcgcggcagcgggccgaggcggagcgggtgcttgcggagaagctggccgccatcggcgaggccacgcggctcaagacggaggcggagatcgcgctcaaggagaaggaggcggagaacgagcgcctgcggcggctggcggaggacgaggccttccagcggcggcggctggaggagcaggccgcgcaacacaaggctgacatcgaggagcgcctggcccagctgcgcaaggcatcggacagcgagctggagcggcagaaggggctggtggaggacacgctgaggcagcggcggcaggtggaggaggagatcctggcgctgaaggcgagcttcgagaaggcggccgctggcaaggcggagctggagctggagctgggacgcatccgcagcaacgcggaggacacgctgcgcagcaaggagcaggccgagctggaggctgcgaggcagcggcagctggcggcggaggaggagcggcggcgccgtgaggctgaggagcgcgtgcagaagagcctggcggccgaggaggaggccgcacggcagcggaaggcggcgctggaggaagtcgagcggctgaaagccaaggtggaggaggcgcggcgcctgcgggagcgagcggagcaggagtcggcgcggcagctgcagctggcccaggaggccgcccagaagcggctgcaggcggaagagaaggcacacgccttcgcggtgcagcagaaggagcaggagctacagcagacgctgcagcaggagcagagcgtgctggaccagctgcgcggcgaggcggaggcggcccggcgggcggctgaggaggcggaggaggcccgggtgcaggcggagcgtgaggcggcgcagtcccggcggcaggtggaagaggccgagcggctgaagcagtcggcagaggagcaggcacaggcccgggctcaggcacaggcggctgcagagaagctgcgcaaggaggccgagcaagaggcggcgcggcgggcacaggcggagcaggcggccctgcggcagaagcaggcagctgacgcggagatggagaagcataagaaattcgccgagcagacgctgcggcagaaggcgcaggtggagcaggagctgacaacactgcggctgcagctggaggagaccgaccaccagaagaacctgctggacgaggagctgcagcggctgaaggcggaggccacggaggccgcacgccagcgcagccaggtggaggaggagctcttctcggtgcgcgtgcagatggaggagctgagcaagctcaaggcacgcatcgaggctgagaaccgcgcactcatcttgcgtgacaaggacaatacgcagcgcttcctgcaggaggaggctgagaagatgaagcaggtggcggaggaggccgcgcggctgagtgtggcggcccaagaggctgcgcgactgcggcagctggcagaggaggacctggcacagcagcgggccttggcagagaagatgctcaaggagaagatgcaggcggtgcaggaggccacgcgactcaaggctgaggcggaactgctgcagcagcagaaggagcttgcgcaggagcaggcgcggcggctgcaggaggacaaggagcagatggcgcagcagctggcggaggagacgcagggcttccagcggacgctggaggccgagcggcagcggcagctggagatgagcgctgaggctgagcgcctcaagctgcgtgtggccgagatgagccgagcccaggcccgcgctgaggaggacgcccagcgcttccggaagcaggcggaggagatcggtgagaagctgcaccgcacggagctcgccacccaggagaaggtgaccctggtgcagacactggagatccagcgacagcagagtgaccatgatgccgagcgcctgcgggaggccatcgctgagctggagcgtgagaaggagaagctccaacaggaggccaaactgctgcagctcaagtctgaggagatgcagacggtgcagcaggagcagctgctgcaggagacgcaggccctgcagcaaagcttcctctctgaaaaggacagcctgctacagcgggagcgcttcatcgagcaggagaaggccaagctggagcagctcttccaggacgaggtggccaaggcacagcagctgcgtgaggagcagcagcggcagcagcagcagatggagcaggaacggcagcggctggtggccagcatggaggaggcgcggcggcggcagcatgaggccgaggagggcgtgcggcgcaagcaggaggagctgcagcagctggagcagcagcggcggcagcaggaggagctgctggctgaggagaaccagaggctgcgtgagcagctgcagctcctggaggagcagcaccgggccgcgctggcgcactcagaggaggtcactgcctcgcaggtggctgccacaaagaccctgcccaatggccgggatgcacttgatggccccgcggcagaggcagagccggagcacagcttcgatggcctgcggcggaaggtgtcagctcagaggctgcaggaggccggcatcctgagtgcggaggagctgcagcggttggcgcagggccacaccacggtggacgagctcgcacggcgggaagacgtgcgccactacctgcagggccgcagcagtatcgcagggctgttgctgaaggccaccaatgagaagctgagtgtttacgccgccctgcagaggcagctgctgagtcccggcacggccctcatcctgctggaggcgcaggcggcctcaggcttcctgctggaccctgtgcggaaccggcggctgaccgtcaacgaggctgtgaaggagggtgtggtgggccccgagctgcaccacaagctgctgtcggccgagcgcgccgtcactggctacaaggacccctacactggccagcagatctctctcttccaagccatgcagaagggcctcatcgtccgggagcacggcatccgcctgctggaggcccagatcgccacgggcggcgttatcgaccccgtgcacagccaccgcgtgcccgtggacgtggcctaccggcgcggctacttcgacgaggagatgaaccgcgtcctggcggaccccagcgacgacaccaagggcttctttgaccccaacacgcacgagaacctcacgtacctgcagctactggagcgctgcgtggaggaccccgagacgggcctgtgccttctgccactcacggataaggctgccaagggcggggagctggtctacactgactccgaggcccgggacgtctttgagaaggccaccgtgtctgcgccgttcggcaagttccagggcaagacggtgaccatttgggagatcatcaactcggaatacttcacggcagagcagcggcgggacctgctgcggcagttccgcacgggccggatcacagtggagaagatcatcaagatcatcatcacggtggtggaggagcaggagcagaagggccggctttgctttgagggcctgcgcagcctggtgccagccgccgagctgctggagagcagggtcatcgaccgcgagctctaccagcagctgcagcgaggtgagcgctctgtgcgagacgtagccgaggtggacactgtgcggcgggctctccggggtgccaacgtcatcgcgggtgtatggctggaggaggcggggcagaagctgagtatctacaatgccctgaagaaagacctgctgccatccgacatggccgtggccctgttggaagcccaggccggcaccgggcacatcatcgaccccgccaccagcgcccggctgaccgtggacgaggcagtgcgtgctggcctggtgggccccgagtttcatgagaagctgctatcagccgagaaggctgtgacagggtacagggacccctacacagggcagagcgtctccctgttccaggccctgaagaagggcctcattccccgggagcagggcctgcgcctgttggacgcccagctgtccacgggcggcatcgtggaccccagcaagagccaccgcgtgcccctggatgtcgcctgcgcccgaggctgcctggatgaggagaccagcagggccctgtcggcaccaagggccgacgccaaggcctacagtgaccccagcacaggggagccggccacctacggcgagctccagcagcggtgccggcccgaccagctgaccgggctgagcctgctgccgctctcagaaaaggctgctcgggcccggcaggaggagctctactcagagctgcaggcccgtgagacctttgaaaagaccccggttgaggtccccgtgggtggcttcaagggcaggacggtgacggtgtgggagctcatcagctctgagtacttcactgcggagcagcggcaggagctgttgcgtcagttccgcacgggcaaggtcaccgtggagaaggtcatcaagattctcattaccatcgtggaggaggtggagaccctgcggcaggagaggctgtccttcagcggcctccgtgcccctgtgccagccagcgagctcctggcttccggggtcctcagcagagcccagtttgagcagctcaaggacggcaagacgacggtcaaggacctttcggagctgggctccgtgcggacgctgctgcagggcagtggctgcctcgccggcatctacctggaggacaccaaggagaaggtgtccatctacgaggccatgcgccggggcctgctgagagccacaacggctgcgctcctgctggaggcgcaggcggccactggcttcctggtggaccccgtgcggaaccagcgcctgtatgtccacgaggccgtgaaggcgggcgtggtgggccccgagcttcacgagcagctgctgtctgccgagaaggccgtcaccggctacagagacccctactcgggcagcaccatctccctcttccaggccatgcagaagggcctggttctccggcagcacggcatccgcctgctggaggcccagatcgccacgggcggcatcatcgaccccgtgcacagccaccgcgtgcctgtggacgtggcctaccagcgcggctacttcagtgaggagatgaaccgcgtcctggcggaccccagcgacgacaccaagggcttctttgaccccaacacgcatgagaacctcacgtacaggcagctgctggagcggtgcgtggaggaccccgagacgggcttgcgccttctgccactgaaaggggcggagaaggctgaggtggtggagaccacgcaggtgtacactgaggaggagacaagaagggcatttgaagagacacagatcgacattcccggcggcggcagccacggcggctccaccatgtccctgtgggaggtgatgcagtcggacctgatccccgaggagcagcgggcccagctgatggctgacttccaggccggccgggtgaccaaggaacgcatgatcatcatcatcatcgagatcattgagaagacagagatcatccgccagcagggtctggcctcctacgactacgtgcgccgccgcctcacggctgaggacctgttcgaggctcggatcatctctctcgagacctacaacctgctccgggagggcaccaggagcctccgtgaggctctcgaggcggagtccgcctggtgctacctctatggcacgggctccgtggctggtgtctacctgcccggttccaggcagacactgagcatctaccaggctctcaagaaagggctgctgagtgccgaggtggcccgcctgctgctggaggcacaggcagccacaggcttcctgctggacccggtgaagggggagcggctgactgtggatgaggctgtgcggaagggcctcgtggggcccgagctgcacgaccgcctgctctcggctgagcgggcggtcaccggctaccgtgacccctacaccgagcagaccatctcgctcttccaggccatgaagaaggagctgatccctactgaggaggccctgcggctgctggatgcccagctggccaccggcggcatcgtggacccccgcctgggcttccaccttcccctggaggtggcttaccagcgtggctacctcaacaaggacacgcacgaccagctgtcagagcccagcgaggtgcgcagctacgtggacccgtccaccgacgagcgcctcagctacacgcagctgctcaggcggtgccgtcgtgacgacggcaccggccagctgctcctgccactgtcggacgcccgcaagctgaccttccgtggcctgcggaagcagatcaccatggaggagctggtgcgctcgcaggtcatggacgaggccacggcgctgcagctgcgggagggcctgacctccatcgaggaggtcaccaagaacttgcagaagttcctggaaggcaccagctgcatcgctggtgtcttcgtggacgccaccaaggaacggctctcggtgtaccaggccatgaagaagggcatcatccgccccggcacagcctttgagctcctggaggcgcaggcggccaccggttacgtcatcgaccccatcaagggactgaagctgacggtggaggaggctgtgcgtatgggcattgtgggccccgagttcaaggacaagctgctgtcggccgagcgcgccgtcactgggtacaaggacccctactctgggaagctcatctccctcttccaggccatgaagaagggcctgatcctgaaggaccatggcatccgcctgctggaggcccagatcgccacgggcggcatcatcgaccctgaggagagccaccggctgcccgtggaggtggcctacaagcgcggcctcttcgatgaggagatgaacgagatcctgaccgacccctcggacgacaccaagggcttctttgaccctaacacggaggagaacctcacctacctgcagctgatggagcgttgtatcactgacccccagacgggcctgtgtctcttgccgctgaaggagaagaagcgggagcggaagacgtcctccaagtcctccgtgcgcaagcgccgagtggtcatcgtggaccccgagacgggcaaggagatgtcagtgtacgaggcctaccgcaagggcctgattgaccaccagacgtacctggagctgtccgagcaggagtgcgagtgggaggagatcaccatctcctcctcggacggcgtggtcaagtccatgatcatcgaccgccgctccgggcgccagtacgacatcgatgatgccatcgccaagaacctcatcgaccgctcggcactggaccagtaccgcgccggcacgctctccatcaccgagttcgccgacatgctctcgggcaacgccggtggtttccgctcccgttcctcctcggtgggatcctcctcctcctaccccatcagccccgccgtctccaggacccagctggcctcctggtcagaccccactgaggagacgggccccgtggctggcatcctggacacggagacgctggagaaggtgtccatcaccgaggccatgcaccggaacctggtggataacatcacggggcagcggctgctggaggcgcaggcctgcaccgggggcatcatcgaccccagcaccggtgagcgcttccctgtcaccgacgccgtcaacaagggcctggtggacaagatcatggtggaccgcatcaacctggcccagaaggccttctgcggcttcgaggacccacgcaccaagaccaagatgtcggccgcccaggccctgaagaagggctggctctactacgaggccggccagcgcttcctggaggtgcagtacctgaccggcggcttgatcgagcccgacacgccgggccgcgtgcccctggacgaggccctgcagcgcggcacggtggacgcccgcaccgcacagaagctgcgtgacgtgggcgcctactccaagtacctcacctgccctaagaccaagctcaagatctcctataaggacgcgctggaccgcagcatggtggaggagggcacggggctgcggctgctggaggctgccgcgcagtccaccaagggctactacagcccctacagcgtcagcggctccggctctaccgctggctcccgcaccggctcgcgcaccggctcccgggccggctcccgccgcggcagctttgacgccaccggctccggcttctccatgaccttctcttcatcctcctactcctcctcgggctacggccgccgctacgcctcggggtcctcggcctccctggggggccctgagtctgccgtggcctgaggctgcctgcgcccaccccgctctgcatgcggcccagcccggctcccaccgaggcgcgggggccgttttcaacgcttaaaggtgtcttcctcccaagtggtgcctaaagtttaaccaaaaagaccagactaatatattaatatatatctgctgtccagacagcctgtatcttgggggacagggctggcccagccctgctggccgcctcaccccctcgggtctcctcactcccttctacctgccactcacacagccaggtgccttggagggtcccaagctgggccccagcccaccctcctgtcttcccagggtagcccgcctgccagtcctagctgcacagggcagctgggcccaaccctgtctgtagagggccctggtgtttctagcactggcctgcacggtgggccttgctggggacggggggccccagtcagcctctctcccagtctacccagagaagccccttccccatgggaagacgaggccctcgggcccagcccccacagtgctgtctgatctgtgctttccagctcaccccccacactcactcctgagacccctggcctccggcgtcagcctccagcctctgttcccctagtaagtgccttccatgtcggcctctaaccccaggccccgaggacccagacccagtggggaggcggacgttccagccggcatggctgggaactgcagacctgtcctcctggtgggtccaggggcccctccagcttgtggagccccacactggggtgccgcctgcccgtctctctcccatggagccccagccccctttgggcccagggacaccagccaggctctgtgctgaccctcctgttgcacccagccctggtctcagcagcgaccacccctgcctccaccctctgagctttgcatgttccactaaccccgggcgggtggcaggtggaggtgtcaggctgctggcgcctctgcaagggcagaacactaacctgaccgtgggcggggccttgcggtatccgcccccaataaaagcaattccaaccttagtctggctgcggcggcagagctgaagtgagcggagccaccaggaggccatgtcgggtgaggacgctgaggtccgggcagtctctgaagatgtctccaatggaagcagtggctcgcccagccctggggacacactgccctggaaccttgggaaaacgcagcggagccggcgcagcgggggtggcgctgggagcaacgggagtgtcctggacccagctgagcgggcggtcattcgcatcgcagatgagcgggatcgtgtgcagaagaaaaccttcaccaagtgggtcaacaagcacctcatcaaggcccagaggcacatcagtgacctgtatgaagacctccgcgatggccacaacctcatctccctgctggaggtcctctcgggggacagcctgccccgggagaaggggaggatgcgtttccacaagctgcagaatgtccagattgccctggactacctccggcaccgccaggtgaagctggtgaacatcaggaatgatgacatcgctgacggcaaccccaagctgacccttggcctcatctggacaatcattctgcacttccagatctcagatatccaggtgagtgggcagtcggaggacatgacggccaaggagaagctgctgctgtggtcgcagcgaatggtggaggggtaccagggcctgcgatgcgacaacttcacctccagctggagagacggccgcctcttcaatgccatcatccaccggcacaagcccctgctcatcgacatgaacaaggtgtaccggcagaccaacctggagaacctggaccaggccttctctgtggcggagcgggacctgggagtgacgcggctcctggaccctgaggacgtggatgtccctcagcccgacgagaagtccatcatcacctacgtctcgtcgctgtatgacgccatgccccgcgtgccggacgtgcaggatggggtgagggccaacgagctgcagctgcgctggcaggagtaccgggagctggtgctgctgctgcttcagtggatgcgacaccacacggccgcctttgaggaacgcaggttcccctccagcttcgaggagattgagatcctgtggtctcagttcctgaagtttaaggagatggagctaccagccaaggaggccgacaagaacaggtccaagggcatctaccaatccctggagggagcggtgcaagcaggccagctcaaggtgccccctggctaccacccgctggatgtggagaaggagtggggcaagctgcacgtggccatcctggagcgggagaagcagctccgcagcgagtttgagaggctggagtgtcttcagcgcatcgtgaccaagctgcagatggaggcggggctgtgtgaggagcagctgaaccaggccgacgccctgctgcagtcggatgtccggctgctggctgcaggcaaagtgccacagcgggcgggggaggtggaacgggacttggacaaggcggatagcatgatccggctgctcttcaacgacgtgcagaccctcaaggatggacggcacccgcagggcgagcagatgtaccgcagggtgtaccgtctgcacgagcgcctggtagccatccgcaccgagtacaacctacggctgaaggcaggcgtggcggcccctgcaacccaggtggcccaggtgactctgcagagtgtgcagaggcgccccgagctggaggactccactctgcgctacctgcaggacctgctggcctgggtggaggagaaccagcaccgtgtggatggcgctgagtggggtgtggacctgcccagcgtggaggcgcagctgggcagccaccgaggcctgcaccagtccat

SEQ ID NO: 674 - DNA, 1101 bp, Homo sapiens
  misc_feature (625)..(625): second gene starts at position 625
atgggaggggccgtggtggacgagggccccacaggcgtcaaggcccctgacggcggctggggctgggccgtgctcttcggctgtttcgtcatcactggcttctcctacgccttccccaaggccgtcagtgtcttcttcaaggagctcatacaggagtttgggatcggctacagcgacacagcctggatctcctccatcctgctggccatgctctacgggacaggtccgctctgcagtgtgtgcgtgaaccgctttggctgccggcccgtcatgcttgtggggggtctctttgcgtcgctgggcatggtggctgcgtccttttgccggagcatcatccaggtctacctcaccactggggtcatcacggggttgggtttggcactcaacttccagccctcgctcatcatgctgaaccgctacttcagcaagcggcgccccatggccaacgggctggcggcagcaggtagccctgtcttcctgtgtgccctgagcccgctggggcagctgctgcaggaccgctacggctggcggggcggcttcctcatcctgggcggcctgctgctcaactgctgcgtgtgtgccgcactcatgaggcccctggtggtcacggcccagccgggctcgcggccccccgccccgcccccaccccgcccccaggcctaaatgtgcacagcatgctcaagcaccagacgctggtcctgacgctgcccaccgtcgccttcctggaggacaagctgctctggcaggactcacgttacagacccctctaccccttcagcctgccctacagcgacttcccccgacccctaccccacgctacccagggcccagcggccaccccgtaccactgttgatgtgaagcacctcttctgagccaggccgagcccctggccgacttgggagcctcaggcccacgcccacccttcgaggaaggtgtcacctggaccccttcattccacggaggaagctgaggccacagggagcggccatcgccattgggaaggggcgactccacggaaagcccagacgggcttctgcatccattccctctttttgtttttaaaataaattgtatttttgaatcaaggaggataaagataa

SEQ ID NO: 675 - DNA, 1101 bp, Homo sapiens; identical to SEQ ID NO: 674
  misc_feature (625)..(625): second gene starts at position 625

SEQ ID NO: 676 - DNA, 1101 bp, Homo sapiens; identical to SEQ ID NO: 674
  misc_feature (625)..(625): second gene starts at position 625

SEQ ID NO: 677 - DNA, 32765 bp, Homo sapiens
  misc_feature (977)..(977): second gene starts at position 977
atgagcttcaccactcgctccaccttctccaccaactaccggtccctgggctctgtccaggcgcccagctacggcgcccggccggtcagcagcgcggccagcgtctatgcaggcgctgggggctctggttcccggatctccgtgtcccgctccaccagcttcaggggcggcatggggtccgggggcctggccaccgggatagccgggggtctggcaggaatgggaggcatccagaacgagaaggagaccatgcaaagcctgaacgaccgcctggcctcttacctggacagagtgaggagcctggagaccgagaaccggaggctggagagcaaaatccgggagcacttggagaagaagggaccccaggtcagagactggagccattacttcaagatcatcgaggacctgagggctcagatcttcgcaaatactgtggacaatgcccgcatcgttctgcagattgacaatgcccgtcttgctgctgatgactttagagtcaagtatgagacagagctggccatgcgccagtctgtggagaacgacatccatgggctccgcaaggtcattgatgacaccaatatcacacgactgcagctggagacagagatcgaggctctcaaggaggagctgctcttcatgaagaagaaccacgaagaggaagtaaaaggcctacaagcccagattgccagctctgggttgaccgtggaggtagatgcccccaaatctcaggacctcgccaagatcatggcagacatccgggcccaatatgacgagctggctcggaagaaccgagaggagctagacaagtactggtctcagcagattgaggagagcaccacagtggtcaccacacagtctgctgaggttggagctgctgagacgacgctcacagagctgagacgtacagtccagtccttggagatcgacctggactccatgagaaatctgaaggccagcttggagaacagcctgagggtggagaagcagcggcagctggccgaggcgcacgcccaggcaaaggcacaggcggagcgggaggcgaaggagctgcagcagcgcatgcaggaggaggtggtgcggcgggaggaggcggcggtggacgcgcagcagcagaagcgcagcattcaggaggagctgcagcagctgcggcagagctcggaggcggagatccaggccaaggcccggcaggcagaggcggctgagcgcagccggctgcgcatcgaggaggagatccgcgtggtgcgcctgcagttggaggccaccgagcgccagcgtggcggggctgagggggagctgcaggcactgcgtgcacgggcggaggaggctgaggcacaaaagcgacaggcgcaggaggaggccgagcgcttgcggaggcaggtgcaggacgagagccagcgtaagcggcaggcggaggtggagctggcctcgcgcgtgaaggccgaggccgaggcggcgcgcgagaagcagcgggccctgcaggccctggaggagctgcggctgcaggcggaggaggcggagcggcgcctgcggcaggccgaggtggagcgagcgcggcaggtacaggtggccctggagacggcgcagcgcagtgcagaggcggagctgcagagcaaacgcgcctccttcgccgagaagacggcacagctggagcgctccctgcaggaggaacacgtggctgtggcacagctgcgggaggaggctgagcggcgggcacagcagcaggccgaggccgagcgggcgcgcgaggaggcagagcgggagctggagcgctggcagctcaaggccaacgaggcgctacggctgcggctgcaggcggaggaggtggcgcagcagaagagcctggcgcaggccgaggctgagaagcagaaggaggaggcggagcgcgaggcgcggcggcgcggcaaggcggaggagcaggccgtccggcagcgggagctggctgaacaagagctggagaagcagcggcagctggcggaaggcaccgcgcagcagcgcctggccgcggagcaggagttgatccggctgcgggccgagacggagcagggggagcagcagcggcagctgctggaggaggagctggcccggctgcagcgtgaggcggctgcagccacgcagaaacggcaggagctggaagccgagctggccaaggtgcgggccgagatggaggtgctgctggccagcaaggcgagggctgaggaggagtcgcgctccaccagcgagaagtccaagcagaggctggaggccgaggccggccggttccgcgagctggccgaggaggccgcccgcctgcgtgccctggcggaagaggccaagcggcagcggcagctggccgaggaagacgcggcgcggcagcgggccgaggcggagcgggtgcttgcggagaagctggccgccatcggcgaggccacgcggctcaagacggaggcggagatcgcgctcaaggagaaggaggcggagaacgagcgcctgcggcggctggcggaggacgaggccttccagcggcggcggctggaggagcaggccgcgcaacacaaggctgacatcgaggagcgcctggcccagctgcgcaaggcatcggacagcgagctggagcggcagaaggggctggtggaggacacgctgaggcagcggcggcaggtggaggaggagatcctggcgctgaaggcgagcttcgagaaggcggccgctggcaaggcggagctggagctggagctgggacgcatccgcagcaacgcggaggacacgctgcgcagcaaggagcaggccgagctggaggctgcgaggcagcggcagctggcggcggaggaggagcggcggcgccgtgaggctgaggagcgcgtgcagaagagcctggcggccgaggaggaggccgcacggcagcggaaggcggcgctggaggaagtcgagcggctgaaagccaaggtggaggaggcgcggcgcctgcgggagcgagcggagcaggagtcggcgcggcagctgcagctggcccaggaggccgcccagaagcggctgcaggcggaagagaaggcacacgccttcgcggtgcagcagaaggagcaggagctacagcagacgctgcagcaggagcagagcgtgctggaccagctgcgcggcgaggcggaggcggcccggcgggcggctgaggaggcggaggaggcccgggtgcaggcggagcgtgaggcggcgcagtcccggcggcaggtggaagaggccgagcggctgaagcagtcggcagaggagcaggcacaggcccgggctcaggcacaggcggctgcagagaagctgcgcaaggaggccgagcaagaggcggcgcggcgggcacaggcggagcaggcggccctgcggcagaagcaggcagctgacgcggagatggagaagcataagaaattcgccgagcagacgctgcggcagaaggcgcaggtggagcaggagctgacaacactgcggctgcagctggaggagaccgaccaccagaagaacctgctggacgaggagctgcagcggctgaaggcggaggccacggaggccgcacgccagcgcagccaggtggaggaggagctcttctcggtgcgcgtgcagatggaggagctgagcaagctcaaggcacgcatcgaggctgagaaccgcgcactcatcttgcgtgacaaggacaatacgcagcgcttcctgcaggaggaggctgagaagatgaagcaggtggcggaggaggccgcgcggctgagtgtggcggcccaagaggctgcgcgactgcggcagctggcagaggaggacctggcacagcagcgggccttggcagagaagatgctcaaggagaagatgcaggcggtgcaggaggccacgcgactcaaggctgaggcggaactgctgcagcagcagaaggagcttgcgcaggagcaggcgcggcggctgcaggaggacaaggagcagatggcgcagcagctggcggaggagacgcagggcttccagcggacgctggaggccgagcggcagcggcagctggagatgagcgctgaggctgagcgcctcaagctgcgtgtggccgagatgagccgagcccaggcccgcgctgaggaggacgcccagcgcttccggaagcaggcggaggagatcggtgagaagctgcaccgcacggagctcgccacccaggagaaggtgaccctggtgcagacactggagatccagcgacagcagagtgaccatgatgccgagcgcctgcgggaggccatcgctgagctggagcgtgagaaggagaagctccaacaggaggccaaactgctgcagctcaagtctgaggagatgcagacggtgcagcaggagcagctgctgcaggagacgcaggccctgcagcaaagcttcctctctgaaaaggacagcctgctacagcgggagcgcttcatcgagcaggagaaggccaagctggagcagctcttccaggacgaggtggccaaggcacagcagctgcgtgaggagcagcagcggcagcagcagcagatggagcaggaacggcagcggctggtggccagcatggaggaggcgcggcggcggcagcatgaggccgaggagggcgtgcggcgcaagcaggaggagctgcagcagctggagcagcagcggcggcagcaggaggagctgctggctgaggagaaccagaggctgcgtgagcagctgcagctcctggaggagcagcaccgggccgcgctggcgcactcagaggaggtcactgcctcgcaggtggctgccacaaagaccctgcccaatggccgggatgcacttgatggccccgcggcagaggcagagccggagcacagcttcgatggcctgcggcggaaggtgtcagctcagaggctgcaggaggccggcatcctgagtgcggaggagctgcagcggttggcgcagggccacaccacggtggacgagctcgcacggcgggaagacgtgcgccactacctgcagggccgcagcagtatcgcagggctgttgctgaaggccaccaatgagaagctgagtgtttacgccgccctgcagaggcagctgctgagtcccggcacggccctcatcctgctggaggcgcaggcggcctcaggcttcctgctggaccctgtgcggaaccggcggctgaccgtcaacgaggctgtgaaggagggtgtggtgggccccgagctgcaccacaagctgctgtcggccgagcgcgccgtcactggctacaaggacccctacactggccagcagatctctctcttccaagccatgcagaagggcctcatcgtccgggagcacggcatccgcctgctggaggcccagatcgccacgggcggcgttatcgaccccgtgcacagccaccgcgtgcccgtggacgtggcctaccggcgcggctacttcgacgaggagatgaaccgcgtcctggcggaccccagcgacgacaccaagggcttctttgaccccaacacgcacgagaacctcacgtacctgcagctactggagcgctgcgtggaggaccccgagacgggcctgtgccttctgccactcacggataaggctgccaagggcggggagctggtctacactgactccgaggcccgggacgtctttgagaaggccaccgtgtctgcgccgttcggcaagttccagggcaagacggtgaccatttgggagatcatcaactcggaatacttcacggcagagcagcggcgggacctgctgcggcagttccgcacgggccggatcacagtggagaagatcatcaagatcatcatcacggtggtggaggagcaggagcagaagggccggctttgctttgagggcctgcgcagcctggtgccagccgccgagctgctggagagcagggtcatcgaccgcgagctctaccagcagctgcagcgaggtgagcgctctgtgcgagacgtagccgaggtggacactgtgcggcgggctctccggggtgccaacgtcatcgcgggtgtatggctggaggaggcggggcagaagctgagtatctacaatgccctgaagaaagacctgctgccatccgacatggccgtggccctgttggaagcccaggccggcaccgggcacatcatcgaccccgccaccagcgcccggctgaccgtggacgaggcagtgcgtgctggcctggtgggccccgagtttcatgagaagctgctatcagccgagaaggctgtgacagggtacagggacccctacacagggcagagcgtctccctgttccaggccctgaagaagggcctcattccccgggagcagggcctgcgcctgttggacgcccagctgtccacgggcggcatcgtggaccccagcaagagccaccgcgtgcccctggatgtcgcctgcgcccgaggctgcctggatgaggagaccagcagggccctgtcggcaccaagggccgacgccaaggcctacagtgaccccagcacaggggagccggccacctacggcgagctccagcagcggtgccggcccgaccagctgaccgggctgagcctgctgccgctctcagaaaaggctgctcgggcccggcaggaggagctctactcagagctgcaggcccgtgagacctttgaaaagaccccggttgaggtccccgtgggtggcttcaagggcaggacggtgacggtgtgggagctcatcagctctgagtacttcactgcggagcagcggcaggagctgttgcgtcagttccgcacgggcaaggtcaccgtggagaaggtcatcaagattctcattaccatcgtggaggaggtggagaccctgcggcaggagaggctgtccttcagcggcctccgtgcccctgtgccagccagcgagctcctggcttccggggtcctcagcagagcccagtttgagcagctcaaggacggcaagacgacggtcaaggacctttcggagctgggctccgtgcggacgctgctgcagggcagtggctgcctcgccggcatctacctggaggacaccaaggagaaggtgtccatctacgaggccatgcgccggggcctgctgagagccacaacggctgcgctcctgctggaggcgcaggcggccactggcttcctggtggaccccgtgcggaaccagcgcctgtatgtccacgaggccgtgaaggcgggcgtggtgggccccgagcttcacgagcagctgctgtctgccgagaaggccgtcaccggctacagagacccctactcgggcagcaccatctccctcttccaggccatgcagaagggcctggttctccggcagcacggcatccgcctgctggaggcccagatcgccacgggcggcatcatcgaccccgtgcacagccaccgcgtgcctgtggacgtggcctaccagcgcggctacttcagtgaggagatgaaccgcgtcctggcggaccccagcgacgacaccaagggcttctttgaccccaacacgcatgagaacctcacgtacaggcagctgctggagcggtgcgtggaggaccccgagacgggcttgcgccttctgccactgaaaggggcggagaaggctgaggtggtggagaccacgcaggtgtacactgaggaggagacaagaagggcatttgaagagacacagatcgacattcccggcggcggcagccacggcggctccaccatgtccctgtgggaggtgatgcagtcggacctgatccccgaggagcagcgggcccagctgatggctgacttccaggccggccgggtgaccaaggaacgcatgatcatcatcatcatcgagatcattgagaagacagagatcatccgccagcagggtctggcctcctacgactacgtgcgccgccgcctcacggctgaggacctgttcgaggctcggatcatctctctcgagacctacaacctgctccgggagggcaccaggagcctccgtgaggctctcgaggcggagtccgcctggtgctacctctatggcacgggctccgtggctggtgtctacctgcccggttccaggcagacactgagcatctaccaggctctcaagaaagggctgctgagtgccgaggtggcccgcctgctgctggaggcacaggcagccacaggcttcctgctggacccggtgaagggggagcggctgactgtggatgaggctgtgcggaagggcctcgtggggcccgagctgcacgaccgcctgctctcggctgagcgggcggtcaccggctaccgtgacccctacaccgagcagaccatctcgctcttccaggccatgaagaaggagctgatccctactgaggaggccctgcggctgctggatgcccagctggccaccggcggcatcgtggacccccgcctgggcttccaccttcccctggaggtggcttaccagcgtggctacctcaacaaggacacgcacgaccagctgtcagagcccagcgaggtgcgcagctacgtggacccgtccaccgacgagcgcctcagctacacgcagctgctcaggcggtgccgtcgtgacgacggcaccggccagctgctcctgccactgtcggacgcccgcaagctgaccttccgtggcctgcggaagcagatcaccatggaggagctggtgcgctcgcaggtcatggacgaggccacggcgctgcagctgcgggagggcctgacctccatcgaggaggtcaccaagaacttgcagaagttcctggaaggcaccagctgcatcgctggtgtcttcgtggacgccaccaaggaacggctctcggtgtaccaggccatgaagaagggcatcatccgccccggcacagcctttgagctcctggaggcgcaggcggccaccggttacgtcatcgaccccatcaagggactgaagctgacggtggaggaggctgtgcgtatgggcattgtgggccccgagttcaaggacaagctgctgtcggccgagcgcgccgtcactgggtacaaggacccctactctgggaagctcatctccctcttccaggccatgaagaagggcctgatcctgaaggaccatggcatccgcctgctggaggcccagatcgccacgggcggcatcatcgaccctgaggagagccaccggctgcccgtggaggtggcctacaagcgcggcctcttcgatgaggagatgaacgagatcctgaccgacccctcggacgacaccaagggcttctttgaccctaacacggaggagaacctcacctacctgcagctgatggagcgttgtatcactgacccccagacgggcctgtgtctcttgccgctgaaggagaagaagcgggagcggaagacgtcctccaagtcctccgtgcgcaagcgccgagtggtcatcgtggaccccgagacgggcaaggagatgtcagtgtacgaggcctaccgcaagggcctgattgaccaccagacgtacctggagctgtccgagcaggagtgcgagtgggaggagatcaccatctcctcctcggacggcgtggtcaagtccatgatcatcgaccgccgctccgggcgccagtacgacatcgatgatgccatcgccaagaacctcatcgaccgctcggcactggaccagtaccgcgccggcacgctctccatcaccgagttcgccgacatgctctcgggcaacgccggtggtttccgctcccgttcctcctcggtgggatcctcctcctcctaccccatcagccccgccgtctccaggacccagctggcctcctggtcagaccccactgaggagacgggccccgtggctggcatcctggacacggagacgctggagaaggtgtccatcaccgaggccatgcaccggaacctggtggataacatcacggggcagcggctgctggaggcgcaggcctgcaccgggggcatcatcgaccccagcaccggtgagcgcttccctgtcaccgacgccgtcaacaagggcctggtggacaagatcatggtggaccgcatcaacctggcccagaaggccttctgcggcttcgaggacccacgcaccaagaccaagatgtcggccgcccaggccctgaagaagggctggctctactacgaggccggccagcgcttcctggaggtgcagtacctgaccggcggcttgatcgagcccgacacgccgggccgcgtgcccctggacgaggccctgcagcgcggcacggtggacgcccgcaccgcacagaagctgcgtgacgtgggcgcctactccaagtacctcacctgccctaagaccaagctcaagatctcctataaggacgcgctggaccgcagcatggtggaggagggcacggggctgcggctgctggaggctgccgcgcagtccaccaagggctactacagcccctacagcgtcagcggctccggctctaccgctggctcccgcaccggctcgcgcaccggctcccgggccggctcccgccgcggcagctttgacgccaccggctccggcttctccatgaccttctcttcatcctcctactcctcctcgggctacggccgccgctacgcctcggggtcctcggcctccctggggggccctgagtctgccgtggcctgaggctgcctgcgcccaccccgctctgcatgcggcccagcccggctcccaccgaggcgcgggggccgttttcaacgcttaaaggtgtcttcctcccaagtggtgcctaaagtttaaccaaaaagaccagactaatatattaatatatatctgctgtccagacagcctgtatcttgggggacagggctggcccagccctgctggccgcctcaccccctcgggtctcctcactcccttctacctgccactcacacagccaggtgccttggagggtcccaagctgggccccagcccaccctcctgtcttcccagggtagcccgcctgccagtcctagctgcacagggcagctgggcccaaccctgtctgtagagggccctggtgtttctagcactggcctgcacggtgggccttgctggggacggggggccccagtcagcctctctcccagtctacccagagaagccccttccccatgggaagacgaggccctcgggcccagcccccacagtgctgtctgatctgtgctttccagctcaccccccacactcactcctgagacccctggcctccggcgtcagcctccagcctctgttcccctagtaagtgccttccatgtcggcctctaaccccaggccccgaggacccagacccagtggggaggcggacgttccagccggcatggctgggaactgcagacctgtcctcctggtgggtccaggggcccctccagcttgtggagccccacactggggtgccgcctgcccgtctctctcccatggagccccagccccctttgggcccagggacaccagccaggctctgtgctgaccctcctgttgcacccagccctggtctcagcagcgaccacccctgcctccaccctctgagctttgcatgttccactaaccccgggcgggtggcaggtggaggtgtcaggctgctggcgcctctgcaagggcagaacactaacctgaccgtgggcggggccttgcggtatccgcccccaataaaagcaattccaaccttcctccgaggggcctgtgacctcccacacccctggcccgctccgtctgccccgtgggctcctgccaccgtccccgatgaagatcgtgcccgatgagcgggatcgtgtgcagaagaaaaccttcaccaagtgggtcaacaagcacctcatcaaggcccagaggcacatcagtgacctgtatgaagacctccgcgatggccacaacctcatctccctgctggaggtcctctcgggggacagcctgccccgggagaaggggaggatgcgtttccacaagctgcagaatgtccagattgccctggactacctccggcaccgccaggtgaagctggtgaacatcaggaatgatgacatcgctgacggcaaccccaagctgacccttggcctcatctggacaatcattctgcacttccagatctcagatatccaggtgagtgggcagtcggaggacatgacggccaaggagaagctgctgctgtggtcgcagcgaatggtggaggggtaccagggcctgcgatgcgacaacttcacctccagctggagagacggccgcctcttcaatgccatcatccaccggcacaagcccctgctcatcgacatgaacaaggtgtaccggcagaccaacctggagaacctggaccaggccttctctgtggcggagcgggacctgggagtgacgcggctcctggaccctgaggacgtggatgtccctcagcccgacgagaagtccatcatcacctacgtctcgtcgctgtatgacgccatgccccgcgtgccggacgtgcaggatggggtgagggccaacgagctgcagctgcgctggcaggagtaccgggagctggtgctgctgctgcttcagtggatgcgacaccacacggccgcctttgaggaacgcaggttcccctccagcttcgaggagattgagatcctgtggtctcagttcctgaagtttaaggagatggagctaccagccaaggaggccgacaagaacaggtccaagggcatctaccaatccctggagggagcggtgcaagcaggccagctcaaggtgccccctggctaccacccgctggatgtggagaaggagtggggcaagctgcacgtggccatcctggagcgggagaagcagctccgcagcgagtttgagaggctggagtgtcttcagcgcatcgtgaccaagctgcagatggaggcggggctgtgtgaggagcagctgaaccaggccgacgccctgctgcagtcggatgtccggctgctggctgcaggcaaagtgccacagcgggcgggggaggtggaacgggacttggacaaggcggatagcatgatccggctgctcttcaacgacgtgcagaccctcaaggatggacggcacccgcagggcgagcagatgtaccgcagggtgtaccgtctgcacgagcgcctggtagccatccgcaccgagtacaacctacggctgaaggcaggcgtggcggcccctgcaacccaggtggcccaggtgactctgcagagtgtgcagaggcgccccgagctggaggactccactctgcgctacctgcaggacctgctggcctgggtggaggagaaccagcaccgtgtggatggcgctgagtggggtgtggacctgcccagcgtggaggcgcagctgggcagccaccgaggcctgcaccagtccatcgaagaattccgggccaagatcgagcgggcacggagtgacgagggccagctctcccccgccacccggggtgcctaccgtgactgcctgggtcggctggacctgcagtacgccaagctgctgaactcctccaaggcccgcctcaggtccctggagagcttgcacagctttgtggcagccgccactaaggagctaatgtggctgaatgagaaggaggaggaggaggtgggcttcgactggagcgaccgcaacaccaacatgaccgccaagaaggagagctactcggcgctgatgcgggagctggagctgaaggagaagaagatcaaggagctccaaaatgctggggaccggctgctgcgggaggaccacccggcccggcccacggtggagtccttccaggcggccctgcagacgcagtggagctggatgctacagctgtgctgctgtatcgaggcacacctgaaggagaacgctgcctactttcagttcttctcagatgtgcgggaggccgaggggcagttgcagaagctgcaggaggcactgcgtaggaaatacagttgtgatcgctccgccaccgtcacccggctggaggacctgctgcaggatgcccaggacgagaaggaacagctgaacgagtacaagggccacctctcaggcctggccaagcgggccaaggccgtcgtgcagctgaagccccgccacccagcccaccccatgcggggccgcctgcccctgctggccgtgtgcgactataagcaggtggaggtgactgtgcacaagggtgacgagtgccagctggtgggccctgcacagccgtcccactggaaggtgctcagcagctccggcagcgaggccgccgtgccctccgtgtgcttcctggtgcccccgcccaaccaggaggcccaggaggccgtcaccaggctggaggcccagcaccaggccctggtcacgctgtggcaccagttgcacgtggacatgaagagccttctggcctggcagagccttcgccgcgacgtgcagctcatccgctcctggtccctggccacgttccgcaccctgaagccagaggagcagcgccaagccctgcacagcctggagctgcactaccaggccttcctgcgggacagccaggacgcgggcggcttcggacccgaggaccggctgatggctgagcgcgagtacggctcctgcagccaccactaccagcagctgctgcagagcctggaacagggtgcacaggaagagtctcgctgccagcgctgcatctccgagctcaaagacatccggctgcagctggaggcctgtgagacgcgcaccgtgcaccgcctgcggctgccgctggacaaagagccggcacgggagtgtgcccagcgcatcgccgagcagcagaaggcacaggcagaggtggaggggctgggcaagggggtcgcccggctctctgccgaggccgagaaggtcttggccctaccagagccatcgcctgcggcccccacgctgcgctcggagctggagctgacgctgggcaagctggagcaggtccgcagcctgtctgccatctacctggagaagctcaagaccatcagcctggtgatccgcggcacgcagggggccgaggaggtgctcagggcccacgaggagcagctcaaggaggcccaggccgtgccggccaccctcccggagctcgaggccaccaaggcctctctgaagaagctgcgggcccaggccgaggcacagcagcccacgttcgacgccctgcgggatgagctgcggggggcacaggaggtgggggagcgactgcagcagcggcacggggagcgggacgtggaggtggagcgctggcgggagcgggtcgcccagttgcttgagcgctggcaggctgtgctggcccagaccgacgtgcggcagcgcgagctcgagcaactgggccgccagctgcgttactaccgcgagagtgcagaccccttgggcgcctggctgcaggacgccaggcggcggcaggagcagatccaggccatgccgctggccgacagccaggctgtgcgggagcagctgcggcaggagcaggccctgctggaggagatcgagcgccacggcgagaaggtcgaggagtgccagaggtttgcgaaacagtacatcaacgccatcaaggactatgaactccagctggtgacgtacaaggcgcagcttgagccggtggcctccccggccaagaagcccaaggtccagtcgggatcagagagtgtcatccaggagtacgtggacctgcgtacgcactacagcgagctgaccacactgacgagccagtacatcaagttcatcagcgagactctgcggcgcatggaggaggaggagaggctggctgagcagcagcgggcagaggagcgcgagcggctggccgaggtggaggccgcgctggagaagcagcggcagctggccgaggcgcacgcccaggcaaaggcacaggcggagcgggaggcgaaggagctgcagcagcgcatgcaggaggaggtggtgcggcgggaggaggcggcggtggacgcgcagcagcagaagcgcagcattcaggaggagctgcagcagctgcggcagagctcggaggcggagatccaggccaaggcccggcaggcagaggcggctgagcgcagccggctgcgcatcgaggaggagatccgcgtggtgcgcctgcagttggaggccaccgagcgccagcgtggcggggctgagggggagctgcaggcactgcgtgcacgggcggaggaggctgaggcacaaaagcgacaggcgcaggaggaggccgagcgcttgcggaggcaggtgcaggacgagagccagcgtaagcggcaggcggaggtggagctggcctcgcgcgtgaaggccgaggccgaggcggcgcgcgagaagcagcgggccctgcaggccctggaggagctgcggctgcaggcggaggaggcggagcggcgcctgcggcaggccgaggtggagcgagcgcggcaggtacaggtggccctggagacggcgcagcgcagtgcagaggcggagctgcagagcaaacgcgcctccttcgccgagaagacggcacagctggagcgctccctgcaggaggaacacgtggctgtggcacagctgcgggaggaggctgagcggcgggcacagcagcaggccgaggccgagcgggcgcgcgaggaggcagagcgggagctggagcgctggcagctcaaggccaacgaggcgctacggctgcggctgcaggcggaggaggtggcgcagcagaagagcctggcgcaggccgaggctgagaagcagaaggaggaggcggagcgcgaggcgcggcggcgcggcaaggcggaggagcaggccgtccggcagcgggagctggctgaacaagagctggagaagcagcggcagctggcggaaggcaccgcgcagcagcgcctggccgcggagcaggagttgatccggctgcgggccgagacggagcagggggagcagcagcggcagctgctggaggaggagctggcccggctgcagcgtgaggcggctgcagccacgcagaaacggcaggagctggaagccgagctggccaaggtgcgggccgagatggaggtgctgctggccagcaaggcgagggctgaggaggagtcgcgctccaccagcgagaagtccaagcagaggctggaggccgaggccggccggttccgcgagctggccgaggaggccgcccgcctgcgtgccctggcggaagaggccaagcggcagcggcagctggccgaggaagacgcggcgcggcagcgggccgaggcggagcgggtgcttgcggagaagctggccgccatcggcgaggccacgcggctcaagacggaggcggagatcgcgctcaaggagaaggaggcggagaacgagcgcctgcggcggctggcggaggacgaggccttccagcggcggcggctggaggagcaggccgcgcaacacaaggctgacatcgaggagcgcctggcccagctgcgcaaggcatcggacagcgagctggagcggcagaaggggctggtggaggacacgctgaggcagcggcggcaggtggaggaggagatcctggcgctgaaggcgagcttcgagaaggcggccgctggcaaggcggagctggagctggagctgggacgcatccgcagcaacgcggaggacacgctgcgcagcaaggagcaggccgagctggaggctgcgaggcagcggcagctggcggcggaggaggagcggcggcgccgtgaggctgaggagcgcgtgcagaagagcctggcggccgaggaggaggccgcacggcagcggaaggcggcgctggaggaagtcgagcggctgaaagccaaggtggaggaggcgcggcgcctgcgggagcgagcggagcaggagtcggcgcggcagctgcagctggcccaggaggccgcccagaagcggctgcaggcggaagagaaggcacacgccttcgcggtgcagcagaaggagcaggagctacagcagacgctgcagcaggagcagagcgtgctggaccagctgcgcggcgaggcggaggcggcccggcgggcggctgaggaggcggaggaggcccgggtgcaggcggagcgtgaggcggcgcagtcccggcggcaggtggaagaggccgagcggctgaagcagtcggcagaggagcaggcacaggcccgggctcaggcacaggcggctgcagagaagctgcgcaaggaggccgagcaagaggcggcgcggcgggcacaggcggagcaggcggccctgcggcagaagcaggcagctgacgcggagatggagaagcataagaaattcgccgagcagacgctgcggcagaaggcgcaggtggagcaggagctgacaacactgcggctgcagctggaggagaccgaccaccagaagaacctgctggacgaggagctgcagcggctgaaggcggaggccacggaggccgcacgccagcgcagccaggtggaggaggagctcttctcggtgcgcgtgcagatggaggagctgagcaagctcaaggcacgcatcgaggctgagaaccgcgcactcatcttgcgtgacaaggacaatacgcagcgcttcctgcaggaggaggctgagaagatgaagcaggtggcggaggaggccgcgcggctgagtgtggcggcccaagaggctgcgcgactgcggcagctggcagaggaggacctggcacagcagcgggccttggcagagaagatgctcaaggagaagatgcaggcggtgcaggaggccacgcgactcaaggctgaggcggaactgctgcagcagcagaaggagcttgcgcaggagcaggcgcggcggctgcaggaggacaaggagcagatggcgcagcagctggcggaggagacgcagggcttccagcggacgctggaggccgagcggcagcggcagctggagatgagcgctgaggctgagcgcctcaagctgcgtgtggccgagatgagccgagcccaggcccgcgctgaggaggacgcccagcgcttccggaagcaggcggaggagatcggtgagaagctgcaccgcacggagctcgccacccaggagaaggtgaccctggtgcagacactggagatccagcgacagcagagtgaccatgatgccgagcgcctgcgggaggccatcgctgagctggagcgtgagaaggagaagctccaacaggaggccaaactgctgcagctcaagtctgaggagatgcagacggtgcagcaggagcagctgctgcaggagacgcaggccctgcagcaaagcttcctctctgaaaaggacagcctgctacagcgggagcgcttcatcgagcaggagaaggccaagctggagcagctcttccaggacgaggtggccaaggcacagcagctgcgtgaggagcagcagcggcagcagcagcagatggagcaggaacggcagcggctggtggccagcatggaggaggcgcggcggcggcagcatgaggccgaggagggcgtgcggcgcaagcaggaggagctgcagcagctggagcagcagcggcggcagcaggaggagctgctggctgaggagaaccagaggctgcgtgagcagctgcagctcctggaggagcagcaccgggccgcgctggcgcactcagaggaggtcactgcctcgcaggtggctgccacaaagaccctgcccaatggccgggatgcacttgatggccccgcggcagaggcagagccggagcacagcttcgatggcctgcggcggaaggtgtcagctcagaggctgcaggaggccggcatcctgagtgcggaggagctgcagcggttggcgcagggccacaccacggtggacgagctcgcacggcgggaagacgtgcgccactacctgcagggccgcagcagtatcgcagggctgttgctgaaggccaccaatgagaagctgagtgtttacgccgccctgcagaggcagctgctgagtcccggcacggccctcatcctgctggaggcgcaggcggcctcaggcttcctgctggaccctgtgcggaaccggcggctgaccgtcaacgaggctgtgaaggagggtgtggtgggccccgagctgcaccacaagctgctgtcggccgagcgcgccgtcactggctacaaggacccctacactggccagcagatctctctcttccaagccatgcagaagggcctcatcgtccgggagcacggcatccgcctgctggaggcccagatcgccacgggcggcgttatcgaccccgtgcacagccaccgcgtgcccgtggacgtggcctaccggcgcggctacttcgacgaggagatgaaccgcgtcctggcggaccccagcgacgacaccaagggcttctttgaccccaacacgcacgagaacctcacgtacctgcagctactggagcgctgcgtggaggaccccgagacgggcctgtgccttctgccactcacggataaggctgccaagggcggggagctggtctacactgactccgaggcccgggacgtctttgagaaggccaccgtgtctgcgccgttcggcaagttccagggcaagacggtgaccatttgggagatcatcaactcggaatacttcacggcagagcagcggcgggacctgctgcggcagttccgcacgggccggatcacagtggagaagatcatcaagatcatcatcacggtggtggaggagcaggagcagaagggccggctttgctttgagggcctgcgcagcctggtgccagccgccgagctgctggagagcagggtcatcgaccgcgagctctaccagcagctgcagcgaggtgagcgctctgtgcgagacgtagccgaggtggacactgtgcggcgggctctccggggtgccaacgtcatcgcgggtgtatggctggaggaggcggggcagaagctgagtatctacaatgccctgaagaaagacctgctgccatccgacatggccgtggccctgttggaagcccaggccggcaccgggcacatcatcgaccccgccaccagcgcccggctgaccgtggacgaggcagtgcgtgctggcctggtgggccccgagtttcatgagaagctgctatcagccgagaaggctgtgacagggtacagggacccctacacagggcagagcgtctccctgttccaggccctgaagaagggcctcattccccgggagcagggcctgcgcctgttggacgcccagctgtccacgggcggcatcgtggaccccagcaagagccaccgcgtgcccctggatgtcgcctgcgcccgaggctgcctggatgaggagaccagcagggccctgtcggcaccaagggccgacgccaaggcctacagtgaccccagcacaggggagccggccacctacggcgagctccagcagcggtgccggcccgaccagctgaccgggctgagcctgctgccgctctcagaaaaggctgctcgggcccggcaggaggagctctactcagagctgcaggcccgtgagacctttgaaaagaccccggttgaggtccccgtgggtggcttcaagggcaggacggtgacggtgtgggagctcatcagctctgagtacttcactgcggagcagcggcaggagctgttgcgtcagttccgcacgggcaaggtcaccgtggagaaggtcatcaagattctcattaccatcgtggaggaggtggagaccctgcggcaggagaggctgtccttcagcggcctccgtgcccctgtgccagccagcgagctcctggcttccggggtcctcagcagagcccagtttgagcagctcaaggacggcaagacgacggtcaaggacctttcggagctgggctccgtgcggacgctgctgcagggcagtggctgcctcgccggcatctacctggaggacaccaaggagaaggtgtccatctacgaggccatgcgccggggcctgctgagagccacaacggctgcgctcctgctggaggcgcaggcggccactggcttcctggtggaccccgtgcggaaccagcgcctgtatgtccacgaggccgtgaaggcgggcgtggtgggccccgagcttcacgagcagctgctgtctgccgagaaggccgtcaccggctacagagacccctactcgggcagcaccatctccctcttccaggccatgcagaagggcctggttctccggcagcacggcatccgcctgctggaggcccagatcgccacgggcggcatcatcgaccccgtgcacagccaccgcgtgcctgtggacgtggcctaccagcgcggctacttcagtgaggagatgaaccgcgtcctggcggaccccagcgacgacaccaagggcttctttgaccccaacacgcatgagaacctcacgtacaggcagctgctggagcggtgcgtggaggaccccgagacgggcttgcgccttctgccactgaaaggggcggagaaggctgaggtggtggagaccacgcaggtgtacactgaggaggagacaagaagggcatttgaagagacacagatcgacattcccggcggcggcagccacggcggctccaccatgtccctgtgggaggtgatgcagtcggacctgatccccgaggagcagcgggcccagctgatggctgacttccaggccggccgggtgaccaaggaacgcatgatcatcatcatcatcgagatcattgagaagacagagatcatccgccagcagggtctggcctcctacgactacgtgcgccgccgcctcacggctgaggacctgttcgaggctcggatcatctctctcgagacctacaacctgctccgggagggcaccaggagcctccgtgaggctctcgaggcggagtccgcctggtgctacctctatggcacgggctccgtggctggtgtctacctgcccggttccaggcagacactgagcatctaccaggctctcaagaaagggctgctgagtgccgaggtggcccgcctgctgctggaggcacaggcagccacaggcttcctgctggacccggtgaagggggagcggctgactgtggatgaggctgtgcggaagggcctcgtggggcccgagctgcacgaccgcctgctctcggctgagcgggcggtcaccggctaccgtgacccctacaccgagcagaccatctcgctcttccaggccatgaagaaggagctgatccctactgaggaggccctgcggctgctggatgcccagctggccaccggcggcatcgtggacccccgcctgggcttccaccttcccctggaggtggcttaccagcgtggctacctcaacaaggacacgcacgaccagctgtcagagcccagcgaggtgcgcagctacgtggacccgtccaccgacgagcgcctcagctacacgcagctgctcaggcggtgccgtcgtgacgacggcaccggccagctgctcctgccactgtcggacgcccgcaagctgaccttccgtggcctgcggaagcagatcaccatggaggagctggtgcgctcgcaggtcatggacgaggccacggcgctgcagctgcgggagggcctgacctccatcgaggaggtcaccaagaacttgcagaagttcctggaaggcaccagctgcatcgctggtgtcttcgtggacgccaccaaggaacggctctcggtgtaccaggccatgaagaagggcatcatccgccccggcacagcctttgagctcctggaggcgcaggcggccaccggttacgtcatcgaccccatcaagggactgaagctgacggtggaggaggctgtgcgtatgggcattgtgggccccgagttcaaggacaagctgctgtcggccgagcgcgccgtcactgggtacaaggacccctactctgggaagctcatctccctcttccaggccatgaagaagggcctgatcctgaaggaccatggcatccgcctgctggaggcccagatcgccacgggcggcatcatcgaccctgaggagagccaccggctgcccgtggaggtggcctacaagcgcggcctcttcgatgaggagatgaacgagatcctgaccgacccctcggacgacaccaagggcttctttgaccctaacacggaggagaacctcacctacctgcagctgatggagcgttgtatcactgacccccagacgggcctgtgtctcttgccgctgaaggagaagaagcgggagcggaagacgtcctccaagtcctccgtgcgcaagcgccgagtggtcatcgtggaccccgagacgggcaaggagatgtcagtgtacgaggcctaccgcaagggcctgattgaccaccagacgtacctggagctgtccgagcaggagtgcgagtgggaggagatcaccatctcctcctcggacggcgtggtcaagtccatgatcatcgaccgccgctccgggcgccagtacgacatcgatgatgccatcgccaagaacctcatcgaccgctcggcactggaccagtaccgcgccggcacgctctccatcaccgagttcgccgacatgctctcgggcaacgccggtggtttccgctcccgttcctcctcggtgggatcctcctcctcctaccccatcagccccgccgtctccaggacccagctggcctcctggtcagaccccactgaggagacgggccccgtggctggcatcctggacacggagacgctggagaaggtgtccatcaccgaggccatgcaccggaacctggtggataacatcacggggcagcggctgctggaggcgcaggcctgcaccgggggcatcatcgaccccagcaccggtgagcgcttccctgtcaccgacgccgtcaacaagggcctggtggacaagatcatggtggaccgcatcaacctggcccagaaggccttctgcggcttcgaggacccacgcaccaagaccaagatgtcggccgcccaggccctgaagaagggctggctctactacgaggccggccagcgcttcctggaggtgcagtacctgaccggcggcttgatcgagcccgacacgccgggccgcgtgcccctggacgaggccctgcagcgcggcacggtggacgcccgcaccgcacagaagctgcgtgacgtgggcgcctactccaagtacctcacctgccctaagaccaagctcaagatctcctataaggacgcgctggaccgcagcatggtggaggagggcacggggctgcggctgctggaggctgccgcgcagtccaccaagggctactacagcccctacagcgtcagcggctccggctctaccgctggctcccgcaccggctcgcgcaccggctcccgggccggctcccgccgcggcagctttgacgccaccggctccggcttctccatgaccttctcttcatcctcctactcctcctcgggctacggccgccgctacgcctcggggtcctcggcctccctggggggccctgagtctgccgtggcctgaggctgcctgcgcccaccccgctctgcatgcggcccagcccggctcccaccgaggcgcgggggccgttttcaacgcttaaaggtgtcttcctcccaagtggtgcctaaagtttaaccaaaaagaccagactaatatattaatatatatctgctgtccagacagcctgtatcttgggggacagggctggcccagccctgctggccgcctcaccccctcgggtctcctcactcccttctacctgccactcacacagccaggtgccttggagggtcccaagctgggccccagcccaccctcctgtcttcccagggtagcccgcctgccagtcctagctgcacagggcagctgggcccaaccctgtctgtagagggccctggtgtttctagcactggcctgcacggtgggccttgctggggacggggggccccagtcagcctctctcccagtctacccagagaagccccttccccatgggaagacgaggccctcgggcccagcccccacagtgctgtctgatctgtgctttccagctcaccccccacactcactcctgagacccctggcctccggcgtcagcctccagcctctgttcccctagtaagtgccttccatgtcggcctctaaccccaggccccgaggacccagacccagtggggaggcggacgttccagccggcatggctgggaactgcagacctgtcctcctggtgggtccaggggcccctccagcttgtggagccccacactggggtgccgcctgcccgtctctctcccatggagccccagccccctttgggcccagggacaccagccaggctctgtgctgaccctcctgttgcacccagccctggtctcagcagcgaccacccctgcctccaccctctgagctttgcatgttccactaaccccgggcgggtggcaggtggaggtgtcaggctgctggcgcctctgcaagggcagaacactaacctgaccgtgggcggggccttgcggtatccgcccccaataaaagcaattccaaccttcctccgaggggcctgtgacctcccacacccctggcccgctccgtctgccccgtgggctcctgccaccgtccccgatgaagatcgtgcccgatgagcgggatcgtgtgcagaagaaaaccttcaccaagtgggtcaacaagcacctcatcaaggcccagaggcacatcagtgacctgtatgaagacctccgcgatggccacaacctcatctccctgctggaggtcctctcgggggacagcctgccccgggagaaggggaggatgcgtttccacaagctgcagaatgtccagattgccctggactacctccggcaccgccaggtgaagctggtgaacatcaggaatgatgacatcgctgacggcaaccccaagctgacccttggcctcatctggacaatcattctgcacttccagatctcagatatccaggtgagtgggcagtcggaggacatgacggccaaggagaagctgctgctgtggtcgcagcgaatggtggaggggtaccagggcctgcgatgcgacaacttcacctccagctggagagacggccgcctcttcaatgccatcatccaccggcacaagcccctgctcatcgacatgaacaaggtgtaccggcagaccaacctggagaacctggaccaggccttctctgtggcggagcgggacctgggagtgacgcggctcctggaccctgaggacgtggatgtccctcagcccgacgagaagtccatcatcacctacgtctcgtcgctgtatgacgccatgccccgcgtgccggacgtgcaggatggggtgagggccaacgagctgcagctgcgctggcaggagtaccgggagctggtgctgctgctgcttcagtggatgcgacaccacacggccgcctttgaggaacgcaggttcccctccagcttcgaggagattgagatcctgtggtctcagttcctgaagtttaaggagatggagctaccagccaaggaggccgacaagaacaggtccaagggcatctaccaatccctggagggagcggtgcaagcaggccagctcaaggtgccccctggctaccacccgctggatgtggagaaggagtggggcaagctgcacgtggccatcctggagcgggagaagcagctccgcagcgagtttgagaggctggagtgtcttcagcgcatcgtgaccaagctgcagatggaggcggggctgtgtgaggagcagctgaaccaggccgacgccctgctgcagtcggatgtccggctgctggctgcaggcaaagtgccacagcgggcgggggaggtggaacgggacttggacaaggcggatagcatgatccggctgctcttcaacgacgtgcagaccctcaaggatggacggcacccgcagggcgagcagatgtaccgcagggtgtaccgtctgcacgagcgcctggtagccatccgcaccgagtacaacctacggctgaaggcaggcgtggcggcccctgcaacccaggtggcccaggtgactctgcagagtgtgcagaggcgccccgagctggaggactccactctgcgctacctgcaggacctgctggcctgggtggaggagaaccagcaccgtgtggatggcgctgagtggggtgtggacctgcccagcgtggaggcgcagctgggcagccaccgaggcctgcaccagtccatcgaagaattccgggccaagatcgagcgggcacggagtgacgagggccagctctcccccgccacccggggtgcctaccgtgactgcctgggtcggctggacctgcagtacgccaagctgctgaactcctccaaggcccgcctcaggtccctggagagcttgcacagctttgtggcagccgccactaaggagctaatgtggctgaatgagaaggaggaggaggaggtgggcttcgactggagcgaccgcaacaccaacatgaccgccaagaaggagagctactcggcgctgatgcgggagctggagctgaaggagaagaagatcaaggagctccaaaatgctggggaccggctgctgcgggaggaccacccggcccggcccacggtggagtccttccaggcggccctgcagacgcagtggagctggatgctacagctgtgctgctgtatcgaggcacacctgaaggagaacgctgcctactttcagttcttctcagatgtgcgggaggccgaggggcagttgcagaagctgcaggaggcactgcgtaggaaatacagttgtgatcgctccgccaccgtcacccggctggaggacctgctgcaggatgcccaggacgagaaggaacagctgaacgagtacaagggccacctctcaggcctggccaagcgggccaaggccgtcgtgcagctgaagccccgccacccagcccaccccatgcggggccgcctgcccctgctggccgtgtgcgactataagcaggtggaggtgactgtgcacaagggtgacgagtgccagctggtgggccctgcacagccgtcccactggaaggtgctcagcagctccggcagcgaggccgccgtgccctccgtgtgcttcctggtgcccccgcccaaccaggaggcccaggaggccgtcaccaggctggaggcccagcaccaggccctggtcacgctgtggcaccagttgcacgtggacatgaagagccttctggcctggcagagccttcgccgcgacgtgcagctcatccgctcctggtccctggccacgttccgcaccctgaagccagaggagcagcgccaagccctgcacagcctggagctgcactaccaggccttcctgcgggacagccaggacgcgggcggcttcggacccgaggaccggctgatggctgagcgcgagtacggctcctgcagccaccactaccagcagctgctgcagagcctggaacagggtgcacaggaagagtctcgctgccagcgctgcatctccgagctcaaagacatccggctgcagctggaggcctgtgagacgcgcaccgtgcaccgcctgcggctgccgctggacaaagagccggcacgggagtgtgcccagcgcatcgccgagcagcagaaggcacaggcagaggtggaggggctgggcaagggggtcgcccggctctctgccgaggccgagaaggtcttggccctaccagagccatcgcctgcggcccccacgctgcgctcggagctggagctgacgctgggcaagctggagcaggtccgcagcctgtctgccatctacctggagaagctcaagaccatcagcctggtgatccgcggcacgcagggggccgaggaggtgctcagggcccacgaggagcagctcaaggaggcccaggccgtgccggccaccctcccggagctcgaggccaccaaggcctctctgaagaagctgcgggcccaggccgaggcacagcagcccacgttcgacgccctgcgggatgagctgcggggggcacaggaggtgggggagcgactgcagcagcggcacggggagcgggacgtggaggtggagcgctggcgggagcgggtcgcccagttgcttgagcgctggcaggctgtgctggcccagaccgacgtgcggcagcgcgagctcgagcaactgggccgccagctgcgttactaccgcgagagtgcagaccccttgggcgcctggctgcaggacgccaggcggcggcaggagcagatccaggccatgccgctggccgacagccaggctgtgcgggagcagctgcggcaggagcaggccctgctggaggagatcgagcgccacggcgagaaggtcgaggagtgccagaggtttgcgaaacagtacatcaacgccatcaaggactatgaactccagctggtgacgtacaaggcgcagcttgagccggtggcctccccggccaagaagcccaaggtccagtcgggatcagagagtgtcatccaggagtacgtggacctgcgtacgcactacagcgagctgaccacactgacgagccagtacatcaagttcatcagcgagactctgcggcgcatggaggaggaggagaggctggctgagcagcagcgggcagaggagcgcgagcggctggccgaggtggaggccgcgctggagaagcagcggcagctggccgaggcgcacgcccaggcaaaggcacaggcggagcgggaggcgaaggagctgcagcagcgcatgcaggaggaggtggtgcggcgggaggaggcggcggtggacgcgcagcagcagaagcgcagcattcaggaggagctgcagcagctgcggcagagctcggaggcggagatccaggccaaggcccggcaggcagaggcggctgagcgcagccggctgcgcatcgaggaggagatccgcgtggtgcgcctgcagttggaggccaccgagcgccagcgtggcggggctgagggggagctgcaggcactgcgtgcacgggcggaggaggctgaggcacaaaagcgacaggcgcaggaggaggccgagcgcttgcggaggcaggtgcaggacgagagccagcgtaagcggcaggcggaggtggagctggcctcgcgcgtgaaggccgaggccgaggcggcgcgcgagaagcagcgggccctgcaggccctggaggagctgcggctgcaggcggaggaggcggagcggcgcctgcggcaggccgaggtggagcgagcgcggcaggtacaggtggccctggagacggcgcagcgcagtgcagaggcggagctgcagagcaaacgcgcctccttcgccgagaagacggcacagctggagcgctccctgcaggaggaacacgtggctgtggcacagctgcgggaggaggctgagcggcgggcacagcagcaggccgaggccgagcgggcgcgcgaggaggcagagcgggagctggagcgctggcagctcaaggccaacgaggcgctacggctgcggctgcaggcggaggaggtggcgcagcagaagagcctggcgcaggccgaggctgagaagcagaaggaggaggcggagcgcgaggcgcggcggcgcggcaaggcggaggagcaggccgtccggcagcgggagctggctgaacaagagctggagaagcagcggcagctggcggaaggcaccgcgcagcagcgcctggccgcggagcaggagttgatccggctgcgggccgagacggagcagggggagcagcagcggcagctgctggaggaggagctggcccggctgcagcgtgaggcggctgcagccacgcagaaacggcaggagctggaagccgagctggccaaggtgcgggccgagatggaggtgctgctggccagcaaggcgagggctgaggaggagtcgcgctccaccagcgagaagtccaagcagaggctggaggccgaggccggccggttccgcgagctggccgaggaggccgcccgcctgcgtgccctggcggaagaggccaagcggcagcggcagctggccgaggaagacgcggcgcggcagcgggccgaggcggagcgggtgcttgcggagaagctggccgccatcggcgaggccacgcggctcaagacggaggcggagatcgcgctcaaggagaaggaggcggagaacgagcgcctgcggcggctggcggaggacgaggccttccagcggcggcggctggaggagcaggccgcgcaacacaaggctgacatcgaggagcgcctggcccagctgcgcaaggcatcggacagcgagctggagcggcagaaggggctggtggaggacacgctgaggcagcggcggcaggtggaggaggagatcctggcgctgaaggcgagcttcgagaaggcggccgctggcaaggcggagctggagctggagctgggacgcatccgcagcaacgcggaggacacgctgcgcagcaaggagcaggccgagctggaggctgcgaggcagcggcagctggcggcggaggaggagcggcggcgccgtgaggctgaggagcgcgtgcagaagagcctggcggccgaggaggaggccgcacggcagcggaaggcggcgctggaggaagtcgagcggctgaaagccaaggtggaggaggcgcggcgcctgcgggagcgagcggagcaggagtcggcgcggcagctgcagctggcccaggaggccgcccagaagcggctgcaggcggaagagaaggcacacgccttcgcggtgcagcagaaggagcaggagctacagcagacgctgcagcaggagcagagcgtgctggaccagctgcgcggcgaggcggaggcggcccggcgggcggctgaggaggcggaggaggcccgggtgcaggcggagcgtgaggcggcgcagtcccggcggcaggtggaagaggccgagcggctgaagcagtcggcagaggagcaggcacaggcccgggctcaggcacaggcggctgcagagaagctgcgcaaggaggccgagcaagaggcggcgcggcgggcacaggcggagcaggcggccctgcggcagaagcaggcagctgacgcggagatggagaagcataagaaattcgccgagcagacgctgcggcagaaggcgcaggtggagcaggagctgacaacactgcggctgcagctggaggagaccgaccacca

SEQ ID NO: 678 - DNA, 32765 bp, Homo sapiens
  misc_feature (977)..(977): second gene starts at position 977
atgagcttcaccactcgctccaccttctccaccaactaccggtccctgggctctgtccaggcgcccagctacggcgcccggccggtcagcagcgcggccagcgtctatgcaggcgctgggggctctggttcccggatctccgtgtcccgctccaccagcttcaggggcggcatggggtccgggggcctggccaccgggatagccgggggtctggcaggaatgggaggcatccagaacgagaaggagaccatgcaaagcctgaacgaccgcctggcctcttacctggacagagtgaggagcctggagaccgagaaccggaggctggagagcaaaatccgggagcacttggagaagaagggaccccaggtcagagactggagccattacttcaagatcatcgaggacctgagggctcagatcttcgcaaatactgtggacaatgcccgcatcgttctgcagattgacaatgcccgtcttgctgctgatgactttagagtcaagtatgagacagagctggccatgcgccagtctgtggagaacgacatccatgggctccgcaaggtcattgatgacaccaatatcacacgactgcagctggagacagagatcgaggctctcaaggaggagctgctcttcatgaagaagaaccacgaagaggaagtaaaaggcctacaagcccagattgccagctctgggttgaccgtggaggtagatgcccccaaatctcaggacctcgccaagatcatggcagacatccgggcccaatatgacgagctggctcggaagaaccgagaggagctagacaagtactggtctcagcagattgaggagagcaccacagtggtcaccacacagtctgctgaggttggagctgctgagacgacgctcacagagctgagacgtacagtccagtccttggagatcgacctggactccatgagaaatctgaaggccagcttggagaacagcctgagggtggagaagcagcggcagctggccgaggcgcacgcccaggcaaaggcacaggcggagcgggaggcgaaggagctgcagcagcgcatgcaggaggaggtggtgcggcgggaggaggcggcggtggacgcgcagcagcagaagcgcagcattcaggaggagctgcagcagctgcggcagagctcggaggcggagatccaggccaaggcccggcaggcagaggcggctgagcgcagccggctgcgcatcgaggaggagatccgcgtggtgcgcctgcagttggaggccaccgagcgccagcgtggcggggctgagggggagctgcaggcactgcgtgcacgggcggaggaggctgaggcacaaaagcgacaggcgcaggaggaggccgagcgcttgcggaggcaggtgcaggacgagagccagcgtaagcggcaggcggaggtggagctggcctcgcgcgtgaaggccgaggccgaggcggcgcgcgagaagcagcgggccctgcaggccctggaggagctgcggctgcaggcggaggaggcggagcggcgcctgcggcaggccgaggtggagcgagcgcggcaggtacaggtggccctggagacggcgcagcgcagtgcagaggcggagctgcagagcaaacgcgcctccttcgccgagaagacggcacagctggagcgctccctgcaggaggaacacgtggctgtggcacagctgcgggaggaggctgagcggcgggcacagcagcaggccgaggccgagcgggcgcgcgaggaggcagagcgggagctggagcgctggcagctcaaggccaacgaggcgctacggctgcggctgcaggcggaggaggtggcgcagcagaagagcctggcgcaggccgaggctgagaagcagaaggaggaggcggagcgcgaggcgcggcggcgcggcaaggcggaggagcaggccgtccggcagcgggagctggctgaacaagagctggagaagcagcggcagctggcggaaggcaccgcgcagcagcgcctggccgcggagcaggagttgatccggctgcgggccgagacggagcagggggagcagcagcggcagctgctggaggaggagctggcccggctgcagcgtgaggcggctgcagccacgcagaaacggcaggagctggaagccgagctggccaaggtgcgggccgagatggaggtgctgctggccagcaaggcgagggctgaggaggagtcgcgctccaccagcgagaagtccaagcagaggctggaggccgaggccggccggttccgcgagctggccgaggaggccgcccgcctgcgtgccctggcggaagaggccaagcggcagcggcagctggccgaggaagacgcggcgcggcagcgggccgaggcggagcgggtgcttgcggagaagctggccgccatcggcgaggccacgcggctcaagacggaggcggagatcgcgctcaaggagaaggaggcggagaacgagcgcctgcggcggctggcggaggacgaggccttccagcggcggcggctggaggagcaggccgcgcaacacaaggctgacatcgaggagcgcctggcccagctgcgcaaggcatcggacagcgagctggagcggcagaaggggctggtggaggacacgctgaggcagcggcggcaggtggaggaggagatcctggcgctgaaggcgagcttcgagaaggcggccgctggcaaggcggagctggagctggagctgggacgcatccgcagcaacgcggaggacacgctgcgcagcaaggagcaggccgagctggaggctgcgaggcagcggcagctggcggcggaggaggagcggcggcgccgtgaggctgaggagcgcgtgcagaagagcctggcggccgaggaggaggccgcacggcagcggaaggcggcgctggaggaagtcgagcggctgaaagccaaggtggaggaggcgcggcgcctgcgggagcgagcggagcaggagtcggcgcggcagctgcagctggcccaggaggccgcccagaagcggctgcaggcggaagagaaggcacacgccttcgcggtgcagcagaaggagcaggagctacagcagacgctgcagcaggagcagagcgtgctggaccagctgcgcggcgaggcggaggcggcccggcgggcggctgaggaggcggaggaggcccgggtgcaggcggagcgtgaggcggcgcagtcccggcggcaggtggaagaggccgagcggctgaagcagtcggcagaggagcaggcacaggcccgggctcaggcacaggcggctgcagagaagctgcgcaaggaggccgagcaagaggcggcgcggcgggcacaggcggagcaggcggccctgcggcagaagcaggcagctgacgcggagatggagaagcataagaaattcgccgagcagacgctgcggcagaaggcgcaggtggagcaggagctgacaacactgcggctgcagctggaggagaccgaccaccagaagaacctgctggacgaggagctgcagcggctgaaggcggaggccacggaggccgcacgccagcgcagccaggtggaggaggagctcttctcggtgcgcgtgcagatggaggagctgagcaagctcaaggcacgcatcgaggctgagaaccgcgcactcatcttgcgtgacaaggacaatacgcagcgcttcctgcaggaggaggctgagaagatgaagcaggtggcggaggaggccgcgcggctgagtgtggcggcccaagaggctgcgcgactgcggcagctggcagaggaggacctggcacagcagcgggccttggcagagaagatgctcaaggagaagatgcaggcggtgcaggaggccacgcgactcaaggctgaggcggaactgctgcagcagcagaaggagcttgcgcaggagcaggcgcggcggctgcaggaggacaaggagcagatggcgcagcagctggcggaggagacgcagggcttccagcggacgctggaggccgagcggcagcggcagctggagatgagcgctgaggctgagcgcctcaagctgcgtgtggccgagatgagccgagcccaggcccgcgctgaggaggacgcccagcgcttccggaagcaggcggaggagatcggtgagaagctgcaccgcacggagctcgccacccaggagaaggtgaccctggtgcagacactggagatccagcgacagcagagtgaccatgatgccgagcgcctgcgggaggccatcgctgagctggagcgtgagaaggagaagctccaacaggaggccaaactgctgcagctcaagtctgaggagatgcagacggtgcagcaggagcagctgctgcaggagacgcaggccctgcagcaaagcttcctctctgaaaaggacagcctgctacagcgggagcgcttcatcgagcaggagaaggccaagctggagcagctcttccaggacgaggtggccaaggcacagcagctgcgtgaggagcagcagcggcagcagcagcagatggagcaggaacggcagcggctggtggccagcatggaggaggcgcggcggcggcagcatgaggccgaggagggcgtgcggcgcaagcaggaggagctgcagcagctggagcagcagcggcggcagcaggaggagctgctggctgaggagaaccagaggctgcgtgagcagctgcagctcctggaggagcagcaccgggccgcgctggcgcactcagaggaggtcactgcctcgcaggtggctgccacaaagaccctgcccaatggccgggatgcacttgatggccccgcggcagaggcagagccggagcacagcttcgatggcctgcggcggaaggtgtcagctcagaggctgcaggaggccggcatcctgagtgcggaggagctgcagcggttggcgcagggccacaccacggtggacgagctcgcacggcgggaagacgtgcgccactacctgcagggccgcagcagtatcgcagggctgttgctgaaggccaccaatgagaagctgagtgtttacgccgccctgcagaggcagctgctgagtcccggcacggccctcatcctgctggaggcgcaggcggcctcaggcttcctgctggaccctgtgcggaaccggcggctgaccgtcaacgaggctgtgaaggagggtgtggtgggccccgagctgcaccacaagctgctgtcggccgagcgcgccgtcactggctacaaggacccctacactggccagcagatctctctcttccaagccatgcagaagggcctcatcgtccgggagcacggcatccgcctgctggaggcccagatcgccacgggcggcgttatcgaccccgtgcacagccaccgcgtgcccgtggacgtggcctaccggcgcggctacttcgacgaggagatgaaccgcgtcctggcggaccccagcgacgacaccaagggcttctttgaccccaacacgcacgagaacctcacgtacctgcagctactggagcgctgcgtggaggaccccgagacgggcctgtgccttctgccactcacggataaggctgccaagggcggggagctggtctacactgactccgaggcccgggacgtctttgagaaggccaccgtgtctgcgccgttcggcaagttccagggcaagacggtgaccatttgggagatcatcaactcggaatacttcacggcagagcagcggcgggacctgctgcggcagttccgcacgggccggatcacagtggagaagatcatcaagatcatcatcacggtggtggaggagcaggagcagaagggccggctttgctttgagggcctgcgcagcctggtgccagccgccgagctgctggagagcagggtcatcgaccgcgagctctaccagcagctgcagcgaggtgagcgctctgtgcgagacgtagccgaggtggacactgtgcggcgggctctccggggtgccaacgtcatcgcgggtgtatggctggaggaggcggggcagaagctgagtatctacaatgccctgaagaaagacctgctgccatccgacatggccgtggccctgttggaagcccaggccggcaccgggcacatcatcgaccccgccaccagcgcccggctgaccgtggacgaggcagtgcgtgctggcctggtgggccccgagtttcatgagaagctgctatcagccgagaaggctgtgacagggtacagggacccctacacagggcagagcgtctccctgttccaggccctgaagaagggcctcattccccgggagcagggcctgcgcctgttggacgcccagctgtccacgggcggcatcgtggaccccagcaagagccaccgcgtgcccctggatgtcgcctgcgcccgaggctgcctggatgaggagaccagcagggccctgtcggcaccaagggccgacgccaaggcctacagtgaccccagcacaggggagccggccacctacggcgagctccagcagcggtgccggcccgaccagctgaccgggctgagcctgctgccgctctcagaaaaggctgctcgggcccggcaggaggagctctactcagagctgcaggcccgtgagacctttgaaaagaccccggttgaggtccccgtgggtggcttcaagggcaggacggtgacggtgtgggagctcatcagctctgagtacttcactgcggagcagcggcaggagctgttgcgtcagttccgcacgggcaaggtcaccgtggagaaggtcatcaagattctcattaccatcgtggaggaggtggagaccctgcggcaggagaggctgtccttcagcggcctccgtgcccctgtgccagccagcgagctcctggcttccggggtcctcagcagagcccagtttgagcagctcaaggacggcaagacgacggtcaaggacctttcggagctgggctccgtgcggacgctgctgcagggcagtggctgcctcgccggcatctacctggaggacaccaaggagaaggtgtccatctacgaggccatgcgccggggcctgctgagagccacaacggctgcgctcctgctggaggcgcaggcggccactggcttcctggtggaccccgtgcggaaccagcgcctgtatgtccacgaggccgtgaaggcgggcgtggtgggccccgagcttcacgagcagctgctgtctgccgagaaggccgtcaccggctacagagacccctactcgggcagcaccatctccctcttccaggccatgcagaagggcctggttctccggcagcacggcatccgcctgctggaggcccagatcgccacgggcggcatcatcgaccccgtgcacagccaccgcgtgcctgtggacgtggcctaccagcgcggctacttcagtgaggagatgaaccgcgtcctggcggaccccagcgacgacaccaagggcttctttgaccccaacacgcatgagaacctcacgtacaggcagctgctggagcggtgcgtggaggaccccgagacgggcttgcgccttctgccactgaaaggggcggagaaggctgaggtggtggagaccacgcaggtgtacactgaggaggagacaagaagggcatttgaagagacacagatcgacattcccggcggcggcagccacggcggctccaccatgtccctgtgggaggtgatgcagtcggacctgatccccgaggagcagcgggcccagctgatggctgacttccaggccggccgggtgaccaaggaacgcatgatcatcatcatcatcgagatcattgagaagacagagatcatccgccagcagggtctggcctcctacgactacgtgcgccgccgcctcacggctgaggacctgttcgaggctcggatcatctctctcgagacctacaacctgctccgggagggcaccaggagcctccgtgaggctctcgaggcggagtccgcctggtgctacctctatggcacgggctccgtggctggtgtctacctgcccggttccaggcagacactgagcatctaccaggctctcaagaaagggctgctgagtgccgaggtggcccgcctgctgctggaggcacaggcagccacaggcttcctgctggacccggtgaagggggagcggctgactgtggatgaggctgtgcggaagggcctcgtggggcccgagctgcacgaccgcctgctctcggctgagcgggcggtcaccggctaccgtgacccctacaccgagcagaccatctcgctcttccaggccatgaagaaggagctgatccctactgaggaggccctgcggctgctggatgcccagctggccaccggcggcatcgtggacccccgcctgggcttccaccttcccctggaggtggcttaccagcgtggctacctcaacaaggacacgcacgaccagctgtcagagcccagcgaggtgcgcagctacgtggacccgtccaccgacgagcgcctcagctacacgcagctgctcaggcggtgccgtcgtgacgacggcaccggccagctgctcctgccactgtcggacgcccgcaagctgaccttccgtggcctgcggaagcagatcaccatggaggagctggtgcgctcgcaggtcatggacgaggccacggcgctgcagctgcgggagggcctgacctccatcgaggaggtcaccaagaacttgcagaagttcctggaaggcaccagctgcatcgctggtgtcttcgtggacgccaccaaggaacggctctcggtgtaccaggccatgaagaagggcatcatccgccccggcacagcctttgagctcctggaggcgcaggcggccaccggttacgtcatcgaccccatcaagggactgaagctgacggtggaggaggctgtgcgtatgggcattgtgggccccgagttcaaggacaagctgctgtcggccgagcgcgccgtcactgggtacaaggacccctactctgggaagctcatctccctcttccaggccatgaagaagggcctgatcctgaaggaccatggcatccgcctgctggaggcccagatcgccacgggcggcatcatcgaccctgaggagagccaccggctgcccgtggaggtggcctacaagcgcggcctcttcgatgaggagatgaacgagatcctgaccgacccctcggacgacaccaagggcttctttgaccctaacacggaggagaacctcacctacctgcagctgatggagcgttgtatcactgacccccagacgggcctgtgtctcttgccgctgaaggagaagaagcgggagcggaagacgtcctccaagtcctccgtgcgcaagcgccgagtggtcatcgtggaccccgagacgggcaaggagatgtcagtgtacgaggcctaccgcaagggcctgattgaccaccagacgtacctggagctgtccgagcaggagtgcgagtgggaggagatcaccatctcctcctcggacggcgtggtcaagtccatgatcatcgaccgccgctccgggcgccagtacgacatcgatgatgccatcgccaagaacctcatcgaccgctcggcactggaccagtaccgcgccggcacgctctccatcaccgagttcgccgacatgctctcgggcaacgccggtggtttccgctcccgttcctcctcggtgggatcctcctcctcctaccccatcagccccgccgtctccaggacccagctggcctcctggtcagaccccactgaggagacgggccccgtggctggcatcctggacacggagacgctggagaaggtgtccatcaccgaggccatgcaccggaacctggtggataacatcacggggcagcggctgctggaggcgcaggcctgcaccgggggcatcatcgaccccagcaccggtgagcgcttccctgtcaccgacgccgtcaacaagggcctggtggacaagatcatggtggaccgcatcaacctggcccagaaggccttctgcggcttcgaggacccacgcaccaagaccaagatgtcggccgcccaggccctgaagaagggctggctctactacgaggccggccagcgcttcctggaggtgcagtacctgaccggcggcttgatcgagcccgacacgccgggccgcgtgcccctggacgaggccctgcagcgcggcacggtggacgcccgcaccgcacagaagctgcgtgacgtgggcgcctactccaagtacctcacctgccctaagaccaagctcaagatctcctataaggacgcgctggaccgcagcatggtggaggagggcacggggctgcggctgctggaggctgccgcgcagtccaccaagggctactacagcccctacagcgtcagcggctccggctctaccgctggctcccgcaccggctcgcgcaccggctcccgggccggctcccgccgcggcagctttgacgccaccggctccggcttctccatgaccttctcttcatcctcctactcctcctcgggctacggccgccgctacgcctcggggtcctcggcctccctggggggccctgagtctgccgtggcctgaggctgcctgcgcccaccccgctctgcatgcggcccagcccggctcccaccgaggcgcgggggccgttttcaacgcttaaaggtgtcttcctcccaagtggtgcctaaagtttaaccaaaaagaccagactaatatattaatatatatctgctgtccagacagcctgtatcttgggggacagggctggcccagccctgctggccgcctcaccccctcgggtctcctcactcccttctacctgccactcacacagccaggtgccttggagggtcccaagctgggccccagcccaccctcctgtcttcccagggtagcccgcctgccagtcctagctgcacagggcagctgggcccaaccctgtctgtagagggccctggtgtttctagcactggcctgcacggtgggccttgctggggacggggggccccagtcagcctctctcccagtctacccagagaagccccttccccatgggaagacgaggccctcgggcccagcccccacagtgctgtctgatctgtgctttccagctcaccccccacactcactcctgagacccctggcctccggcgtcagcctccagcctctgttcccctagtaagtgccttccatgtcggcctctaaccccaggccccgaggacccagacccagtggggaggcggacgttccagccggcatggctgggaactgcagacctgtcctcctggtgggtccaggggcccctccagcttgtggagccccacactggggtgccgcctgcccgtctctctcccatggagccccagccccctttgggcccagggacaccagccaggctctgtgctgaccctcctgttgcacccagccctggtctcagcagcgaccacccctgcctccaccctctgagctttgcatgttccactaaccccgggcgggtggcaggtggaggtgtcaggctgctggcgcctctgcaagggcagaacactaacctgaccgtgggcggggccttgcggtatccgcccccaataaaagcaattccaaccttcagccggttcccagcgcaggaagggcagccctggcggctccgcgtggcggctatggagccctcgggcagcctgtttccctccctggtggttgtgggtcacgttgtcaccctggccgctgtgtggcactggcgcaggggacgtcggtgggcgcaggacgagcaagatgagcgggatcgtgtgcagaagaaaaccttcaccaagtgggtcaacaagcacctcatcaaggcccagaggcacatcagtgacctgtatgaagacctccgcgatggccacaacctcatctccctgctggaggtcctctcgggggacagcctgccccgggagaaggggaggatgcgtttccacaagctgcagaatgtccagattgccctggactacctccggcaccgccaggtgaagctggtgaacatcaggaatgatgacatcgctgacggcaaccccaagctgacccttggcctcatctggacaatcattctgcacttccagatctcagatatccaggtgagtgggcagtcggaggacatgacggccaaggagaagctgctgctgtggtcgcagcgaatggtggaggggtaccagggcctgcgatgcgacaacttcacctccagctggagagacggccgcctcttcaatgccatcatccaccggcacaagcccctgctcatcgacatgaacaaggtgtaccggcagaccaacctggagaacctggaccaggccttctctgtggcggagcgggacctgggagtgacgcggctcctggaccctgaggacgtggatgtccctcagcccgacgagaagtccatcatcacctacgtctcgtcgctgtatgacgccatgccccgcgtgccggacgtgcaggatggggtgagggccaacgagctgcagctgcgctggcaggagtaccgggagctggtgctgctgctgcttcagtggatgcgacaccacacggccgcctttgaggaacgcaggttcccctccagcttcgaggagattgagatcctgtggtctcagttcctgaagtttaaggagatggagctaccagccaaggaggccgacaagaacaggtccaagggcatctaccaatccctggagggagcggtgcaagcaggccagctcaaggtgccccctggctaccacccgctggatgtggagaaggagtggggcaagctgcacgtggccatcctggagcgggagaagcagctccgcagcgagtttgagaggctggagtgtcttcagcgcatcgtgaccaagctgcagatggaggcggggctgtgtgaggagcagctgaaccaggccgacgccctgctgcagtcggatgtccggctgctggctgcaggcaaagtgccacagcgggcgggggaggtggaacgggacttggacaaggcggatagcatgatccggctgctcttcaacgacgtgcagaccctcaaggatggacggcacccgcagggcgagcagatgtaccgcagggtgtaccgtctgcacgagcgcctggtagccatccgcaccgagtacaacctacggctgaaggcaggcgtggcggcccctgcaacccaggtggcccaggtgactctgcagagtgtgcagaggcgccccgagctggaggactccactctgcgctacctgcaggacctgctggcctgggtggaggagaaccagcaccgtgtggatggcgctgagtggggtgtggacctgcccagcgtggaggcgcagctgggcagccaccgaggcctgcaccagtccatcgaagaattccgggccaagatcgagcgggcacggagtgacgagggccagctctcccccgccacccggggtgcctaccgtgactgcctgggtcggctggacctgcagtacgccaagctgctgaactcctccaaggcccgcctcaggtccctggagagcttgcacagctttgtggcagccgccactaaggagctaatgtggctgaatgagaaggaggaggaggaggtgggcttcgactggagcgaccgcaacaccaacatgaccgccaagaaggagagctactcggcgctgatgcgggagctggagctgaaggagaagaagatcaaggagctccaaaatgctggggaccggctgctgcgggaggaccacccggcccggcccacggtggagtccttccaggcggccctgcagacgcagtggagctggatgctacagctgtgctgctgtatcgaggcacacctgaaggagaacgctgcctactttcagttcttctcagatgtgcgggaggccgaggggcagttgcagaagctgcaggaggcactgcgtaggaaatacagttgtgatcgctccgccaccgtcacccggctggaggacctgctgcaggatgcccaggacgagaaggaacagctgaacgagtacaagggccacctctcaggcctggccaagcgggccaaggccgtcgtgcagctgaagccccgccacccagcccaccccatgcggggccgcctgcccctgctggccgtgtgcgactataagcaggtggaggtgactgtgcacaagggtgacgagtgccagctggtgggccctgcacagccgtcccactggaaggtgctcagcagctccggcagcgaggccgccgtgccctccgtgtgcttcctggtgcccccgcccaaccaggaggcccaggaggccgtcaccaggctggaggcccagcaccaggccctggtcacgctgtggcaccagttgcacgtggacatgaagagccttctggcctggcagagccttcgccgcgacgtgcagctcatccgctcctggtccctggccacgttccgcaccctgaagccagaggagcagcgccaagccctgcacagcctggagctgcactaccaggccttcctgcgggacagccaggacgcgggcggcttcggacccgaggaccggctgatggctgagcgcgagtacggctcctgcagccaccactaccagcagctgctgcagagcctggaacagggtgcacaggaagagtctcgctgccagcgctgcatctccgagctcaaagacatccggctgcagctggaggcctgtgagacgcgcaccgtgcaccgcctgcggctgccgctggacaaagagccggcacgggagtgtgcccagcgcatcgccgagcagcagaaggcacaggcagaggtggaggggctgggcaagggggtcgcccggctctctgccgaggccgagaaggtcttggccctaccagagccatcgcctgcggcccccacgctgcgctcggagctggagctgacgctgggcaagctggagcaggtccgcagcctgtctgccatctacctggagaagctcaagaccatcagcctggtgatccgcggcacgcagggggccgaggaggtgctcagggcccacgaggagcagctcaaggaggcccaggccgtgccggccaccctcccggagctcgaggccaccaaggcctctctgaagaagctgcgggcccaggccgaggcacagcagcccacgttcgacgccctgcgggatgagctgcggggggcacaggaggtgggggagcgactgcagcagcggcacggggagcgggacgtggaggtggagcgctggcgggagcgggtcgcccagttgcttgagcgctggcaggctgtgctggcccagaccgacgtgcggcagcgcgagctcgagcaactgggccgccagctgcgttactaccgcgagagtgcagaccccttgggcgcctggctgcaggacgccaggcggcggcaggagcagatccaggccatgccgctggccgacagccaggctgtgcgggagcagctgcggcaggagcaggccctgctggaggagatcgagcgccacggcgagaaggtcgaggagtgccagaggtttgcgaaacagtacatcaacgccatcaaggactatgaactccagctggtgacgtacaaggcgcagcttgagccggtggcctccccggccaagaagcccaaggtccagtcgggatcagagagtgtcatccaggagtacgtggacctgcgtacgcactacagcgagctgaccacactgacgagccagtacatcaagttcatcagcgagactctgcggcgcatggaggaggaggagaggctggctgagcagcagcgggcagaggagcgcgagcggctggccgaggtggaggccgcgctggagaagcagcggcagctggccgaggcgcacgcccaggcaaaggcacaggcggagcgggaggcgaaggagctgcagcagcgcatgcaggaggaggtggtgcggcgggaggaggcggcggtggacgcgcagcagcagaagcgcagcattcaggaggagctgcagcagctgcggcagagctcggaggcggagatccaggccaaggcccggcaggcagaggcggctgagcgcagccggctgcgcatcgaggaggagatccgcgtggtgcgcctgcagttggaggccaccgagcgccagcgtggcggggctgagggggagctgcaggcactgcgtgcacgggcggaggaggctgaggcacaaaagcgacaggcgcaggaggaggccgagcgcttgcggaggcaggtgcaggacgagagccagcgtaagcggcaggcggaggtggagctggcctcgcgcgtgaaggccgaggccgaggcggcgcgcgagaagcagcgggccctgcaggccctggaggagctgcggctgcaggcggaggaggcggagcggcgcctgcggcaggccgaggtggagcgagcgcggcaggtacaggtggccctggagacggcgcagcgcagtgcagaggcggagctgcagagcaaacgcgcctccttcgccgagaagacggcacagctggagcgctccctgcaggaggaacacgtggctgtggcacagctgcgggaggaggctgagcggcgggcacagcagcaggccgaggccgagcgggcgcgcgaggaggcagagcgggagctggagcgctggcagctcaaggccaacgaggcgctacggctgcggctgcaggcggaggaggtggcgcagcagaagagcctggcgcaggccgaggctgagaagcagaaggaggaggcggagcgcgaggcgcggcggcgcggcaaggcggaggagcaggccgtccggcagcgggagctggctgaacaagagctggagaagcagcggcagctggcggaaggcaccgcgcagcagcgcctggccgcggagcaggagttgatccggctgcgggccgagacggagcagggggagcagcagcggcagctgctggaggaggagctggcccggctgcagcgtgaggcggctgcagccacgcagaaacggcaggagctggaagccgagctggccaaggtgcgggccgagatggaggtgctgctggccagcaaggcgagggctgaggaggagtcgcgctccaccagcgagaagtccaagcagaggctggaggccgaggccggccggttccgcgagctggccgaggaggccgcccgcctgcgtgccctggcggaagaggccaagcggcagcggcagctggccgaggaagacgcggcgcggcagcgggccgaggcggagcgggtgcttgcggagaagctggccgccatcggcgaggccacgcggctcaagacggaggcggagatcgcgctcaaggagaaggaggcggagaacgagcgcctgcggcggctggcggaggacgaggccttccagcggcggcggctggaggagcaggccgcgcaacacaaggctgacatcgaggagcgcctggcccagctgcgcaaggcatcggacagcgagctggagcggcagaaggggctggtggaggacacgctgaggcagcggcggcaggtggaggaggagatcctggcgctgaaggcgagcttcgagaaggcggccgctggcaaggcggagctggagctggagctgggacgcatccgcagcaacgcggaggacacgctgcgcagcaaggagcaggccgagctggaggctgcgaggcagcggcagctggcggcggaggaggagcggcggcgccgtgaggctgaggagcgcgtgcagaagagcctggcggccgaggaggaggccgcacggcagcggaaggcggcgctggaggaagtcgagcggctgaaagccaaggtggaggaggcgcggcgcctgcgggagcgagcggagcaggagtcggcgcggcagctgcagctggcccaggaggccgcccagaagcggctgcaggcggaagagaaggcacacgccttcgcggtgcagcagaaggagcaggagctacagcagacgctgcagcaggagcagagcgtgctggaccagctgcgcggcgaggcggaggcggcccggcgggcggctgaggaggcggaggaggcccgggtgcaggcggagcgtgaggcggcgcagtcccggcggcaggtggaagaggccgagcggctgaagcagtcggcagaggagcaggcacaggcccgggctcaggcacaggcggctgcagagaagctgcgcaaggaggccgagcaagaggcggcgcggcgggcacaggcggagcaggcggccctgcggcagaagcaggcagctgacgcggagatggagaagcataagaaattcgccgagcagacgctgcggcagaaggcgcaggtggagcaggagctgacaacactgcggctgcagctggaggagaccgaccaccagaagaacctgctggacgaggagctgcagcggctgaaggcggaggccacggaggccgcacgccagcgcagccaggtggaggaggagctcttctcggtgcgcgtgcagatggaggagctgagcaagctcaaggcacgcatcgaggctgagaaccgcgcactcatcttgcgtgacaaggacaatacgcagcgcttcctgcaggaggaggctgagaagatgaagcaggtggcggaggaggccgcgcggctgagtgtggcggcccaagaggctgcgcgactgcggcagctggcagaggaggacctggcacagcagcgggccttggcagagaagatgctcaaggagaagatgcaggcggtgcaggaggccacgcgactcaaggctgaggcggaactgctgcagcagcagaaggagcttgcgcaggagcaggcgcggcggctgcaggaggacaaggagcagatggcgcagcagctggcggaggagacgcagggcttccagcggacgctggaggccgagcggcagcggcagctggagatgagcgctgaggctgagcgcctcaagctgcgtgtggccgagatgagccgagcccaggcccgcgctgaggaggacgcccagcgcttccggaagcaggcggaggagatcggtgagaagctgcaccgcacggagctcgccacccaggagaaggtgaccctggtgcagacactggagatccagcgacagcagagtgaccatgatgccgagcgcctgcgggaggccatcgctgagctggagcgtgagaaggagaagctccaacaggaggccaaactgctgcagctcaagtctgaggagatgcagacggtgcagcaggagcagctgctgcaggagacgcaggccctgcagcaaagcttcctctctgaaaaggacagcctgctacagcgggagcgcttcatcgagcaggagaaggccaagctggagcagctcttccaggacgaggtggccaaggcacagcagctgcgtgaggagcagcagcggcagcagcagcagatggagcaggaacggcagcggctggtggccagcatggaggaggcgcggcggcggcagcatgaggccgaggagggcgtgcggcgcaagcaggaggagctgcagcagctggagcagcagcggcggcagcaggaggagctgctggctgaggagaaccagaggctgcgtgagcagctgcagctcctggaggagcagcaccgggccgcgctggcgcactcagaggaggtcactgcctcgcaggtggctgccacaaagaccctgcccaatggccgggatgcacttgatggccccgcggcagaggcagagccggagcacagcttcgatggcctgcggcggaaggtgtcagctcagaggctgcaggaggccggcatcctgagtgcggaggagctgcagcggttggcgcagggccacaccacggtggacgagctcgcacggcgggaagacgtgcgccactacctgcagggccgcagcagtatcgcagggctgttgctgaaggccaccaatgagaagctgagtgtttacgccgccctgcagaggcagctgctgagtcccggcacggccctcatcctgctggaggcgcaggcggcctcaggcttcctgctggaccctgtgcggaaccggcggctgaccgtcaacgaggctgtgaaggagggtgtggtgggccccgagctgcaccacaagctgctgtcggccgagcgcgccgtcactggctacaaggacccctacactggccagcagatctctctcttccaagccatgcagaagggcctcatcgtccgggagcacggcatccgcctgctggaggcccagatcgccacgggcggcgttatcgaccccgtgcacagccaccgcgtgcccgtggacgtggcctaccggcgcggctacttcgacgaggagatgaaccgcgtcctggcggaccccagcgacgacaccaagggcttctttgaccccaacacgcacgagaacctcacgtacctgcagctactggagcgctgcgtggaggaccccgagacgggcctgtgccttctgccactcacggataaggctgccaagggcggggagctggtctacactgactccgaggcccgggacgtctttgagaaggccaccgtgtctgcgccgttcggcaagttccagggcaagacggtgaccatttgggagatcatcaactcggaatacttcacggcagagcagcggcgggacctgctgcggcagttccgcacgggccggatcacagtggagaagatcatcaagatcatcatcacggtggtggaggagcaggagcagaagggccggctttgctttgagggcctgcgcagcctggtgccagccgccgagctgctggagagcagggtcatcgaccgcgagctctaccagcagctgcagcgaggtgagcgctctgtgcgagacgtagccgaggtggacactgtgcggcgggctctccggggtgccaacgtcatcgcgggtgtatggctggaggaggcggggcagaagctgagtatctacaatgccctgaagaaagacctgctgccatccgacatggccgtggccctgttggaagcccaggccggcaccgggcacatcatcgaccccgccaccagcgcccggctgaccgtggacgaggcagtgcgtgctggcctggtgggccccgagtttcatgagaagctgctatcagccgagaaggctgtgacagggtacagggacccctacacagggcagagcgtctccctgttccaggccctgaagaagggcctcattccccgggagcagggcctgcgcctgttggacgcccagctgtccacgggcggcatcgtggaccccagcaagagccaccgcgtgcccctggatgtcgcctgcgcccgaggctgcctggatgaggagaccagcagggccctgtcggcaccaagggccgacgccaaggcctacagtgaccccagcacaggggagccggccacctacggcgagctccagcagcggtgccggcccgaccagctgaccgggctgagcctgctgccgctctcagaaaaggctgctcgggcccggcaggaggagctctactcagagctgcaggcccgtgagacctttgaaaagaccccggttgaggtccccgtgggtggcttcaagggcaggacggtgacggtgtgggagctcatcagctctgagtacttcactgcggagcagcggcaggagctgttgcgtcagttccgcacgggcaaggtcaccgtggagaaggtcatcaagattctcattaccatcgtggaggaggtggagaccctgcggcaggagaggctgtccttcagcggcctccgtgcccctgtgccagccagcgagctcctggcttccggggtcctcagcagagcccagtttgagcagctcaaggacggcaagacgacggtcaaggacctttcggagctgggctccgtgcggacgctgctgcagggcagtggctgcctcgccggcatctacctggaggacaccaaggagaaggtgtccatctacgaggccatgcgccggggcctgctgagagccacaacggctgcgctcctgctggaggcgcaggcggccactggcttcctggtggaccccgtgcggaaccagcgcctgtatgtccacgaggccgtgaaggcgggcgtggtgggccccgagcttcacgagcagctgctgtctgccgagaaggccgtcaccggctacagagacccctactcgggcagcaccatctccctcttccaggccatgcagaagggcctggttctccggcagcacggcatccgcctgctggaggcccagatcgccacgggcggcatcatcgaccccgtgcacagccaccgcgtgcctgtggacgtggcctaccagcgcggctacttcagtgaggagatgaaccgcgtcctggcggaccccagcgacgacaccaagggcttctttgaccccaacacgcatgagaacctcacgtacaggcagctgctggagcggtgcgtggaggaccccgagacgggcttgcgccttctgccactgaaaggggcggagaaggctgaggtggtggagaccacgcaggtgtacactgaggaggagacaagaagggcatttgaagagacacagatcgacattcccggcggcggcagccacggcggctccaccatgtccctgtgggaggtgatgcagtcggacctgatccccgaggagcagcgggcccagctgatggctgacttccaggccggccgggtgaccaaggaacgcatgatcatcatcatcatcgagatcattgagaagacagagatcatccgccagcagggtctggcctcctacgactacgtgcgccgccgcctcacggctgaggacctgttcgaggctcggatcatctctctcgagacctacaacctgctccgggagggcaccaggagcctccgtgaggctctcgaggcggagtccgcctggtgctacctctatggcacgggctccgtggctggtgtctacctgcccggttccaggcagacactgagcatctaccaggctctcaagaaagggctgctgagtgccgaggtggcccgcctgctgctggaggcacaggcagccacaggcttcctgctggacccggtgaagggggagcggctgactgtggatgaggctgtgcggaagggcctcgtggggcccgagctgcacgaccgcctgctctcggctgagcgggcggtcaccggctaccgtgacccctacaccgagcagaccatctcgctcttccaggccatgaagaaggagctgatccctactgaggaggccctgcggctgctggatgcccagctggccaccggcggcatcgtggacccccgcctgggcttccaccttcccctggaggtggcttaccagcgtggctacctcaacaaggacacgcacgaccagctgtcagagcccagcgaggtgcgcagctacgtggacccgtccaccgacgagcgcctcagctacacgcagctgctcaggcggtgccgtcgtgacgacggcaccggccagctgctcctgccactgtcggacgcccgcaagctgaccttccgtggcctgcggaagcagatcaccatggaggagctggtgcgctcgcaggtcatggacgaggccacggcgctgcagctgcgggagggcctgacctccatcgaggaggtcaccaagaacttgcagaagttcctggaaggcaccagctgcatcgctggtgtcttcgtggacgccaccaaggaacggctctcggtgtaccaggccatgaagaagggcatcatccgccccggcacagcctttgagctcctggaggcgcaggcggccaccggttacgtcatcgaccccatcaagggactgaagctgacggtggaggaggctgtgcgtatgggcattgtgggccccgagttcaaggacaagctgctgtcggccgagcgcgccgtcactgggtacaaggacccctactctgggaagctcatctccctcttccaggccatgaagaagggcctgatcctgaaggaccatggcatccgcctgctggaggcccagatcgccacgggcggcatcatcgaccctgaggagagccaccggctgcccgtggaggtggcctacaagcgcggcctcttcgatgaggagatgaacgagatcctgaccgacccctcggacgacaccaagggcttctttgaccctaacacggaggagaacctcacctacctgcagctgatggagcgttgtatcactgacccccagacgggcctgtgtctcttgccgctgaaggagaagaagcgggagcggaagacgtcctccaagtcctccgtgcgcaagcgccgagtggtcatcgtggaccccgagacgggcaaggagatgtcagtgtacgaggcctaccgcaagggcctgattgaccaccagacgtacctggagctgtccgagcaggagtgcgagtgggaggagatcaccatctcctcctcggacggcgtggtcaagtccatgatcatcgaccgccgctccgggcgccagtacgacatcgatgatgccatcgccaagaacctcatcgaccgctcggcactggaccagtaccgcgccggcacgctctccatcaccgagttcgccgacatgctctcgggcaacgccggtggtttccgctcccgttcctcctcggtgggatcctcctcctcctaccccatcagccccgccgtctccaggacccagctggcctcctggtcagaccccactgaggagacgggccccgtggctggcatcctggacacggagacgctggagaaggtgtccatcaccgaggccatgcaccggaacctggtggataacatcacggggcagcggctgctggaggcgcaggcctgcaccgggggcatcatcgaccccagcaccggtgagcgcttccctgtcaccgacgccgtcaacaagggcctggtggacaagatcatggtggaccgcatcaacctggcccagaaggccttctgcggcttcgaggacccacgcaccaagaccaagatgtcggccgcccaggccctgaagaagggctggctctactacgaggccggccagcgcttcctggaggtgcagtacctgaccggcggcttgatcgagcccgacacgccgggccgcgtgcccctggacgaggccctgcagcgcggcacggtggacgcccgcaccgcacagaagctgcgtgacgtgggcgcctactccaagtacctcacctgccctaagaccaagctcaagatctcctataaggacgcgctggaccgcagcatggtggaggagggcacggggctgcggctgctggaggctgccgcgcagtccaccaagggctactacagcccctacagcgtcagcggctccggctctaccgctggctcccgcaccggctcgcgcaccggctcccgggccggctcccgccgcggcagctttgacgccaccggctccggcttctccatgaccttctcttcatcctcctactcctcctcgggctacggccgccgctacgcctcggggtcctcggcctccctggggggccctgagtctgccgtggcctgaggctgcctgcgcccaccccgctctgcatgcggcccagcccggctcccaccgaggcgcgggggccgttttcaacgcttaaaggtgtcttcctcccaagtggtgcctaaagtttaaccaaaaagaccagactaatatattaatatatatctgctgtccagacagcctgtatcttgggggacagggctggcccagccctgctggccgcctcaccccctcgggtctcctcactcccttctacctgccactcacacagccaggtgccttggagggtcccaagctgggccccagcccaccctcctgtcttcccagggtagcccgcctgccagtcctagctgcacagggcagctgggcccaaccctgtctgtagagggccctggtgtttctagcactggcctgcacggtgggccttgctggggacggggggccccagtcagcctctctcccagtctacccagagaagccccttccccatgggaagacgaggccctcgggcccagcccccacagtgctgtctgatctgtgctttccagctcaccccccacactcactcctgagacccctggcctccggcgtcagcctccagcctctgttcccctagtaagtgccttccatgtcggcctctaaccccaggccccgaggacccagacccagtggggaggcggacgttccagccggcatggctgggaactgcagacctgtcctcctggtgggtccaggggcccctccagcttgtggagccccacactggggtgccgcctgcccgtctctctcccatggagccccagccccctttgggcccagggacaccagccaggctctgtgctgaccctcctgttgcacccagccctggtctcagcagcgaccacccctgcctccaccctctgagctttgcatgttccactaaccccgggcgggtggcaggtggaggtgtcaggctgctggcgcctctgcaagggcagaacactaacctgaccgtgggcggggccttgcggtatccgcccccaataaaagcaattccaaccttcagccggttcccagcgcaggaagggcagccctggcggctccgcgtggcggctatggagccctcgggcagcctgtttccctccctggtggttgtgggtcacgttgtcaccctggccgctgtgtggcactggcgcaggggacgtcggtgggcgcaggacgagcaagatgagcgggatcgtgtgcagaagaaaaccttcaccaagtgggtcaacaagcacctcatcaaggcccagaggcacatcagtgacctgtatgaagacctccgcgatggccacaacctcatctccctgctggaggtcctctcgggggacagcctgccccgggagaaggggaggatgcgtttccacaagctgcagaatgtccagattgccctggactacctccggcaccgccaggtgaagctggtgaacatcaggaatgatgacatcgctgacggcaaccccaagctgacccttggcctcatctggacaatcattctgcacttccagatctcagatatccaggtgagtgggcagtcggaggacatgacggccaaggagaagctgctgctgtggtcgcagcgaatggtggaggggtaccagggcctgcgatgcgacaacttcacctccagctggagagacggccgcctcttcaatgccatcatccaccggcacaagcccctgctcatcgacatgaacaaggtgtaccggcagaccaacctggagaacctggaccaggccttctctgtggcggagcgggacctgggagtgacgcggctcctggaccctgaggacgtggatgtccctcagcccgacgagaagtccatcatcacctacgtctcgtcgctgtatgacgccatgccccgcgtgccggacgtgcaggatggggtgagggccaacgagctgcagctgcgctggcaggagtaccgggagctggtgctgctgctgcttcagtggatgcgacaccacacggccgcctttgaggaacgcaggttcccctccagcttcgaggagattgagatcctgtggtctcagttcctgaagtttaaggagatggagctaccagccaaggaggccgacaagaacaggtccaagggcatctaccaatccctggagggagcggtgcaagcaggccagctcaaggtgccccctggctaccacccgctggatgtggagaaggagtggggcaagctgcacgtggccatcctggagcgggagaagcagctccgcagcgagtttgagaggctggagtgtcttcagcgcatcgtgaccaagctgcagatggaggcggggctgtgtgaggagcagctgaaccaggccgacgccctgctgcagtcggatgtccggctgctggctgcaggcaaagtgccacagcgggcgggggaggtggaacgggacttggacaaggcggatagcatgatccggctgctcttcaacgacgtgcagaccctcaaggatggacggcacccgcagggcgagcagatgtaccgcagggtgtaccgtctgcacgagcgcctggtagccatccgcaccgagtacaacctacggctgaaggcaggcgtggcggcccctgcaacccaggtggcccaggtgactctgcagagtgtgcagaggcgccccgagctggaggactccactctgcgctacctgcaggacctgctggcctgggtggaggagaaccagcaccgtgtggatggcgctgagtggggtgtggacctgcccagcgtggaggcgcagctgggcagccaccgaggcctgcaccagtccatcgaagaattccgggccaagatcgagcgggcacggagtgacgagggccagctctcccccgccacccggggtgcctaccgtgactgcctgggtcggctggacctgcagtacgccaagctgctgaactcctccaaggcccgcctcaggtccctggagagcttgcacagctttgtggcagccgccactaaggagctaatgtggctgaatgagaaggaggaggaggaggtgggcttcgactggagcgaccgcaacaccaacatgaccgccaagaaggagagctactcggcgctgatgcgggagctggagctgaaggagaagaagatcaaggagctccaaaatgctggggaccggctgctgcgggaggaccacccggcccggcccacggtggagtccttccaggcggccctgcagacgcagtggagctggatgctacagctgtgctgctgtatcgaggcacacctgaaggagaacgctgcctactttcagttcttctcagatgtgcgggaggccgaggggcagttgcagaagctgcaggaggcactgcgtaggaaatacagttgtgatcgctccgccaccgtcacccggctggaggacctgctgcaggatgcccaggacgagaaggaacagctgaacgagtacaagggccacctctcaggcctggccaagcgggccaaggccgtcgtgcagctgaagccccgccacccagcccaccccatgcggggccgcctgcccctgctggccgtgtgcgactataagcaggtggaggtgactgtgcacaagggtgacgagtgccagctggtgggccctgcacagccgtcccactggaaggtgctcagcagctccggcagcgaggccgccgtgccctccgtgtgcttcctggtgcccccgcccaaccaggaggcccaggaggccgtcaccaggctggaggcccagcaccaggccctggtcacgctgtggcaccagttgcacgtggacatgaagagccttctggcctggcagagccttcgccgcgacgtgcagctcatccgctcctggtccctggccacgttccgcaccctgaagccagaggagcagcgccaagccctgcacagcctggagctgcactaccaggccttcctgcgggacagccaggacgcgggcggcttcggacccgaggaccggctgatggctgagcgcgagtacggctcctgcagccaccactaccagcagctgctgcagagcctggaacagggtgcacaggaagagtctcgctgccagcgctgcatctccgagctcaaagacatccggctgcagctggaggcctgtgagacgcgcaccgtgcaccgcctgcggctgccgctggacaaagagccggcacgggagtgtgcccagcgcatcgccgagcagcagaaggcacaggcagaggtggaggggctgggcaagggggtcgcccggctctctgccgaggccgagaaggtcttggccctaccagagccatcgcctgcggcccccacgctgcgctcggagctggagctgacgctgggcaagctggagcaggtccgcagcctgtctgccatctacctggagaagctcaagaccatcagcctggtgatccgcggcacgcagggggccgaggaggtgctcagggcccacgaggagcagctcaaggaggcccaggccgtgccggccaccctcccggagctcgaggccaccaaggcctctctgaagaagctgcgggcccaggccgaggcacagcagcccacgttcgacgccctgcgggatgagctgcggggggcacaggaggtgggggagcgactgcagcagcggcacggggagcgggacgtggaggtggagcgctggcgggagcgggtcgcccagttgcttgagcgctggcaggctgtgctggcccagaccgacgtgcggcagcgcgagctcgagcaactgggccgccagctgcgttactaccgcgagagtgcagaccccttgggcgcctggctgcaggacgccaggcggcggcaggagcagatccaggccatgccgctggccgacagccaggctgtgcgggagcagctgcggcaggagcaggccctgctggaggagatcgagcgccacggcgagaaggtcgaggagtgccagaggtttgcgaaacagtacatcaacgccatcaaggactatgaactccagctggtgacgtacaaggcgcagcttgagccggtggcctccccggccaagaagcccaaggtccagtcgggatcagagagtgtcatccaggagtacgtggacctgcgtacgcactacagcgagctgaccacactgacgagccagtacatcaagttcatcagcgagactctgcggcgcatggaggaggaggagaggctggctgagcagcagcgggcagaggagcgcgagcggctggccgaggtggaggccgcgctggagaagcagcggcagctggccgaggcgcacgcccaggcaaaggcacaggcggagcgggaggcgaaggagctgcagcagcgcatgcaggaggaggtggtgcggcgggaggaggcggcggtggacgcgcagcagcagaagcgcagcattcaggaggagctgcagcagctgcggcagagctcggaggcggagatccaggccaaggcccggcaggcagaggcggctgagcgcagccggctgcgcatcgaggaggagatccgcgtggtgcgcctgcagttggaggccaccgagcgccagcgtggcggggctgagggggagctgcaggcactgcgtgcacgggcggaggaggctgaggcacaaaagcgacaggcgcaggaggaggccgagcgcttgcggaggcaggtgcaggacgagagccagcgtaagcggcaggcggaggtggagctggcctcgcgcgtgaaggccgaggccgaggcggcgcgcgagaagcagcgggccctgcaggccctggaggagctgcggctgcaggcggaggaggcggagcggcgcctgcggcaggccgaggtggagcgagcgcggcaggtacaggtggccctggagacggcgcagcgcagtgcagaggcggagctgcagagcaaacgcgcctccttcgccgagaagacggcacagctggagcgctccctgcaggaggaacacgtggctgtggcacagctgcgggaggaggctgagcggcgggcacagcagcaggccgaggccgagcgggcgcgcgaggaggcagagcgggagctggagcgctggcagctcaaggccaacgaggcgctacggctgcggctgcaggcggaggaggtggcgcagcagaagagcctggcgcaggccgaggctgagaagcagaaggaggaggcggagcgcgaggcgcggcggcgcggcaaggcggaggagcaggccgtccggcagcgggagctggctgaacaagagctggagaagcagcggcagctggcggaaggcaccgcgcagcagcgcctggccgcggagcaggagttgatccggctgcgggccgagacggagcagggggagcagcagcggcagctgctggaggaggagctggcccggctgcagcgtgaggcggctgcagccacgcagaaacggcaggagctggaagccgagctggccaaggtgcgggccgagatggaggtgctgctggccagcaaggcgagggctgaggaggagtcgcgctccaccagcgagaagtccaagcagaggctggaggccgaggccggccggttccgcgagctggccgaggaggccgcccgcctgcgtgccctggcggaagaggccaagcggcagcggcagctggccgaggaagacgcggcgcggcagcgggccgaggcggagcgggtgcttgcggagaagctggccgccatcggcgaggccacgcggctcaagacggaggcggagatcgcgctcaaggagaaggaggcggagaacgagcgcctgcggcggctggcggaggacgaggccttccagcggcggcggctggaggagcaggccgcgcaacacaaggctgacatcgaggagcgcctggcccagctgcgcaaggcatcggacagcgagctggagcggcagaaggggctggtggaggacacgctgaggcagcggcggcaggtggaggaggagatcctggcgctgaaggcgagcttcgagaaggcggccgctggcaaggcggagctggagctggagctgggacgcatccgcagcaacgcggaggacacgctgcgcagcaaggagcaggccgagctggaggctgcgaggcagcggcagctggcggcggaggaggagcggcggcgccgtgaggctgaggagcgcgtgcagaagagcctggcggccgaggaggaggccgcacggcagcggaaggcggcgctggaggaagtcgagcggctgaaagccaaggtggaggaggcgcggcgcctgcgggagcgagcggagcaggagtcggcgcggcagctgcagctggcccaggaggccgcccagaagcggctgcaggcggaagagaaggcacacgccttcgcggtgcagcagaaggagcaggagctacagcagacgctgcagcaggagcagagcgtgctggaccagctgcgcggcgaggcggaggcggcccggcgggcggctgaggaggcggaggaggcccgggtgcaggcggagcgtgaggcggcgcagtcccggcggcaggtggaagaggccgagcggctgaagcagtcggcagaggagcaggcacaggcccgggctcaggcacaggcggctgcagagaagctgcgcaaggaggccgagcaagaggcggcgcggcgggcacagg

SEQ ID NO: 679 - DNA, 32765 bp, Homo sapiens
  misc_feature (977)..(977): second gene starts at position 977
atgagcttcaccactcgctccaccttctccaccaactaccggtccctgggctctgtccaggcgcccagctacggcgcccggccggtcagcagcgcggccagcgtctatgcaggcgctgggggctctggttcccggatctccgtgtcccgctccaccagcttcaggggcggcatggggtccgggggcctggccaccgggatagccgggggtctggcaggaatgggaggcatccagaacgagaaggagaccatgcaaagcctgaacgaccgcctggcctcttacctggacagagtgaggagcctggagaccgagaaccggaggctggagagcaaaatccgggagcacttggagaagaagggaccccaggtcagagactggagccattacttcaagatcatcgaggacctgagggctcagatcttcgcaaatactgtggacaatgcccgcatcgttctgcagattgacaatgcccgtcttgctgctgatgactttagagtcaagtatgagacagagctggccatgcgccagtctgtggagaacgacatccatgggctccgcaaggtcattgatgacaccaatatcacacgactgcagctggagacagagatcgaggctctcaaggaggagctgctcttcatgaagaagaaccacgaagaggaagtaaaaggcctacaagcccagattgccagctctgggttgaccgtggaggtagatgcccccaaatctcaggacctcgccaagatcatggcagacatccgggcccaatatgacgagctggctcggaagaaccgagaggagctagacaagtactggtctcagcagattgaggagagcaccacagtggtcaccacacagtctgctgaggttggagctgctgagacgacgctcacagagctgagacgtacagtccagtccttggagatcgacctggactccatgagaaatctgaaggccagcttggagaacagcctgagggtggagaagcagcggcagctggccgaggcgcacgcccaggcaaaggcacaggcggagcgggaggcgaaggagctgcagcagcgcatgcaggaggaggtggtgcggcgggaggaggcggcggtggacgcgcagcagcagaagcgcagcattcaggaggagctgcagcagctgcggcagagctcggaggcggagatccaggccaaggcccggcaggcagaggcggctgagcgcagccggctgcgcatcgaggaggagatccgcgtggtgcgcctgcagttggaggccaccgagcgccagcgtggcggggctgagggggagctgcaggcactgcgtgcacgggcggaggaggctgaggcacaaaagcgacaggcgcaggaggaggccgagcgcttgcggaggcaggtgcaggacgagagccagcgtaagcggcaggcggaggtggagctggcctcgcgcgtgaaggccgaggccgaggcggcgcgcgagaagcagcgggccctgcaggccctggaggagctgcggctgcaggcggaggaggcggagcggcgcctgcggcaggccgaggtggagcgagcgcggcaggtacaggtggccctggagacggcgcagcgcagtgcagaggcggagctgcagagcaaacgcgcctccttcgccgagaagacggcacagctggagcgctccctgcaggaggaacacgtggctgtggcacagctgcgggaggaggctgagcggcgggcacagcagcaggccgaggccgagcgggcgcgcgaggaggcagagcgggagctggagcgctggcagctcaaggccaacgaggcgctacggctgcggctgcaggcggaggaggtggcgcagcagaagagcctggcgcaggccgaggctgagaagcagaaggaggaggcggagcgcgaggcgcggcggcgcggcaaggcggaggagcaggccgtccggcagcgggagctggctgaacaagagctggagaagcagcggcagctggcggaaggcaccgcgcagcagcgcctggccgcggagcaggagttgatccggctgcgggccgagacggagcagggggagcagcagcggcagctgctggaggaggagctggcccggctgcagcgtgaggcggctgcagccacgcagaaacggcaggagctggaagccgagctggccaaggtgcgggccgagatggaggtgctgctggccagcaaggcgagggctgaggaggagtcgcgctccaccagcgagaagtccaagcagaggctggaggccgaggccggccggttccgcgagctggccgaggaggccgcccgcctgcgtgccctggcggaagaggccaagcggcagcggcagctggccgaggaagacgcggcgcggcagcgggccgaggcggagcgggtgcttgcggagaagctggccgccatcggcgaggccacgcggctcaagacggaggcggagatcgcgctcaaggagaaggaggcggagaacgagcgcctgcggcggctggcggaggacgaggccttccagcggcggcggctggaggagcaggccgcgcaacacaaggctgacatcgaggagcgcctggcccagctgcgcaaggcatcggacagcgagctggagcggcagaaggggctggtggaggacacgctgaggcagcggcggcaggtggaggaggagatcctggcgctgaaggcgagcttcgagaaggcggccgctggcaaggcggagctggagctggagctgggacgcatccgcagcaacgcggaggacacgctgcgcagcaaggagcaggccgagctggaggctgcgaggcagcggcagctggcggcggaggaggagcggcggcgccgtgaggctgaggagcgcgtgcagaagagcctggcggccgaggaggaggccgcacggcagcggaaggcggcgctggaggaagtcgagcggctgaaagccaaggtggaggaggcgcggcgcctgcgggagcgagcggagcaggagtcggcgcggcagctgcagctggcccaggaggccgcccagaagcggctgcaggcggaagagaaggcacacgccttcgcggtgcagcagaaggagcaggagctacagcagacgctgcagcaggagcagagcgtgctggaccagctgcgcggcgaggcggaggcggcccggcgggcggctgaggaggcggaggaggcccgggtgcaggcggagcgtgaggcggcgcagtcccggcggcaggtggaagaggccgagcggctgaagcagtcggcagaggagcaggcacaggcccgggctcaggcacaggcggctgcagagaagctgcgcaaggaggccgagcaagaggcggcgcggcgggcacaggcggagcaggcggccctgcggcagaagcaggcagctgacgcggagatggagaagcataagaaattcgccgagcagacgctgcggcagaaggcgcaggtggagcaggagctgacaacactgcggctgcagctggaggagaccgaccaccagaagaacctgctggacgaggagctgcagcggctgaaggcggaggccacggaggccgcacgccagcgcagccaggtggaggaggagctcttctcggtgcgcgtgcagatggaggagctgagcaagctcaaggcacgcatcgaggctgagaaccgcgcactcatcttgcgtgacaaggacaatacgcagcgcttcctgcaggaggaggctgagaagatgaagcaggtggcggaggaggccgcgcggctgagtgtggcggcccaagaggctgcgcgactgcggcagctggcagaggaggacctggcacagcagcgggccttggcagagaagatgctcaaggagaagatgcaggcggtgcaggaggccacgcgactcaaggctgaggcggaactgctgcagcagcagaaggagcttgcgcaggagcaggcgcggcggctgcaggaggacaaggagcagatggcgcagcagctggcggaggagacgcagggcttccagcggacgctggaggccgagcggcagcggcagctggagatgagcgctgaggctgagcgcctcaagctgcgtgtggccgagatgagccgagcccaggcccgcgctgaggaggacgcccagcgcttccggaagcaggcggaggagatcggtgagaagctgcaccgcacggagctcgccacccaggagaaggtgaccctggtgcagacactggagatccagcgacagcagagtgaccatgatgccgagcgcctgcgggaggccatcgctgagctggagcgtgagaaggagaagctccaacaggaggccaaactgctgcagctcaagtctgaggagatgcagacggtgcagcaggagcagctgctgcaggagacgcaggccctgcagcaaagcttcctctctgaaaaggacagcctgctacagcgggagcgcttcatcgagcaggagaaggccaagctggagcagctcttccaggacgaggtggccaaggcacagcagctgcgtgaggagcagcagcggcagcagcagcagatggagcaggaacggcagcggctggtggccagcatggaggaggcgcggcggcggcagcatgaggccgaggagggcgtgcggcgcaagcaggaggagctgcagcagctggagcagcagcggcggcagcaggaggagctgctggctgaggagaaccagaggctgcgtgagcagctgcagctcctggaggagcagcaccgggccgcgctggcgcactcagaggaggtcactgcctcgcaggtggctgccacaaagaccctgcccaatggccgggatgcacttgatggccccgcggcagaggcagagccggagcacagcttcgatggcctgcggcggaaggtgtcagctcagaggctgcaggaggccggcatcctgagtgcggaggagctgcagcggttggcgcagggccacaccacggtggacgagctcgcacggcgggaagacgtgcgccactacctgcagggccgcagcagtatcgcagggctgttgctgaaggccaccaatgagaagctgagtgtttacgccgccctgcagaggcagctgctgagtcccggcacggccctcatcctgctggaggcgcaggcggcctcaggcttcctgctggaccctgtgcggaaccggcggctgaccgtcaacgaggctgtgaaggagggtgtggtgggccccgagctgcaccacaagctgctgtcggccgagcgcgccgtcactggctacaaggacccctacactggccagcagatctctctcttccaagccatgcagaagggcctcatcgtccgggagcacggcatccgcctgctggaggcccagatcgccacgggcggcgttatcgaccccgtgcacagccaccgcgtgcccgtggacgtggcctaccggcgcggctacttcgacgaggagatgaaccgcgtcctggcggaccccagcgacgacaccaagggcttctttgaccccaacacgcacgagaacctcacgtacctgcagctactggagcgctgcgtggaggaccccgagacgggcctgtgccttctgccactcacggataaggctgccaagggcggggagctggtctacactgactccgaggcccgggacgtctttgagaaggccaccgtgtctgcgccgttcggcaagttccagggcaagacggtgaccatttgggagatcatcaactcggaatacttcacggcagagcagcggcgggacctgctgcggcagttccgcacgggccggatcacagtggagaagatcatcaagatcatcatcacggtggtggaggagcaggagcagaagggccggctttgctttgagggcctgcgcagcctggtgccagccgccgagctgctggagagcagggtcatcgaccgcgagctctaccagcagctgcagcgaggtgagcgctctgtgcgagacgtagccgaggtggacactgtgcggcgggctctccggggtgccaacgtcatcgcgggtgtatggctggaggaggcggggcagaagctgagtatctacaatgccctgaagaaagacctgctgccatccgacatggccgtggccctgttggaagcccaggccggcaccgggcacatcatcgaccccgccaccagcgcccggctgaccgtggacgaggcagtgcgtgctggcctggtgggccccgagtttcatgagaagctgctatcagccgagaaggctgtgacagggtacagggacccctacacagggcagagcgtctccctgttccaggccctgaagaagggcctcattccccgggagcagggcctgcgcctgttggacgcccagctgtccacgggcggcatcgtggaccccagcaagagccaccgcgtgcccctggatgtcgcctgcgcccgaggctgcctggatgaggagaccagcagggccctgtcggcaccaagggccgacgccaaggcctacagtgaccccagcacaggggagccggccacctacggcgagctccagcagcggtgccggcccgaccagctgaccgggctgagcctgctgccgctctcagaaaaggctgctcgggcccggcaggaggagctctactcagagctgcaggcccgtgagacctttgaaaagaccccggttgaggtccccgtgggtggcttcaagggcaggacggtgacggtgtgggagctcatcagctctgagtacttcactgcggagcagcggcaggagctgttgcgtcagttccgcacgggcaaggtcaccgtggagaaggtcatcaagattctcattaccatcgtggaggaggtggagaccctgcggcaggagaggctgtccttcagcggcctccgtgcccctgtgccagccagcgagctcctggcttccggggtcctcagcagagcccagtttgagcagctcaaggacggcaagacgacggtcaaggacctttcggagctgggctccgtgcggacgctgctgcagggcagtggctgcctcgccggcatctacctggaggacaccaaggagaaggtgtccatctacgaggccatgcgccggggcctgctgagagccacaacggctgcgctcctgctggaggcgcaggcggccactggcttcctggtggaccccgtgcggaaccagcgcctgtatgtccacgaggccgtgaaggcgggcgtggtgggccccgagcttcacgagcagctgctgtctgccgagaaggccgtcaccggctacagagacccctactcgggcagcaccatctccctcttccaggccatgcagaagggcctggttctccggcagcacggcatccgcctgctggaggcccagatcgccacgggcggcatcatcgaccccgtgcacagccaccgcgtgcctgtggacgtggcctaccagcgcggctacttcagtgaggagatgaaccgcgtcctggcggaccccagcgacgacaccaagggcttctttgaccccaacacgcatgagaacctcacgtacaggcagctgctggagcggtgcgtggaggaccccgagacgggcttgcgccttctgccactgaaaggggcggagaaggctgaggtggtggagaccacgcaggtgtacactgaggaggagacaagaagggcatttgaagagacacagatcgacattcccggcggcggcagccacggcggctccaccatgtccctgtgggaggtgatgcagtcggacctgatccccgaggagcagcgggcccagctgatggctgacttccaggccggccgggtgaccaaggaacgcatgatcatcatcatcatcgagatcattgagaagacagagatcatccgccagcagggtctggcctcctacgactacgtgcgccgccgcctcacggctgaggacctgttcgaggctcggatcatctctctcgagacctacaacctgctccgggagggcaccaggagcctccgtgaggctctcgaggcggagtccgcctggtgctacctctatggcacgggctccgtggctggtgtctacctgcccggttccaggcagacactgagcatctaccaggctctcaagaaagggctgctgagtgccgaggtggcccgcctgctgctggaggcacaggcagccacaggcttcctgctggacccggtgaagggggagcggctgactgtggatgaggctgtgcggaagggcctcgtggggcccgagctgcacgaccgcctgctctcggctgagcgggcggtcaccggctaccgtgacccctacaccgagcagaccatctcgctcttccaggccatgaagaaggagctgatccctactgaggaggccctgcggctgctggatgcccagctggccaccggcggcatcgtggacccccgcctgggcttccaccttcccctggaggtggcttaccagcgtggctacctcaacaaggacacgcacgaccagctgtcagagcccagcgaggtgcgcagctacgtggacccgtccaccgacgagcgcctcagctacacgcagctgctcaggcggtgccgtcgtgacgacggcaccggccagctgctcctgccactgtcggacgcccgcaagctgaccttccgtggcctgcggaagcagatcaccatggaggagctggtgcgctcgcaggtcatggacgaggccacggcgctgcagctgcgggagggcctgacctccatcgaggaggtcaccaagaacttgcagaagttcctggaaggcaccagctgcatcgctggtgtcttcgtggacgccaccaaggaacggctctcggtgtaccaggccatgaagaagggcatcatccgccccggcacagcctttgagctcctggaggcgcaggcggccaccggttacgtcatcgaccccatcaagggactgaagctgacggtggaggaggctgtgcgtatgggcattgtgggccccgagttcaaggacaagctgctgtcggccgagcgcgccgtcactgggtacaaggacccctactctgggaagctcatctccctcttccaggccatgaagaagggcctgatcctgaaggaccatggcatccgcctgctggaggcccagatcgccacgggcggcatcatcgaccctgaggagagccaccggctgcccgtggaggtggcctacaagcgcggcctcttcgatgaggagatgaacgagatcctgaccgacccctcggacgacaccaagggcttctttgaccctaacacggaggagaacctcacctacctgcagctgatggagcgttgtatcactgacccccagacgggcctgtgtctcttgccgctgaaggagaagaagcgggagcggaagacgtcctccaagtcctccgtgcgcaagcgccgagtggtcatcgtggaccccgagacgggcaaggagatgtcagtgtacgaggcctaccgcaagggcctgattgaccaccagacgtacctggagctgtccgagcaggagtgcgagtgggaggagatcaccatctcctcctcggacggcgtggtcaagtccatgatcatcgaccgccgctccgggcgccagtacgacatcgatgatgccatcgccaagaacctcatcgaccgctcggcactggaccagtaccgcgccggcacgctctccatcaccgagttcgccgacatgctctcgggcaacgccggtggtttccgctcccgttcctcctcggtgggatcctcctcctcctaccccatcagccccgccgtctccaggacccagctggcctcctggtcagaccccactgaggagacgggccccgtggctggcatcctggacacggagacgctggagaaggtgtccatcaccgaggccatgcaccggaacctggtggataacatcacggggcagcggctgctggaggcgcaggcctgcaccgggggcatcatcgaccccagcaccggtgagcgcttccctgtcaccgacgccgtcaacaagggcctggtggacaagatcatggtggaccgcatcaacctggcccagaaggccttctgcggcttcgaggacccacgcaccaagaccaagatgtcggccgcccaggccctgaagaagggctggctctactacgaggccggccagcgcttcctggaggtgcagtacctgaccggcggcttgatcgagcccgacacgccgggccgcgtgcccctggacgaggccctgcagcgcggcacggtggacgcccgcaccgcacagaagctgcgtgacgtgggcgcctactccaagtacctcacctgccctaagaccaagctcaagatctcctataaggacgcgctggaccgcagcatggtggaggagggcacggggctgcggctgctggaggctgccgcgcagtccaccaagggctactacagcccctacagcgtcagcggctccggctctaccgctggctcccgcaccggctcgcgcaccggctcccgggccggctcccgccgcggcagctttgacgccaccggctccggcttctccatgaccttctcttcatcctcctactcctcctcgggctacggccgccgctacgcctcggggtcctcggcctccctggggggccctgagtctgccgtggcctgaggctgcctgcgcccaccccgctctgcatgcggcccagcccggctcccaccgaggcgcgggggccgttttcaacgcttaaaggtgtcttcctcccaagtggtgcctaaagtttaaccaaaaagaccagactaatatattaatatatatctgctgtccagacagcctgtatcttgggggacagggctggcccagccctgctggccgcctcaccccctcgggtctcctcactcccttctacctgccactcacacagccaggtgccttggagggtcccaagctgggccccagcccaccctcctgtcttcccagggtagcccgcctgccagtcctagctgcacagggcagctgggcccaaccctgtctgtagagggccctggtgtttctagcactggcctgcacggtgggccttgctggggacggggggccccagtcagcctctctcccagtctacccagagaagccccttccccatgggaagacgaggccctcgggcccagcccccacagtgctgtctgatctgtgctttccagctcaccccccacactcactcctgagacccctggcctccggcgtcagcctccagcctctgttcccctagtaagtgccttccatgtcggcctctaaccccaggccccgaggacccagacccagtggggaggcggacgttccagccggcatggctgggaactgcagacctgtcctcctggtgggtccaggggcccctccagcttgtggagccccacactggggtgccgcctgcccgtctctctcccatggagccccagccccctttgggcccagggacaccagccaggctctgtgctgaccctcctgttgcacccagccctggtctcagcagcgaccacccctgcctccaccctctgagctttgcatgttccactaaccccgggcgggtggcaggtggaggtgtcaggctgctggcgcctctgcaagggcagaacactaacctgaccgtgggcggggccttgcggtatccgcccccaataaaagcaattccaaccttgagcccgcgccctcacgctcagcaccccagcctgcctgcccgcccgcctgccctgccgctgcccgctgtcacaccctgtagcgcgggagcttctcgcagcgccccgggccttctcgtggtaccctgcctgctgcctttgcccccgcactgactgcccggctccagcagccatggtggccggcatgctcatgccacgggaccagctgcgggccatctatgaggtgctcttccgcgagggcgtgatggtggccaagaaggaccggcggccccgcagcttgcacccccatgtgcccggcgtcaccaacctgcaggtcatgcgtgccatggcgtccctgcgggcacggggcctggtccgcgagacctttgcctggtgccacttttactggtacctcaccaatgaaggcatcgcccacctccgccagtacctgcacctgccgccagagatcgtgcccgcctctctgcagcgcgtgcgccgccccgtcgccatggtgatgcccgcacgccgcaccccccacgtgcaggctgtgcagggtcccctgggctccccacccaagcgggggccgctgccgacggaggagcagcgggtctaccgtcggaaggagcttgaggaggtgtcacctgagacccctgtggtgcctgctaccacccagcggaccctggccaggccaggcccggagcctgccccagccacagatgagcgggatcgtgtgcagaagaaaaccttcaccaagtgggtcaacaagcacctcatcaaggcccagaggcacatcagtgacctgtatgaagacctccgcgatggccacaacctcatctccctgctggaggtcctctcgggggacagcctgccccgggagaaggggaggatgcgtttccacaagctgcagaatgtccagattgccctggactacctccggcaccgccaggtgaagctggtgaacatcaggaatgatgacatcgctgacggcaaccccaagctgacccttggcctcatctggacaatcattctgcacttccagatctcagatatccaggtgagtgggcagtcggaggacatgacggccaaggagaagctgctgctgtggtcgcagcgaatggtggaggggtaccagggcctgcgatgcgacaacttcacctccagctggagagacggccgcctcttcaatgccatcatccaccggcacaagcccctgctcatcgacatgaacaaggtgtaccggcagaccaacctggagaacctggaccaggccttctctgtggcggagcgggacctgggagtgacgcggctcctggaccctgaggacgtggatgtccctcagcccgacgagaagtccatcatcacctacgtctcgtcgctgtatgacgccatgccccgcgtgccggacgtgcaggatggggtgagggccaacgagctgcagctgcgctggcaggagtaccgggagctggtgctgctgctgcttcagtggatgcgacaccacacggccgcctttgaggaacgcaggttcccctccagcttcgaggagattgagatcctgtggtctcagttcctgaagtttaaggagatggagctaccagccaaggaggccgacaagaacaggtccaagggcatctaccaatccctggagggagcggtgcaagcaggccagctcaaggtgccccctggctaccacccgctggatgtggagaaggagtggggcaagctgcacgtggccatcctggagcgggagaagcagctccgcagcgagtttgagaggctggagtgtcttcagcgcatcgtgaccaagctgcagatggaggcggggctgtgtgaggagcagctgaaccaggccgacgccctgctgcagtcggatgtccggctgctggctgcaggcaaagtgccacagcgggcgggggaggtggaacgggacttggacaaggcggatagcatgatccggctgctcttcaacgacgtgcagaccctcaaggatggacggcacccgcagggcgagcagatgtaccgcagggtgtaccgtctgcacgagcgcctggtagccatccgcaccgagtacaacctacggctgaaggcaggcgtggcggcccctgcaacccaggtggcccaggtgactctgcagagtgtgcagaggcgccccgagctggaggactccactctgcgctacctgcaggacctgctggcctgggtggaggagaaccagcaccgtgtggatggcgctgagtggggtgtggacctgcccagcgtggaggcgcagctgggcagccaccgaggcctgcaccagtccatcgaagaattccgggccaagatcgagcgggcacggagtgacgagggccagctctcccccgccacccggggtgcctaccgtgactgcctgggtcggctggacctgcagtacgccaagctgctgaactcctccaaggcccgcctcaggtccctggagagcttgcacagctttgtggcagccgccactaaggagctaatgtggctgaatgagaaggaggaggaggaggtgggcttcgactggagcgaccgcaacaccaacatgaccgccaagaaggagagctactcggcgctgatgcgggagctggagctgaaggagaagaagatcaaggagctccaaaatgctggggaccggctgctgcgggaggaccacccggcccggcccacggtggagtccttccaggcggccctgcagacgcagtggagctggatgctacagctgtgctgctgtatcgaggcacacctgaaggagaacgctgcctactttcagttcttctcagatgtgcgggaggccgaggggcagttgcagaagctgcaggaggcactgcgtaggaaatacagttgtgatcgctccgccaccgtcacccggctggaggacctgctgcaggatgcccaggacgagaaggaacagctgaacgagtacaagggccacctctcaggcctggccaagcgggccaaggccgtcgtgcagctgaagccccgccacccagcccaccccatgcggggccgcctgcccctgctggccgtgtgcgactataagcaggtggaggtgactgtgcacaagggtgacgagtgccagctggtgggccctgcacagccgtcccactggaaggtgctcagcagctccggcagcgaggccgccgtgccctccgtgtgcttcctggtgcccccgcccaaccaggaggcccaggaggccgtcaccaggctggaggcccagcaccaggccctggtcacgctgtggcaccagttgcacgtggacatgaagagccttctggcctggcagagccttcgccgcgacgtgcagctcatccgctcctggtccctggccacgttccgcaccctgaagccagaggagcagcgccaagccctgcacagcctggagctgcactaccaggccttcctgcgggacagccaggacgcgggcggcttcggacccgaggaccggctgatggctgagcgcgagtacggctcctgcagccaccactaccagcagctgctgcagagcctggaacagggtgcacaggaagagtctcgctgccagcgctgcatctccgagctcaaagacatccggctgcagctggaggcctgtgagacgcgcaccgtgcaccgcctgcggctgccgctggacaaagagccggcacgggagtgtgcccagcgcatcgccgagcagcagaaggcacaggcagaggtggaggggctgggcaagggggtcgcccggctctctgccgaggccgagaaggtcttggccctaccagagccatcgcctgcggcccccacgctgcgctcggagctggagctgacgctgggcaagctggagcaggtccgcagcctgtctgccatctacctggagaagctcaagaccatcagcctggtgatccgcggcacgcagggggccgaggaggtgctcagggcccacgaggagcagctcaaggaggcccaggccgtgccggccaccctcccggagctcgaggccaccaaggcctctctgaagaagctgcgggcccaggccgaggcacagcagcccacgttcgacgccctgcgggatgagctgcggggggcacaggaggtgggggagcgactgcagcagcggcacggggagcgggacgtggaggtggagcgctggcgggagcgggtcgcccagttgcttgagcgctggcaggctgtgctggcccagaccgacgtgcggcagcgcgagctcgagcaactgggccgccagctgcgttactaccgcgagagtgcagaccccttgggcgcctggctgcaggacgccaggcggcggcaggagcagatccaggccatgccgctggccgacagccaggctgtgcgggagcagctgcggcaggagcaggccctgctggaggagatcgagcgccacggcgagaaggtcgaggagtgccagaggtttgcgaaacagtacatcaacgccatcaaggactatgaactccagctggtgacgtacaaggcgcagcttgagccggtggcctccccggccaagaagcccaaggtccagtcgggatcagagagtgtcatccaggagtacgtggacctgcgtacgcactacagcgagctgaccacactgacgagccagtacatcaagttcatcagcgagactctgcggcgcatggaggaggaggagaggctggctgagcagcagcgggcagaggagcgcgagcggctggccgaggtggaggccgcgctggagaagcagcggcagctggccgaggcgcacgcccaggcaaaggcacaggcggagcgggaggcgaaggagctgcagcagcgcatgcaggaggaggtggtgcggcgggaggaggcggcggtggacgcgcagcagcagaagcgcagcattcaggaggagctgcagcagctgcggcagagctcggaggcggagatccaggccaaggcccggcaggcagaggcggctgagcgcagccggctgcgcatcgaggaggagatccgcgtggtgcgcctgcagttggaggccaccgagcgccagcgtggcggggctgagggggagctgcaggcactgcgtgcacgggcggaggaggctgaggcacaaaagcgacaggcgcaggaggaggccgagcgcttgcggaggcaggtgcaggacgagagccagcgtaagcggcaggcggaggtggagctggcctcgcgcgtgaaggccgaggccgaggcggcgcgcgagaagcagcgggccctgcaggccctggaggagctgcggctgcaggcggaggaggcggagcggcgcctgcggcaggccgaggtggagcgagcgcggcaggtacaggtggccctggagacggcgcagcgcagtgcagaggcggagctgcagagcaaacgcgcctccttcgccgagaagacggcacagctggagcgctccctgcaggaggaacacgtggctgtggcacagctgcgggaggaggctgagcggcgggcacagcagcaggccgaggccgagcgggcgcgcgaggaggcagagcgggagctggagcgctggcagctcaaggccaacgaggcgctacggctgcggctgcaggcggaggaggtggcgcagcagaagagcctggcgcaggccgaggctgagaagcagaaggaggaggcggagcgcgaggcgcggcggcgcggcaaggcggaggagcaggccgtccggcagcgggagctggctgaacaagagctggagaagcagcggcagctggcggaaggcaccgcgcagcagcgcctggccgcggagcaggagttgatccggctgcgggccgagacggagcagggggagcagcagcggcagctgctggaggaggagctggcccggctgcagcgtgaggcggctgcagccacgcagaaacggcaggagctggaagccgagctggccaaggtgcgggccgagatggaggtgctgctggccagcaaggcgagggctgaggaggagtcgcgctccaccagcgagaagtccaagcagaggctggaggccgaggccggccggttccgcgagctggccgaggaggccgcccgcctgcgtgccctggcggaagaggccaagcggcagcggcagctggccgaggaagacgcggcgcggcagcgggccgaggcggagcgggtgcttgcggagaagctggccgccatcggcgaggccacgcggctcaagacggaggcggagatcgcgctcaaggagaaggaggcggagaacgagcgcctgcggcggctggcggaggacgaggccttccagcggcggcggctggaggagcaggccgcgcaacacaaggctgacatcgaggagcgcctggcccagctgcgcaaggcatcggacagcgagctggagcggcagaaggggctggtggaggacacgctgaggcagcggcggcaggtggaggaggagatcctggcgctgaaggcgagcttcgagaaggcggccgctggcaaggcggagctggagctggagctgggacgcatccgcagcaacgcggaggacacgctgcgcagcaaggagcaggccgagctggaggctgcgaggcagcggcagctggcggcggaggaggagcggcggcgccgtgaggctgaggagcgcgtgcagaagagcctggcggccgaggaggaggccgcacggcagcggaaggcggcgctggaggaagtcgagcggctgaaagccaaggtggaggaggcgcggcgcctgcgggagcgagcggagcaggagtcggcgcggcagctgcagctggcccaggaggccgcccagaagcggctgcaggcggaagagaaggcacacgccttcgcggtgcagcagaaggagcaggagctacagcagacgctgcagcaggagcagagcgtgctggaccagctgcgcggcgaggcggaggcggcccggcgggcggctgaggaggcggaggaggcccgggtgcaggcggagcgtgaggcggcgcagtcccggcggcaggtggaagaggccgagcggctgaagcagtcggcagaggagcaggcacaggcccgggctcaggcacaggcggctgcagagaagctgcgcaaggaggccgagcaagaggcggcgcggcgggcacaggcggagcaggcggccctgcggcagaagcaggcagctgacgcggagatggagaagcataagaaattcgccgagcagacgctgcggcagaaggcgcaggtggagcaggagctgacaacactgcggctgcagctggaggagaccgaccaccagaagaacctgctggacgaggagctgcagcggctgaaggcggaggccacggaggccgcacgccagcgcagccaggtggaggaggagctcttctcggtgcgcgtgcagatggaggagctgagcaagctcaaggcacgcatcgaggctgagaaccgcgcactcatcttgcgtgacaaggacaatacgcagcgcttcctgcaggaggaggctgagaagatgaagcaggtggcggaggaggccgcgcggctgagtgtggcggcccaagaggctgcgcgactgcggcagctggcagaggaggacctggcacagcagcgggccttggcagagaagatgctcaaggagaagatgcaggcggtgcaggaggccacgcgactcaaggctgaggcggaactgctgcagcagcagaaggagcttgcgcaggagcaggcgcggcggctgcaggaggacaaggagcagatggcgcagcagctggcggaggagacgcagggcttccagcggacgctggaggccgagcggcagcggcagctggagatgagcgctgaggctgagcgcctcaagctgcgtgtggccgagatgagccgagcccaggcccgcgctgaggaggacgcccagcgcttccggaagcaggcggaggagatcggtgagaagctgcaccgcacggagctcgccacccaggagaaggtgaccctggtgcagacactggagatccagcgacagcagagtgaccatgatgccgagcgcctgcgggaggccatcgctgagctggagcgtgagaaggagaagctccaacaggaggccaaactgctgcagctcaagtctgaggagatgcagacggtgcagcaggagcagctgctgcaggagacgcaggccctgcagcaaagcttcctctctgaaaaggacagcctgctacagcgggagcgcttcatcgagcaggagaaggccaagctggagcagctcttccaggacgaggtggccaaggcacagcagctgcgtgaggagcagcagcggcagcagcagcagatggagcaggaacggcagcggctggtggccagcatggaggaggcgcggcggcggcagcatgaggccgaggagggcgtgcggcgcaagcaggaggagctgcagcagctggagcagcagcggcggcagcaggaggagctgctggctgaggagaaccagaggctgcgtgagcagctgcagctcctggaggagcagcaccgggccgcgctggcgcactcagaggaggtcactgcctcgcaggtggctgccacaaagaccctgcccaatggccgggatgcacttgatggccccgcggcagaggcagagccggagcacagcttcgatggcctgcggcggaaggtgtcagctcagaggctgcaggaggccggcatcctgagtgcggaggagctgcagcggttggcgcagggccacaccacggtggacgagctcgcacggcgggaagacgtgcgccactacctgcagggccgcagcagtatcgcagggctgttgctgaaggccaccaatgagaagctgagtgtttacgccgccctgcagaggcagctgctgagtcccggcacggccctcatcctgctggaggcgcaggcggcctcaggcttcctgctggaccctgtgcggaaccggcggctgaccgtcaacgaggctgtgaaggagggtgtggtgggccccgagctgcaccacaagctgctgtcggccgagcgcgccgtcactggctacaaggacccctacactggccagcagatctctctcttccaagccatgcagaagggcctcatcgtccgggagcacggcatccgcctgctggaggcccagatcgccacgggcggcgttatcgaccccgtgcacagccaccgcgtgcccgtggacgtggcctaccggcgcggctacttcgacgaggagatgaaccgcgtcctggcggaccccagcgacgacaccaagggcttctttgaccccaacacgcacgagaacctcacgtacctgcagctactggagcgctgcgtggaggaccccgagacgggcctgtgccttctgccactcacggataaggctgccaagggcggggagctggtctacactgactccgaggcccgggacgtctttgagaaggccaccgtgtctgcgccgttcggcaagttccagggcaagacggtgaccatttgggagatcatcaactcggaatacttcacggcagagcagcggcgggacctgctgcggcagttccgcacgggccggatcacagtggagaagatcatcaagatcatcatcacggtggtggaggagcaggagcagaagggccggctttgctttgagggcctgcgcagcctggtgccagccgccgagctgctggagagcagggtcatcgaccgcgagctctaccagcagctgcagcgaggtgagcgctctgtgcgagacgtagccgaggtggacactgtgcggcgggctctccggggtgccaacgtcatcgcgggtgtatggctggaggaggcggggcagaagctgagtatctacaatgccctgaagaaagacctgctgccatccgacatggccgtggccctgttggaagcccaggccggcaccgggcacatcatcgaccccgccaccagcgcccggctgaccgtggacgaggcagtgcgtgctggcctggtgggccccgagtttcatgagaagctgctatcagccgagaaggctgtgacagggtacagggacccctacacagggcagagcgtctccctgttccaggccctgaagaagggcctcattccccgggagcagggcctgcgcctgttggacgcccagctgtccacgggcggcatcgtggaccccagcaagagccaccgcgtgcccctggatgtcgcctgcgcccgaggctgcctggatgaggagaccagcagggccctgtcggcaccaagggccgacgccaaggcctacagtgaccccagcacaggggagccggccacctacggcgagctccagcagcggtgccggcccgaccagctgaccgggctgagcctgctgccgctctcagaaaaggctgctcgggcccggcaggaggagctctactcagagctgcaggcccgtgagacctttgaaaagaccccggttgaggtccccgtgggtggcttcaagggcaggacggtgacggtgtgggagctcatcagctctgagtacttcactgcggagcagcggcaggagctgttgcgtcagttccgcacgggcaaggtcaccgtggagaaggtcatcaagattctcattaccatcgtggaggaggtggagaccctgcggcaggagaggctgtccttcagcggcctccgtgcccctgtgccagccagcgagctcctggcttccggggtcctcagcagagcccagtttgagcagctcaaggacggcaagacgacggtcaaggacctttcggagctgggctccgtgcggacgctgctgcagggcagtggctgcctcgccggcatctacctggaggacaccaaggagaaggtgtccatctacgaggccatgcgccggggcctgctgagagccacaacggctgcgctcctgctggaggcgcaggcggccactggcttcctggtggaccccgtgcggaaccagcgcctgtatgtccacgaggccgtgaaggcgggcgtggtgggccccgagcttcacgagcagctgctgtctgccgagaaggccgtcaccggctacagagacccctactcgggcagcaccatctccctcttccaggccatgcagaagggcctggttctccggcagcacggcatccgcctgctggaggcccagatcgccacgggcggcatcatcgaccccgtgcacagccaccgcgtgcctgtggacgtggcctaccagcgcggctacttcagtgaggagatgaaccgcgtcctggcggaccccagcgacgacaccaagggcttctttgaccccaacacgcatgagaacctcacgtacaggcagctgctggagcggtgcgtggaggaccccgagacgggcttgcgccttctgccactgaaaggggcggagaaggctgaggtggtggagaccacgcaggtgtacactgaggaggagacaagaagggcatttgaagagacacagatcgacattcccggcggcggcagccacggcggctccaccatgtccctgtgggaggtgatgcagtcggacctgatccccgaggagcagcgggcccagctgatggctgacttccaggccggccgggtgaccaaggaacgcatgatcatcatcatcatcgagatcattgagaagacagagatcatccgccagcagggtctggcctcctacgactacgtgcgccgccgcctcacggctgaggacctgttcgaggctcggatcatctctctcgagacctacaacctgctccgggagggcaccaggagcctccgtgaggctctcgaggcggagtccgcctggtgctacctctatggcacgggctccgtggctggtgtctacctgcccggttccaggcagacactgagcatctaccaggctctcaagaaagggctgctgagtgccgaggtggcccgcctgctgctggaggcacaggcagccacaggcttcctgctggacccggtgaagggggagcggctgactgtggatgaggctgtgcggaagggcctcgtggggcccgagctgcacgaccgcctgctctcggctgagcgggcggtcaccggctaccgtgacccctacaccgagcagaccatctcgctcttccaggccatgaagaaggagctgatccctactgaggaggccctgcggctgctggatgcccagctggccaccggcggcatcgtggacccccgcctgggcttccaccttcccctggaggtggcttaccagcgtggctacctcaacaaggacacgcacgaccagctgtcagagcccagcgaggtgcgcagctacgtggacccgtccaccgacgagcgcctcagctacacgcagctgctcaggcggtgccgtcgtgacgacggcaccggccagctgctcctgccactgtcggacgcccgcaagctgaccttccgtggcctgcggaagcagatcaccatggaggagctggtgcgctcgcaggtcatggacgaggccacggcgctgcagctgcgggagggcctgacctccatcgaggaggtcaccaagaacttgcagaagttcctggaaggcaccagctgcatcgctggtgtcttcgtggacgccaccaaggaacggctctcggtgtaccaggccatgaagaagggcatcatccgccccggcacagcctttgagctcctggaggcgcaggcggccaccggttacgtcatcgaccccatcaagggactgaagctgacggtggaggaggctgtgcgtatgggcattgtgggccccgagttcaaggacaagctgctgtcggccgagcgcgccgtcactgggtacaaggacccctactctgggaagctcatctccctcttccaggccatgaagaagggcctgatcctgaaggaccatggcatccgcctgctggaggcccagatcgccacgggcggcatcatcgaccctgaggagagccaccggctgcccgtggaggtggcctacaagcgcggcctcttcgatgaggagatgaacgagatcctgaccgacccctcggacgacaccaagggcttctttgaccctaacacggaggagaacctcacctacctgcagctgatggagcgttgtatcactgacccccagacgggcctgtgtctcttgccgctgaaggagaagaagcgggagcggaagacgtcctccaagtcctccgtgcgcaagcgccgagtggtcatcgtggaccccgagacgggcaaggagatgtcagtgtacgaggcctaccgcaagggcctgattgaccaccagacgtacctggagctgtccgagcaggagtgcgagtgggaggagatcaccatctcctcctcggacggcgtggtcaagtccatgatcatcgaccgccgctccgggcgccagtacgacatcgatgatgccatcgccaagaacctcatcgaccgctcggcactggaccagtaccgcgccggcacgctctccatcaccgagttcgccgacatgctctcgggcaacgccggtggtttccgctcccgttcctcctcggtgggatcctcctcctcctaccccatcagccccgccgtctccaggacccagctggcctcctggtcagaccccactgaggagacgggccccgtggctggcatcctggacacggagacgctggagaaggtgtccatcaccgaggccatgcaccggaacctggtggataacatcacggggcagcggctgctggaggcgcaggcctgcaccgggggcatcatcgaccccagcaccggtgagcgcttccctgtcaccgacgccgtcaacaagggcctggtggacaagatcatggtggaccgcatcaacctggcccagaaggccttctgcggcttcgaggacccacgcaccaagaccaagatgtcggccgcccaggccctgaagaagggctggctctactacgaggccggccagcgcttcctggaggtgcagtacctgaccggcggcttgatcgagcccgacacgccgggccgcgtgcccctggacgaggccctgcagcgcggcacggtggacgcccgcaccgcacagaagctgcgtgacgtgggcgcctactccaagtacctcacctgccctaagaccaagctcaagatctcctataaggacgcgctggaccgcagcatggtggaggagggcacggggctgcggctgctggaggctgccgcgcagtccaccaagggctactacagcccctacagcgtcagcggctccggctctaccgctggctcccgcaccggctcgcgcaccggctcccgggccggctcccgccgcggcagctttgacgccaccggctccggcttctccatgaccttctcttcatcctcctactcctcctcgggctacggccgccgctacgcctcggggtcctcggcctccctggggggccctgagtctgccgtggcctgaggctgcctgcgcccaccccgctctgcatgcggcccagcccggctcccaccgaggcgcgggggccgttttcaacgcttaaaggtgtcttcctcccaagtggtgcctaaagtttaaccaaaaagaccagactaatatattaatatatatctgctgtccagacagcctgtatcttgggggacagggctggcccagccctgctggccgcctcaccccctcgggtctcctcactcccttctacctgccactcacacagccaggtgccttggagggtcccaagctgggccccagcccaccctcctgtcttcccagggtagcccgcctgccagtcctagctgcacagggcagctgggcccaaccctgtctgtagagggccctggtgtttctagcactggcctgcacggtgggccttgctggggacggggggccccagtcagcctctctcccagtctacccagagaagccccttccccatgggaagacgaggccctcgggcccagcccccacagtgctgtctgatctgtgctttccagctcaccccccacactcactcctgagacccctggcctccggcgtcagcctccagcctctgttcccctagtaagtgccttccatgtcggcctctaaccccaggccccgaggacccagacccagtggggaggcggacgttccagccggcatggctgggaactgcagacctgtcctcctggtgggtccaggggcccctccagcttgtggagccccacactggggtgccgcctgcccgtctctctcccatggagccccagccccctttgggcccagggacaccagccaggctctgtgctgaccctcctgttgcacccagccctggtctcagcagcgaccacccctgcctccaccctctgagctttgcatgttccactaaccccgggcgggtggcaggtggaggtgtcaggctgctggcgcctctgcaagggcagaacactaacctgaccgtgggcggggccttgcggtatccgcccccaataaaagcaattccaaccttgagcccgcgccctcacgctcagcaccccagcctgcctgcccgcccgcctgccctgccgctgcccgctgtcacaccctgtagcgcgggagcttctcgcagcgccccgggccttctcgtggtaccctgcctgctgcctttgcccccgcactgactgcccggctccagcagccatggtggccggcatgctcatgccacgggaccagctgcgggccatctatgaggtgctcttccgcgagggcgtgatggtggccaagaaggaccggcggccccgcagcttgcacccccatgtgcccggcgtcaccaacctgcaggtcatgcgtgccatggcgtccctgcgggcacggggcctggtccgcgagacctttgcctggtgccacttttactggtacctcaccaatgaaggcatcgcccacctccgccagtacctgcacctgccgccagagatcgtgcccgcctctctgcagcgcgtgcgccgccccgtcgccatggtgatgcccgcacgccgcaccccccacgtgcaggctgtgcagggtcccctgggctccccacccaagcgggggccgctgccgacggaggagcagcgggtctaccgtcggaaggagcttgaggaggtgtcacctgagacccctgtggtgcctgctaccacccagcggaccctggccaggccaggcccggagcctgccccagccacagatgagcgggatcgtgtgcagaagaaaaccttcaccaagtgggtcaacaagcacctcatcaaggcccagaggcacatcagtgacctgtatgaagacctccgcgatggccacaacctcatctccctgctggaggtcctctcgggggacagcctgccccgggagaaggggaggatgcgtttccacaagctgcagaatgtccagattgccctggactacctccggcaccgccaggtgaagctggtgaacatcaggaatgatgacatcgctgacggcaaccccaagctgacccttggcctcatctggacaatcattctgcacttccagatctcagatatccaggtgagtgggcagtcggaggacatgacggccaaggagaagctgctgctgtggtcgcagcgaatggtggaggggtaccagggcctgcgatgcgacaacttcacctccagctggagagacggccgcctcttcaatgccatcatccaccggcacaagcccctgctcatcgacatgaacaaggtgtaccggcagaccaacctggagaacctggaccaggccttctctgtggcggagcgggacctgggagtgacgcggctcctggaccctgaggacgtggatgtccctcagcccgacgagaagtccatcatcacctacgtctcgtcgctgtatgacgccatgccccgcgtgccggacgtgcaggatggggtgagggccaacgagctgcagctgcgctggcaggagtaccgggagctggtgctgctgctgcttcagtggatgcgacaccacacggccgcctttgaggaacgcaggttcccctccagcttcgaggagattgagatcctgtggtctcagttcctgaagtttaaggagatggagctaccagccaaggaggccgacaagaacaggtccaagggcatctaccaatccctggagggagcggtgcaagcaggccagctcaaggtgccccctggctaccacccgctggatgtggagaaggagtggggcaagctgcacgtggccatcctggagcgggagaagcagctccgcagcgagtttgagaggctggagtgtcttcagcgcatcgtgaccaagctgcagatggaggcggggctgtgtgaggagcagctgaaccaggccgacgccctgctgcagtcggatgtccggctgctggctgcaggcaaagtgccacagcgggcgggggaggtggaacgggacttggacaaggcggatagcatgatccggctgctcttcaacgacgtgcagaccctcaaggatggacggcacccgcagggcgagcagatgtaccgcagggtgtaccgtctgcacgagcgcctggtagccatccgcaccgagtacaacctacggctgaaggcaggcgtggcggcccctgcaacccaggtggcccaggtgactctgcagagtgtgcagaggcgccccgagctggaggactccactctgcgctacctgcaggacctgctggcctgggtggaggagaaccagcaccgtgtggatggcgctgagtggggtgtggacctgcccagcgtggaggcgcagctgggcagccaccgaggcctgcaccagtccatcgaagaattccgggccaagatcgagcgggcacggagtgacgagggccagctctcccccgccacccggggtgcctaccgtgactgcctgggtcggctggacctgcagtacgccaagctgctgaactcctccaaggcccgcctcaggtccctggagagcttgcacagctttgtggcagccgccactaaggagctaatgtggctgaatgagaaggaggaggaggaggtgggcttcgactggagcgaccgcaacaccaacatgaccgccaagaaggagagctactcggcgctgatgcgggagctggagctgaaggagaagaagatcaaggagctccaaaatgctggggaccggctgctgcgggaggaccacccggcccggcccacggtggagtccttccaggcggccctgcagacgcagtggagctggatgctacagctgtgctgctgtatcgaggcacacctgaaggagaacgctgcctactttcagttcttctcagatgtgcgggaggccgaggggcagttgcagaagctgcaggaggcactgcgtaggaaatacagttgtgatcgctccgccaccgtcacccggctggaggacctgctgcaggatgcccaggacgagaaggaacagctgaacgagtacaagggccacctctcaggcctggccaagcgggccaaggccgtcgtgcagctgaagccccgccacccagcccaccccatgcggggccgcctgcccctgctggccgtgtgcgactataagcaggtggaggtgactgtgcacaagggtgacgagtgccagctggtgggccctgcacagccgtcccactggaaggtgctcagcagctccggcagcgaggccgccgtgccctccgtgtgcttcctggtgcccccgcccaaccaggaggcccaggaggccgtcaccaggctggaggcccagcaccaggccctggtcacgctgtggcaccagttgcacgtggacatgaagagccttctggcctggcagagccttcgccgcgacgtgcagctcatccgctcctggtccctggccacgttccgcaccctgaagccagaggagcagcgccaagccctgcacagcctggagctgcactaccaggccttcctgcgggacagccaggacgcgggcggcttcggacccgaggaccggctgatggctgagcgcgagtacggctcctgcagccaccactaccagcagctgctgcagagcctggaacagggtgcacaggaagagtctcgctgccagcgctgcatctccgagctcaaagacatccggctgcagctggaggcctgtgagacgcgcaccgtgcaccgcctgcggctgccgctggacaaagagccggcacgggagtgtgcccagcgcatcgccgagcagcagaaggcacaggcagaggtggaggggctgggcaagggggtcgcccggctctctgccgaggccgagaaggtcttggccctaccagagccatcgcctgcggcccccacgctgcgctcggagctggagctgacgctgggcaagctggagcaggtccgcagcctgtctgccatctacctggagaagctcaagaccatcagcctggtgatccgcggcacgcagggggccgaggaggtgctcagggcccacgaggagcagctcaaggaggcccaggccgtgccggccaccctcccggagctcgaggccaccaaggcctctctgaagaagctgcgggcccaggccgaggcacagcagcccacgttcgacgccctgcgggatgagctgcggggggcacaggaggtgggggagcgactgcagcagcggcacggggagcgggacgtggaggtggagcgctggcgggagcgggtcgcccagttgcttgagcgctggcaggctgtgctggcccagaccgacgtgcggcagcgcgagctcgagcaactgggccgccagctgcgttactaccgcgagagtgcagaccccttgggcgcctggctgcaggacgccaggcggcggcaggagcagatccaggccatgccgctggccgacagccaggctgtgcgggagcagctgcggcaggagcaggccctgctggaggagatcgagcgccacggcgagaaggtcgaggagtgccagaggtttgcgaaacagtacatcaacgccatcaaggactatgaactccagctggtgacgtacaaggcgcagcttgagccggtggcctccccggccaagaagcccaaggtccagtcgggatcagagagtgtcatccaggagtacgtggacctgcgtacgcactacagcgagctgaccacactgacgagccagtacatcaagttcatcagcgagactctgcggcgcatggaggaggaggagaggctggctgagcagcagcgggcagaggagcgcgagcggctggccgaggtggaggccgcgctggagaagcagcggcagctggccgaggcgcacgcccaggcaaaggcacaggcggagcgggaggcgaaggagctgcagcagcgcatgcaggaggaggtggtgcggcgggaggaggcggcggtggacgcgcagcagcagaagcgcagcattcaggaggagctgcagcagctgcggcagagctcggaggcggagatccaggccaaggcccggcaggcagaggcggctgagcgcagccggctgcgcatcgaggaggagatccgcgtggtgcgcctgcagttggaggccaccgagcgccagcgtggcggggctgagggggagctgcaggcactgcgtgcacgggcggaggaggctgaggcacaaaagcgacaggcgcaggaggaggccgagcgcttgcggaggcaggtgcaggacgagagccagcgtaagcggcaggcggaggtggagctggcctcgcgcgtgaaggccgaggccgaggcggcgcgcgagaagcagcgggccctgcaggccctggaggagctgcggctgcaggcggaggaggcggagcggcgcctgcggcaggccgaggtggagcgagcgcggcaggtacaggtggccctggagacggcgcagcgcagtgcagaggcggagctgcagagcaaacgcgcctccttcgccgagaagacggcacagctggagcgctccctgcaggaggaacacgtggctgtggcacagctgcgggaggaggctgagcggcgggcacagcagcaggccgaggccgagcgggcgcgcgaggaggcagagcgggagctggagcgctggcagctcaaggccaacgaggcgctacggctgcggctgcaggcggaggaggtggcgcagcagaagagcctggcgcaggccgaggctgagaagcagaaggaggaggcggagcgcgaggcgcggcggcgcggcaaggcggaggagcaggccgtccggcagcgggagctggctgaacaagagctggagaagcagcggcagctggcggaaggcaccgcgcagcagcgcctggccgcggagcaggagttgatccggctgcgggccgagacggagcagggggagcagcagcggcagctgctggaggaggagctggcccggctgcagcgtgaggcggctgcagccacgcagaaacggcaggagctggaagccgagctggccaaggtgcgggccgagatggaggtgctgctggccagcaaggcgagggctgaggaggagtcgcgctccaccagcgagaagtccaagcagaggctggaggccgaggccggccggttccgcgagct

SEQ ID NO: 680 - DNA, 32765 bp, Homo sapiens
  misc_feature (977)..(977): second gene starts at position 977
atgagcttcaccactcgctccaccttctccaccaactaccggtccctgggctctgtccaggcgcccagctacggcgcccggccggtcagcagcgcggccagcgtctatgcaggcgctgggggctctggttcccggatctccgtgtcccgctccaccagcttcaggggcggcatggggtccgggggcctggccaccgggatagccgggggtctggcaggaatgggaggcatccagaacgagaaggagaccatgcaaagcctgaacgaccgcctggcctcttacctggacagagtgaggagcctggagaccgagaaccggaggctggagagcaaaatccgggagcacttggagaagaagggaccccaggtcagagactggagccattacttcaagatcatcgaggacctgagggctcagatcttcgcaaatactgtggacaatgcccgcatcgttctgcagattgacaatgcccgtcttgctgctgatgactttagagtcaagtatgagacagagctggccatgcgccagtctgtggagaacgacatccatgggctccgcaaggtcattgatgacaccaatatcacacgactgcagctggagacagagatcgaggctctcaaggaggagctgctcttcatgaagaagaaccacgaagaggaagtaaaaggcctacaagcccagattgccagctctgggttgaccgtggaggtagatgcccccaaatctcaggacctcgccaagatcatggcagacatccgggcccaatatgacgagctggctcggaagaaccgagaggagctagacaagtactggtctcagcagattgaggagagcaccacagtggtcaccacacagtctgctgaggttggagctgctgagacgacgctcacagagctgagacgtacagtccagtccttggagatcgacctggactccatgagaaatctgaaggccagcttggagaacagcctgagggtggagaagcagcggcagctggccgaggcgcacgcccaggcaaaggcacaggcggagcgggaggcgaaggagctgcagcagcgcatgcaggaggaggtggtgcggcgggaggaggcggcggtggacgcgcagcagcagaagcgcagcattcaggaggagctgcagcagctgcggcagagctcggaggcggagatccaggccaaggcccggcaggcagaggcggctgagcgcagccggctgcgcatcgaggaggagatccgcgtggtgcgcctgcagttggaggccaccgagcgccagcgtggcggggctgagggggagctgcaggcactgcgtgcacgggcggaggaggctgaggcacaaaagcgacaggcgcaggaggaggccgagcgcttgcggaggcaggtgcaggacgagagccagcgtaagcggcaggcggaggtggagctggcctcgcgcgtgaaggccgaggccgaggcggcgcgcgagaagcagcgggccctgcaggccctggaggagctgcggctgcaggcggaggaggcggagcggcgcctgcggcaggccgaggtggagcgagcgcggcaggtacaggtggccctggagacggcgcagcgcagtgcagaggcggagctgcagagcaaacgcgcctccttcgccgagaagacggcacagctggagcgctccctgcaggaggaacacgtggctgtggcacagctgcgggaggaggctgagcggcgggcacagcagcaggccgaggccgagcgggcgcgcgaggaggcagagcgggagctggagcgctggcagctcaaggccaacgaggcgctacggctgcggctgcaggcggaggaggtggcgcagcagaagagcctggcgcaggccgaggctgagaagcagaaggaggaggcggagcgcgaggcgcggcggcgcggcaaggcggaggagcaggccgtccggcagcgggagctggctgaacaagagctggagaagcagcggcagctggcggaaggcaccgcgcagcagcgcctggccgcggagcaggagttgatccggctgcgggccgagacggagcagggggagcagcagcggcagctgctggaggaggagctggcccggctgcagcgtgaggcggctgcagccacgcagaaacggcaggagctggaagccgagctggccaaggtgcgggccgagatggaggtgctgctggccagcaaggcgagggctgaggaggagtcgcgctccaccagcgagaagtccaagcagaggctggaggccgaggccggccggttccgcgagctggccgaggaggccgcccgcctgcgtgccctggcggaagaggccaagcggcagcggcagctggccgaggaagacgcggcgcggcagcgggccgaggcggagcgggtgcttgcggagaagctggccgccatcggcgaggccacgcggctcaagacggaggcggagatcgcgctcaaggagaaggaggcggagaacgagcgcctgcggcggctggcggaggacgaggccttccagcggcggcggctggaggagcaggccgcgcaacacaaggctgacatcgaggagcgcctggcccagctgcgcaaggcatcggacagcgagctggagcggcagaaggggctggtggaggacacgctgaggcagcggcggcaggtggaggaggagatcctggcgctgaaggcgagcttcgagaaggcggccgctggcaaggcggagctggagctggagctgggacgcatccgcagcaacgcggaggacacgctgcgcagcaaggagcaggccgagctggaggctgcgaggcagcggcagctggcggcggaggaggagcggcggcgccgtgaggctgaggagcgcgtgcagaagagcctggcggccgaggaggaggccgcacggcagcggaaggcggcgctggaggaagtcgagcggctgaaagccaaggtggaggaggcgcggcgcctgcgggagcgagcggagcaggagtcggcgcggcagctgcagctggcccaggaggccgcccagaagcggctgcaggcggaagagaaggcacacgccttcgcggtgcagcagaaggagcaggagctacagcagacgctgcagcaggagcagagcgtgctggaccagctgcgcggcgaggcggaggcggcccggcgggcggctgaggaggcggaggaggcccgggtgcaggcggagcgtgaggcggcgcagtcccggcggcaggtggaagaggccgagcggctgaagcagtcggcagaggagcaggcacaggcccgggctcaggcacaggcggctgcagagaagctgcgcaaggaggccgagcaagaggcggcgcggcgggcacaggcggagcaggcggccctgcggcagaagcaggcagctgacgcggagatggagaagcataagaaattcgccgagcagacgctgcggcagaaggcgcaggtggagcaggagctgacaacactgcggctgcagctggaggagaccgaccaccagaagaacctgctggacgaggagctgcagcggctgaaggcggaggccacggaggccgcacgccagcgcagccaggtggaggaggagctcttctcggtgcgcgtgcagatggaggagctgagcaagctcaaggcacgcatcgaggctgagaaccgcgcactcatcttgcgtgacaaggacaatacgcagcgcttcctgcaggaggaggctgagaagatgaagcaggtggcggaggaggccgcgcggctgagtgtggcggcccaagaggctgcgcgactgcggcagctggcagaggaggacctggcacagcagcgggccttggcagagaagatgctcaaggagaagatgcaggcggtgcaggaggccacgcgactcaaggctgaggcggaactgctgcagcagcagaaggagcttgcgcaggagcaggcgcggcggctgcaggaggacaaggagcagatggcgcagcagctggcggaggagacgcagggcttccagcggacgctggaggccgagcggcagcggcagctggagatgagcgctgaggctgagcgcctcaagctgcgtgtggccgagatgagccgagcccaggcccgcgctgaggaggacgcccagcgcttccggaagcaggcggaggagatcggtgagaagctgcaccgcacggagctcgccacccaggagaaggtgaccctggtgcagacactggagatccagcgacagcagagtgaccatgatgccgagcgcctgcgggaggccatcgctgagctggagcgtgagaaggagaagctccaacaggaggccaaactgctgcagctcaagtctgaggagatgcagacggtgcagcaggagcagctgctgcaggagacgcaggccctgcagcaaagcttcctctctgaaaaggacagcctgctacagcgggagcgcttcatcgagcaggagaaggccaagctggagcagctcttccaggacgaggtggccaaggcacagcagctgcgtgaggagcagcagcggcagcagcagcagatggagcaggaacggcagcggctggtggccagcatggaggaggcgcggcggcggcagcatgaggccgaggagggcgtgcggcgcaagcaggaggagctgcagcagctggagcagcagcggcggcagcaggaggagctgctggctgaggagaaccagaggctgcgtgagcagctgcagctcctggaggagcagcaccgggccgcgctggcgcactcagaggaggtcactgcctcgcaggtggctgccacaaagaccctgcccaatggccgggatgcacttgatggccccgcggcagaggcagagccggagcacagcttcgatggcctgcggcggaaggtgtcagctcagaggctgcaggaggccggcatcctgagtgcggaggagctgcagcggttggcgcagggccacaccacggtggacgagctcgcacggcgggaagacgtgcgccactacctgcagggccgcagcagtatcgcagggctgttgctgaaggccaccaatgagaagctgagtgtttacgccgccctgcagaggcagctgctgagtcccggcacggccctcatcctgctggaggcgcaggcggcctcaggcttcctgctggaccctgtgcggaaccggcggctgaccgtcaacgaggctgtgaaggagggtgtggtgggccccgagctgcaccacaagctgctgtcggccgagcgcgccgtcactggctacaaggacccctacactggccagcagatctctctcttccaagccatgcagaagggcctcatcgtccgggagcacggcatccgcctgctggaggcccagatcgccacgggcggcgttatcgaccccgtgcacagccaccgcgtgcccgtggacgtggcctaccggcgcggctacttcgacgaggagatgaaccgcgtcctggcggaccccagcgacgacaccaagggcttctttgaccccaacacgcacgagaacctcacgtacctgcagctactggagcgctgcgtggaggaccccgagacgggcctgtgccttctgccactcacggataaggctgccaagggcggggagctggtctacactgactccgaggcccgggacgtctttgagaaggccaccgtgtctgcgccgttcggcaagttccagggcaagacggtgaccatttgggagatcatcaactcggaatacttcacggcagagcagcggcgggacctgctgcggcagttccgcacgggccggatcacagtggagaagatcatcaagatcatcatcacggtggtggaggagcaggagcagaagggccggctttgctttgagggcctgcgcagcctggtgccagccgccgagctgctggagagcagggtcatcgaccgcgagctctaccagcagctgcagcgaggtgagcgctctgtgcgagacgtagccgaggtggacactgtgcggcgggctctccggggtgccaacgtcatcgcgggtgtatggctggaggaggcggggcagaagctgagtatctacaatgccctgaagaaagacctgctgccatccgacatggccgtggccctgttggaagcccaggccggcaccgggcacatcatcgaccccgccaccagcgcccggctgaccgtggacgaggcagtgcgtgctggcctggtgggccccgagtttcatgagaagctgctatcagccgagaaggctgtgacagggtacagggacccctacacagggcagagcgtctccctgttccaggccctgaagaagggcctcattccccgggagcagggcctgcgcctgttggacgcccagctgtccacgggcggcatcgtggaccccagcaagagccaccgcgtgcccctggatgtcgcctgcgcccgaggctgcctggatgaggagaccagcagggccctgtcggcaccaagggccgacgccaaggcctacagtgaccccagcacaggggagccggccacctacggcgagctccagcagcggtgccggcccgaccagctgaccgggctgagcctgctgccgctctcagaaaaggctgctcgggcccggcaggaggagctctactcagagctgcaggcccgtgagacctttgaaaagaccccggttgaggtccccgtgggtggcttcaagggcaggacggtgacggtgtgggagctcatcagctctgagtacttcactgcggagcagcggcaggagctgttgcgtcagttccgcacgggcaaggtcaccgtggagaaggtcatcaagattctcattaccatcgtggaggaggtggagaccctgcggcaggagaggctgtccttcagcggcctccgtgcccctgtgccagccagcgagctcctggcttccggggtcctcagcagagcccagtttgagcagctcaaggacggcaagacgacggtcaaggacctttcggagctgggctccgtgcggacgctgctgcagggcagtggctgcctcgccggcatctacctggaggacaccaaggagaaggtgtccatctacgaggccatgcgccggggcctgctgagagccacaacggctgcgctcctgctggaggcgcaggcggccactggcttcctggtggaccccgtgcggaaccagcgcctgtatgtccacgaggccgtgaaggcgggcgtggtgggccccgagcttcacgagcagctgctgtctgccgagaaggccgtcaccggctacagagacccctactcgggcagcaccatctccctcttccaggccatgcagaagggcctggttctccggcagcacggcatccgcctgctggaggcccagatcgccacgggcggcatcatcgaccccgtgcacagccaccgcgtgcctgtggacgtggcctaccagcgcggctacttcagtgaggagatgaaccgcgtcctggcggaccccagcgacgacaccaagggcttctttgaccccaacacgcatgagaacctcacgtacaggcagctgctggagcggtgcgtggaggaccccgagacgggcttgcgccttctgccactgaaaggggcggagaaggctgaggtggtggagaccacgcaggtgtacactgaggaggagacaagaagggcatttgaagagacacagatcgacattcccggcggcggcagccacggcggctccaccatgtccctgtgggaggtgatgcagtcggacctgatccccgaggagcagcgggcccagctgatggctgacttccaggccggccgggtgaccaaggaacgcatgatcatcatcatcatcgagatcattgagaagacagagatcatccgccagcagggtctggcctcctacgactacgtgcgccgccgcctcacggctgaggacctgttcgaggctcggatcatctctctcgagacctacaacctgctccgggagggcaccaggagcctccgtgaggctctcgaggcggagtccgcctggtgctacctctatggcacgggctccgtggctggtgtctacctgcccggttccaggcagacactgagcatctaccaggctctcaagaaagggctgctgagtgccgaggtggcccgcctgctgctggaggcacaggcagccacaggcttcctgctggacccggtgaagggggagcggctgactgtggatgaggctgtgcggaagggcctcgtggggcccgagctgcacgaccgcctgctctcggctgagcgggcggtcaccggctaccgtgacccctacaccgagcagaccatctcgctcttccaggccatgaagaaggagctgatccctactgaggaggccctgcggctgctggatgcccagctggccaccggcggcatcgtggacccccgcctgggcttccaccttcccctggaggtggcttaccagcgtggctacctcaacaaggacacgcacgaccagctgtcagagcccagcgaggtgcgcagctacgtggacccgtccaccgacgagcgcctcagctacacgcagctgctcaggcggtgccgtcgtgacgacggcaccggccagctgctcctgccactgtcggacgcccgcaagctgaccttccgtggcctgcggaagcagatcaccatggaggagctggtgcgctcgcaggtcatggacgaggccacggcgctgcagctgcgggagggcctgacctccatcgaggaggtcaccaagaacttgcagaagttcctggaaggcaccagctgcatcgctggtgtcttcgtggacgccaccaaggaacggctctcggtgtaccaggccatgaagaagggcatcatccgccccggcacagcctttgagctcctggaggcgcaggcggccaccggttacgtcatcgaccccatcaagggactgaagctgacggtggaggaggctgtgcgtatgggcattgtgggccccgagttcaaggacaagctgctgtcggccgagcgcgccgtcactgggtacaaggacccctactctgggaagctcatctccctcttccaggccatgaagaagggcctgatcctgaaggaccatggcatccgcctgctggaggcccagatcgccacgggcggcatcatcgaccctgaggagagccaccggctgcccgtggaggtggcctacaagcgcggcctcttcgatgaggagatgaacgagatcctgaccgacccctcggacgacaccaagggcttctttgaccctaacacggaggagaacctcacctacctgcagctgatggagcgttgtatcactgacccccagacgggcctgtgtctcttgccgctgaaggagaagaagcgggagcggaagacgtcctccaagtcctccgtgcgcaagcgccgagtggtcatcgtggaccccgagacgggcaaggagatgtcagtgtacgaggcctaccgcaagggcctgattgaccaccagacgtacctggagctgtccgagcaggagtgcgagtgggaggagatcaccatctcctcctcggacggcgtggtcaagtccatgatcatcgaccgccgctccgggcgccagtacgacatcgatgatgccatcgccaagaacctcatcgaccgctcggcactggaccagtaccgcgccggcacgctctccatcaccgagttcgccgacatgctctcgggcaacgccggtggtttccgctcccgttcctcctcggtgggatcctcctcctcctaccccatcagccccgccgtctccaggacccagctggcctcctggtcagaccccactgaggagacgggccccgtggctggcatcctggacacggagacgctggagaaggtgtccatcaccgaggccatgcaccggaacctggtggataacatcacggggcagcggctgctggaggcgcaggcctgcaccgggggcatcatcgaccccagcaccggtgagcgcttccctgtcaccgacgccgtcaacaagggcctggtggacaagatcatggtggaccgcatcaacctggcccagaaggccttctgcggcttcgaggacccacgcaccaagaccaagatgtcggccgcccaggccctgaagaagggctggctctactacgaggccggccagcgcttcctggaggtgcagtacctgaccggcggcttgatcgagcccgacacgccgggccgcgtgcccctggacgaggccctgcagcgcggcacggtggacgcccgcaccgcacagaagctgcgtgacgtgggcgcctactccaagtacctcacctgccctaagaccaagctcaagatctcctataaggacgcgctggaccgcagcatggtggaggagggcacggggctgcggctgctggaggctgccgcgcagtccaccaagggctactacagcccctacagcgtcagcggctccggctctaccgctggctcccgcaccggctcgcgcaccggctcccgggccggctcccgccgcggcagctttgacgccaccggctccggcttctccatgaccttctcttcatcctcctactcctcctcgggctacggccgccgctacgcctcggggtcctcggcctccctggggggccctgagtctgccgtggcctgaggctgcctgcgcccaccccgctctgcatgcggcccagcccggctcccaccgaggcgcgggggccgttttcaacgcttaaaggtgtcttcctcccaagtggtgcctaaagtttaaccaaaaagaccagactaatatattaatatatatctgctgtccagacagcctgtatcttgggggacagggctggcccagccctgctggccgcctcaccccctcgggtctcctcactcccttctacctgccactcacacagccaggtgccttggagggtcccaagctgggccccagcccaccctcctgtcttcccagggtagcccgcctgccagtcctagctgcacagggcagctgggcccaaccctgtctgtagagggccctggtgtttctagcactggcctgcacggtgggccttgctggggacggggggccccagtcagcctctctcccagtctacccagagaagccccttccccatgggaagacgaggccctcgggcccagcccccacagtgctgtctgatctgtgctttccagctcaccccccacactcactcctgagacccctggcctccggcgtcagcctccagcctctgttcccctagtaagtgccttccatgtcggcctctaaccccaggccccgaggacccagacccagtggggaggcggacgttccagccggcatggctgggaactgcagacctgtcctcctggtgggtccaggggcccctccagcttgtggagccccacactggggtgccgcctgcccgtctctctcccatggagccccagccccctttgggcccagggacaccagccaggctctgtgctgaccctcctgttgcacccagccctggtctcagcagcgaccacccctgcctccaccctctgagctttgcatgttccactaaccccgggcgggtggcaggtggaggtgtcaggctgctggcgcctctgcaagggcagaacactaacctgaccgtgggcggggccttgcggtatccgcccccaataaaagcaattccaaccttagagtggccgccgggtgctggaggctccgctgcaccccgcgccccgcgcccgccggcatggccggcccgctgcccgacgagcaggacttcatccaggcctacgaggaggtgcgcgagaagtacaaagatgagcgggatcgtgtgcagaagaaaaccttcaccaagtgggtcaacaagcacctcatcaaggcccagaggcacatcagtgacctgtatgaagacctccgcgatggccacaacctcatctccctgctggaggtcctctcgggggacagcctgccccgggagaaggggaggatgcgtttccacaagctgcagaatgtccagattgccctggactacctccggcaccgccaggtgaagctggtgaacatcaggaatgatgacatcgctgacggcaaccccaagctgacccttggcctcatctggacaatcattctgcacttccagatctcagatatccaggtgagtgggcagtcggaggacatgacggccaaggagaagctgctgctgtggtcgcagcgaatggtggaggggtaccagggcctgcgatgcgacaacttcacctccagctggagagacggccgcctcttcaatgccatcatccaccggcacaagcccctgctcatcgacatgaacaaggtgtaccggcagaccaacctggagaacctggaccaggccttctctgtggcggagcgggacctgggagtgacgcggctcctggaccctgaggacgtggatgtccctcagcccgacgagaagtccatcatcacctacgtctcgtcgctgtatgacgccatgccccgcgtgccggacgtgcaggatggggtgagggccaacgagctgcagctgcgctggcaggagtaccgggagctggtgctgctgctgcttcagtggatgcgacaccacacggccgcctttgaggaacgcaggttcccctccagcttcgaggagattgagatcctgtggtctcagttcctgaagtttaaggagatggagctaccagccaaggaggccgacaagaacaggtccaagggcatctaccaatccctggagggagcggtgcaagcaggccagctcaaggtgccccctggctaccacccgctggatgtggagaaggagtggggcaagctgcacgtggccatcctggagcgggagaagcagctccgcagcgagtttgagaggctggagtgtcttcagcgcatcgtgaccaagctgcagatggaggcggggctgtgtgaggagcagctgaaccaggccgacgccctgctgcagtcggatgtccggctgctggctgcaggcaaagtgccacagcgggcgggggaggtggaacgggacttggacaaggcggatagcatgatccggctgctcttcaacgacgtgcagaccctcaaggatggacggcacccgcagggcgagcagatgtaccgcagggtgtaccgtctgcacgagcgcctggtagccatccgcaccgagtacaacctacggctgaaggcaggcgtggcggcccctgcaacccaggtggcccaggtgactctgcagagtgtgcagaggcgccccgagctggaggactccactctgcgctacctgcaggacctgctggcctgggtggaggagaaccagcaccgtgtggatggcgctgagtggggtgtggacctgcccagcgtggaggcgcagctgggcagccaccgaggcctgcaccagtccatcgaagaattccgggccaagatcgagcgggcacggagtgacgagggccagctctcccccgccacccggggtgcctaccgtgactgcctgggtcggctggacctgcagtacgccaagctgctgaactcctccaaggcccgcctcaggtccctggagagcttgcacagctttgtggcagccgccactaaggagctaatgtggctgaatgagaaggaggaggaggaggtgggcttcgactggagcgaccgcaacaccaacatgaccgccaagaaggagagctactcggcgctgatgcgggagctggagctgaaggagaagaagatcaaggagctccaaaatgctggggaccggctgctgcgggaggaccacccggcccggcccacggtggagtccttccaggcggccctgcagacgcagtggagctggatgctacagctgtgctgctgtatcgaggcacacctgaaggagaacgctgcctactttcagttcttctcagatgtgcgggaggccgaggggcagttgcagaagctgcaggaggcactgcgtaggaaatacagttgtgatcgctccgccaccgtcacccggctggaggacctgctgcaggatgcccaggacgagaaggaacagctgaacgagtacaagggccacctctcaggcctggccaagcgggccaaggccgtcgtgcagctgaagccccgccacccagcccaccccatgcggggccgcctgcccctgctggccgtgtgcgactataagcaggtggaggtgactgtgcacaagggtgacgagtgccagctggtgggccctgcacagccgtcccactggaaggtgctcagcagctccggcagcgaggccgccgtgccctccgtgtgcttcctggtgcccccgcccaaccaggaggcccaggaggccgtcaccaggctggaggcccagcaccaggccctggtcacgctgtggcaccagttgcacgtggacatgaagagccttctggcctggcagagccttcgccgcgacgtgcagctcatccgctcctggtccctggccacgttccgcaccctgaagccagaggagcagcgccaagccctgcacagcctggagctgcactaccaggccttcctgcgggacagccaggacgcgggcggcttcggacccgaggaccggctgatggctgagcgcgagtacggctcctgcagccaccactaccagcagctgctgcagagcctggaacagggtgcacaggaagagtctcgctgccagcgctgcatctccgagctcaaagacatccggctgcagctggaggcctgtgagacgcgcaccgtgcaccgcctgcggctgccgctggacaaagagccggcacgggagtgtgcccagcgcatcgccgagcagcagaaggcacaggcagaggtggaggggctgggcaagggggtcgcccggctctctgccgaggccgagaaggtcttggccctaccagagccatcgcctgcggcccccacgctgcgctcggagctggagctgacgctgggcaagctggagcaggtccgcagcctgtctgccatctacctggagaagctcaagaccatcagcctggtgatccgcggcacgcagggggccgaggaggtgctcagggcccacgaggagcagctcaaggaggcccaggccgtgccggccaccctcccggagctcgaggccaccaaggcctctctgaagaagctgcgggcccaggccgaggcacagcagcccacgttcgacgccctgcgggatgagctgcggggggcacaggaggtgggggagcgactgcagcagcggcacggggagcgggacgtggaggtggagcgctggcgggagcgggtcgcccagttgcttgagcgctggcaggctgtgctggcccagaccgacgtgcggcagcgcgagctcgagcaactgggccgccagctgcgttactaccgcgagagtgcagaccccttgggcgcctggctgcaggacgccaggcggcggcaggagcagatccaggccatgccgctggccgacagccaggctgtgcgggagcagctgcggcaggagcaggccctgctggaggagatcgagcgccacggcgagaaggtcgaggagtgccagaggtttgcgaaacagtacatcaacgccatcaaggactatgaactccagctggtgacgtacaaggcgcagcttgagccggtggcctccccggccaagaagcccaaggtccagtcgggatcagagagtgtcatccaggagtacgtggacctgcgtacgcactacagcgagctgaccacactgacgagccagtacatcaagttcatcagcgagactctgcggcgcatggaggaggaggagaggctggctgagcagcagcgggcagaggagcgcgagcggctggccgaggtggaggccgcgctggagaagcagcggcagctggccgaggcgcacgcccaggcaaaggcacaggcggagcgggaggcgaaggagctgcagcagcgcatgcaggaggaggtggtgcggcgggaggaggcggcggtggacgcgcagcagcagaagcgcagcattcaggaggagctgcagcagctgcggcagagctcggaggcggagatccaggccaaggcccggcaggcagaggcggctgagcgcagccggctgcgcatcgaggaggagatccgcgtggtgcgcctgcagttggaggccaccgagcgccagcgtggcggggctgagggggagctgcaggcactgcgtgcacgggcggaggaggctgaggcacaaaagcgacaggcgcaggaggaggccgagcgcttgcggaggcaggtgcaggacgagagccagcgtaagcggcaggcggaggtggagctggcctcgcgcgtgaaggccgaggccgaggcggcgcgcgagaagcagcgggccctgcaggccctggaggagctgcggctgcaggcggaggaggcggagcggcgcctgcggcaggccgaggtggagcgagcgcggcaggtacaggtggccctggagacggcgcagcgcagtgcagaggcggagctgcagagcaaacgcgcctccttcgccgagaagacggcacagctggagcgctccctgcaggaggaacacgtggctgtggcacagctgcgggaggaggctgagcggcgggcacagcagcaggccgaggccgagcgggcgcgcgaggaggcagagcgggagctggagcgctggcagctcaaggccaacgaggcgctacggctgcggctgcaggcggaggaggtggcgcagcagaagagcctggcgcaggccgaggctgagaagcagaaggaggaggcggagcgcgaggcgcggcggcgcggcaaggcggaggagcaggccgtccggcagcgggagctggctgaacaagagctggagaagcagcggcagctggcggaaggcaccgcgcagcagcgcctggccgcggagcaggagttgatccggctgcgggccgagacggagcagggggagcagcagcggcagctgctggaggaggagctggcccggctgcagcgtgaggcggctgcagccacgcagaaacggcaggagctggaagccgagctggccaaggtgcgggccgagatggaggtgctgctggccagcaaggcgagggctgaggaggagtcgcgctccaccagcgagaagtccaagcagaggctggaggccgaggccggccggttccgcgagctggccgaggaggccgcccgcctgcgtgccctggcggaagaggccaagcggcagcggcagctggccgaggaagacgcggcgcggcagcgggccgaggcggagcgggtgcttgcggagaagctggccgccatcggcgaggccacgcggctcaagacggaggcggagatcgcgctcaaggagaaggaggcggagaacgagcgcctgcggcggctggcggaggacgaggccttccagcggcggcggctggaggagcaggccgcgcaacacaaggctgacatcgaggagcgcctggcccagctgcgcaaggcatcggacagcgagctggagcggcagaaggggctggtggaggacacgctgaggcagcggcggcaggtggaggaggagatcctggcgctgaaggcgagcttcgagaaggcggccgctggcaaggcggagctggagctggagctgggacgcatccgcagcaacgcggaggacacgctgcgcagcaaggagcaggccgagctggaggctgcgaggcagcggcagctggcggcggaggaggagcggcggcgccgtgaggctgaggagcgcgtgcagaagagcctggcggccgaggaggaggccgcacggcagcggaaggcggcgctggaggaagtcgagcggctgaaagccaaggtggaggaggcgcggcgcctgcgggagcgagcggagcaggagtcggcgcggcagctgcagctggcccaggaggccgcccagaagcggctgcaggcggaagagaaggcacacgccttcgcggtgcagcagaaggagcaggagctacagcagacgctgcagcaggagcagagcgtgctggaccagctgcgcggcgaggcggaggcggcccggcgggcggctgaggaggcggaggaggcccgggtgcaggcggagcgtgaggcggcgcagtcccggcggcaggtggaagaggccgagcggctgaagcagtcggcagaggagcaggcacaggcccgggctcaggcacaggcggctgcagagaagctgcgcaaggaggccgagcaagaggcggcgcggcgggcacaggcggagcaggcggccctgcggcagaagcaggcagctgacgcggagatggagaagcataagaaattcgccgagcagacgctgcggcagaaggcgcaggtggagcaggagctgacaacactgcggctgcagctggaggagaccgaccaccagaagaacctgctggacgaggagctgcagcggctgaaggcggaggccacggaggccgcacgccagcgcagccaggtggaggaggagctcttctcggtgcgcgtgcagatggaggagctgagcaagctcaaggcacgcatcgaggctgagaaccgcgcactcatcttgcgtgacaaggacaatacgcagcgcttcctgcaggaggaggctgagaagatgaagcaggtggcggaggaggccgcgcggctgagtgtggcggcccaagaggctgcgcgactgcggcagctggcagaggaggacctggcacagcagcgggccttggcagagaagatgctcaaggagaagatgcaggcggtgcaggaggccacgcgactcaaggctgaggcggaactgctgcagcagcagaaggagcttgcgcaggagcaggcgcggcggctgcaggaggacaaggagcagatggcgcagcagctggcggaggagacgcagggcttccagcggacgctggaggccgagcggcagcggcagctggagatgagcgctgaggctgagcgcctcaagctgcgtgtggccgagatgagccgagcccaggcccgcgctgaggaggacgcccagcgcttccggaagcaggcggaggagatcggtgagaagctgcaccgcacggagctcgccacccaggagaaggtgaccctggtgcagacactggagatccagcgacagcagagtgaccatgatgccgagcgcctgcgggaggccatcgctgagctggagcgtgagaaggagaagctccaacaggaggccaaactgctgcagctcaagtctgaggagatgcagacggtgcagcaggagcagctgctgcaggagacgcaggccctgcagcaaagcttcctctctgaaaaggacagcctgctacagcgggagcgcttcatcgagcaggagaaggccaagctggagcagctcttccaggacgaggtggccaaggcacagcagctgcgtgaggagcagcagcggcagcagcagcagatggagcaggaacggcagcggctggtggccagcatggaggaggcgcggcggcggcagcatgaggccgaggagggcgtgcggcgcaagcaggaggagctgcagcagctggagcagcagcggcggcagcaggaggagctgctggctgaggagaaccagaggctgcgtgagcagctgcagctcctggaggagcagcaccgggccgcgctggcgcactcagaggaggtcactgcctcgcaggtggctgccacaaagaccctgcccaatggccgggatgcacttgatggccccgcggcagaggcagagccggagcacagcttcgatggcctgcggcggaaggtgtcagctcagaggctgcaggaggccggcatcctgagtgcggaggagctgcagcggttggcgcagggccacaccacggtggacgagctcgcacggcgggaagacgtgcgccactacctgcagggccgcagcagtatcgcagggctgttgctgaaggccaccaatgagaagctgagtgtttacgccgccctgcagaggcagctgctgagtcccggcacggccctcatcctgctggaggcgcaggcggcctcaggcttcctgctggaccctgtgcggaaccggcggctgaccgtcaacgaggctgtgaaggagggtgtggtgggccccgagctgcaccacaagctgctgtcggccgagcgcgccgtcactggctacaaggacccctacactggccagcagatctctctcttccaagccatgcagaagggcctcatcgtccgggagcacggcatccgcctgctggaggcccagatcgccacgggcggcgttatcgaccccgtgcacagccaccgcgtgcccgtggacgtggcctaccggcgcggctacttcgacgaggagatgaaccgcgtcctggcggaccccagcgacgacaccaagggcttctttgaccccaacacgcacgagaacctcacgtacctgcagctactggagcgctgcgtggaggaccccgagacgggcctgtgccttctgccactcacggataaggctgccaagggcggggagctggtctacactgactccgaggcccgggacgtctttgagaaggccaccgtgtctgcgccgttcggcaagttccagggcaagacggtgaccatttgggagatcatcaactcggaatacttcacggcagagcagcggcgggacctgctgcggcagttccgcacgggccggatcacagtggagaagatcatcaagatcatcatcacggtggtggaggagcaggagcagaagggccggctttgctttgagggcctgcgcagcctggtgccagccgccgagctgctggagagcagggtcatcgaccgcgagctctaccagcagctgcagcgaggtgagcgctctgtgcgagacgtagccgaggtggacactgtgcggcgggctctccggggtgccaacgtcatcgcgggtgtatggctggaggaggcggggcagaagctgagtatctacaatgccctgaagaaagacctgctgccatccgacatggccgtggccctgttggaagcccaggccggcaccgggcacatcatcgaccccgccaccagcgcccggctgaccgtggacgaggcagtgcgtgctggcctggtgggccccgagtttcatgagaagctgctatcagccgagaaggctgtgacagggtacagggacccctacacagggcagagcgtctccctgttccaggccctgaagaagggcctcattccccgggagcagggcctgcgcctgttggacgcccagctgtccacgggcggcatcgtggaccccagcaagagccaccgcgtgcccctggatgtcgcctgcgcccgaggctgcctggatgaggagaccagcagggccctgtcggcaccaagggccgacgccaaggcctacagtgaccccagcacaggggagccggccacctacggcgagctccagcagcggtgccggcccgaccagctgaccgggctgagcctgctgccgctctcagaaaaggctgctcgggcccggcaggaggagctctactcagagctgcaggcccgtgagacctttgaaaagaccccggttgaggtccccgtgggtggcttcaagggcaggacggtgacggtgtgggagctcatcagctctgagtacttcactgcggagcagcggcaggagctgttgcgtcagttccgcacgggcaaggtcaccgtggagaaggtcatcaagattctcattaccatcgtggaggaggtggagaccctgcggcaggagaggctgtccttcagcggcctccgtgcccctgtgccagccagcgagctcctggcttccggggtcctcagcagagcccagtttgagcagctcaaggacggcaagacgacggtcaaggacctttcggagctgggctccgtgcggacgctgctgcagggcagtggctgcctcgccggcatctacctggaggacaccaaggagaaggtgtccatctacgaggccatgcgccggggcctgctgagagccacaacggctgcgctcctgctggaggcgcaggcggccactggcttcctggtggaccccgtgcggaaccagcgcctgtatgtccacgaggccgtgaaggcgggcgtggtgggccccgagcttcacgagcagctgctgtctgccgagaaggccgtcaccggctacagagacccctactcgggcagcaccatctccctcttccaggccatgcagaagggcctggttctccggcagcacggcatccgcctgctggaggcccagatcgccacgggcggcatcatcgaccccgtgcacagccaccgcgtgcctgtggacgtggcctaccagcgcggctacttcagtgaggagatgaaccgcgtcctggcggaccccagcgacgacaccaagggcttctttgaccccaacacgcatgagaacctcacgtacaggcagctgctggagcggtgcgtggaggaccccgagacgggcttgcgccttctgccactgaaaggggcggagaaggctgaggtggtggagaccacgcaggtgtacactgaggaggagacaagaagggcatttgaagagacacagatcgacattcccggcggcggcagccacggcggctccaccatgtccctgtgggaggtgatgcagtcggacctgatccccgaggagcagcgggcccagctgatggctgacttccaggccggccgggtgaccaaggaacgcatgatcatcatcatcatcgagatcattgagaagacagagatcatccgccagcagggtctggcctcctacgactacgtgcgccgccgcctcacggctgaggacctgttcgaggctcggatcatctctctcgagacctacaacctgctccgggagggcaccaggagcctccgtgaggctctcgaggcggagtccgcctggtgctacctctatggcacgggctccgtggctggtgtctacctgcccggttccaggcagacactgagcatctaccaggctctcaagaaagggctgctgagtgccgaggtggcccgcctgctgctggaggcacaggcagccacaggcttcctgctggacccggtgaagggggagcggctgactgtggatgaggctgtgcggaagggcctcgtggggcccgagctgcacgaccgcctgctctcggctgagcgggcggtcaccggctaccgtgacccctacaccgagcagaccatctcgctcttccaggccatgaagaaggagctgatccctactgaggaggccctgcggctgctggatgcccagctggccaccggcggcatcgtggacccccgcctgggcttccaccttcccctggaggtggcttaccagcgtggctacctcaacaaggacacgcacgaccagctgtcagagcccagcgaggtgcgcagctacgtggacccgtccaccgacgagcgcctcagctacacgcagctgctcaggcggtgccgtcgtgacgacggcaccggccagctgctcctgccactgtcggacgcccgcaagctgaccttccgtggcctgcggaagcagatcaccatggaggagctggtgcgctcgcaggtcatggacgaggccacggcgctgcagctgcgggagggcctgacctccatcgaggaggtcaccaagaacttgcagaagttcctggaaggcaccagctgcatcgctggtgtcttcgtggacgccaccaaggaacggctctcggtgtaccaggccatgaagaagggcatcatccgccccggcacagcctttgagctcctggaggcgcaggcggccaccggttacgtcatcgaccccatcaagggactgaagctgacggtggaggaggctgtgcgtatgggcattgtgggccccgagttcaaggacaagctgctgtcggccgagcgcgccgtcactgggtacaaggacccctactctgggaagctcatctccctcttccaggccatgaagaagggcctgatcctgaaggaccatggcatccgcctgctggaggcccagatcgccacgggcggcatcatcgaccctgaggagagccaccggctgcccgtggaggtggcctacaagcgcggcctcttcgatgaggagatgaacgagatcctgaccgacccctcggacgacaccaagggcttctttgaccctaacacggaggagaacctcacctacctgcagctgatggagcgttgtatcactgacccccagacgggcctgtgtctcttgccgctgaaggagaagaagcgggagcggaagacgtcctccaagtcctccgtgcgcaagcgccgagtggtcatcgtggaccccgagacgggcaaggagatgtcagtgtacgaggcctaccgcaagggcctgattgaccaccagacgtacctggagctgtccgagcaggagtgcgagtgggaggagatcaccatctcctcctcggacggcgtggtcaagtccatgatcatcgaccgccgctccgggcgccagtacgacatcgatgatgccatcgccaagaacctcatcgaccgctcggcactggaccagtaccgcgccggcacgctctccatcaccgagttcgccgacatgctctcgggcaacgccggtggtttccgctcccgttcctcctcggtgggatcctcctcctcctaccccatcagccccgccgtctccaggacccagctggcctcctggtcagaccccactgaggagacgggccccgtggctggcatcctggacacggagacgctggagaaggtgtccatcaccgaggccatgcaccggaacctggtggataacatcacggggcagcggctgctggaggcgcaggcctgcaccgggggcatcatcgaccccagcaccggtgagcgcttccctgtcaccgacgccgtcaacaagggcctggtggacaagatcatggtggaccgcatcaacctggcccagaaggccttctgcggcttcgaggacccacgcaccaagaccaagatgtcggccgcccaggccctgaagaagggctggctctactacgaggccggccagcgcttcctggaggtgcagtacctgaccggcggcttgatcgagcccgacacgccgggccgcgtgcccctggacgaggccctgcagcgcggcacggtggacgcccgcaccgcacagaagctgcgtgacgtgggcgcctactccaagtacctcacctgccctaagaccaagctcaagatctcctataaggacgcgctggaccgcagcatggtggaggagggcacggggctgcggctgctggaggctgccgcgcagtccaccaagggctactacagcccctacagcgtcagcggctccggctctaccgctggctcccgcaccggctcgcgcaccggctcccgggccggctcccgccgcggcagctttgacgccaccggctccggcttctccatgaccttctcttcatcctcctactcctcctcgggctacggccgccgctacgcctcggggtcctcggcctccctggggggccctgagtctgccgtggcctgaggctgcctgcgcccaccccgctctgcatgcggcccagcccggctcccaccgaggcgcgggggccgttttcaacgcttaaaggtgtcttcctcccaagtggtgcctaaagtttaaccaaaaagaccagactaatatattaatatatatctgctgtccagacagcctgtatcttgggggacagggctggcccagccctgctggccgcctcaccccctcgggtctcctcactcccttctacctgccactcacacagccaggtgccttggagggtcccaagctgggccccagcccaccctcctgtcttcccagggtagcccgcctgccagtcctagctgcacagggcagctgggcccaaccctgtctgtagagggccctggtgtttctagcactggcctgcacggtgggccttgctggggacggggggccccagtcagcctctctcccagtctacccagagaagccccttccccatgggaagacgaggccctcgggcccagcccccacagtgctgtctgatctgtgctttccagctcaccccccacactcactcctgagacccctggcctccggcgtcagcctccagcctctgttcccctagtaagtgccttccatgtcggcctctaaccccaggccccgaggacccagacccagtggggaggcggacgttccagccggcatggctgggaactgcagacctgtcctcctggtgggtccaggggcccctccagcttgtggagccccacactggggtgccgcctgcccgtctctctcccatggagccccagccccctttgggcccagggacaccagccaggctctgtgctgaccctcctgttgcacccagccctggtctcagcagcgaccacccctgcctccaccctctgagctttgcatgttccactaaccccgggcgggtggcaggtggaggtgtcaggctgctggcgcctctgcaagggcagaacactaacctgaccgtgggcggggccttgcggtatccgcccccaataaaagcaattccaaccttagagtggccgccgggtgctggaggctccgctgcaccccgcgccccgcgcccgccggcatggccggcccgctgcccgacgagcaggacttcatccaggcctacgaggaggtgcgcgagaagtacaaagatgagcgggatcgtgtgcagaagaaaaccttcaccaagtgggtcaacaagcacctcatcaaggcccagaggcacatcagtgacctgtatgaagacctccgcgatggccacaacctcatctccctgctggaggtcctctcgggggacagcctgccccgggagaaggggaggatgcgtttccacaagctgcagaatgtccagattgccctggactacctccggcaccgccaggtgaagctggtgaacatcaggaatgatgacatcgctgacggcaaccccaagctgacccttggcctcatctggacaatcattctgcacttccagatctcagatatccaggtgagtgggcagtcggaggacatgacggccaaggagaagctgctgctgtggtcgcagcgaatggtggaggggtaccagggcctgcgatgcgacaacttcacctccagctggagagacggccgcctcttcaatgccatcatccaccggcacaagcccctgctcatcgacatgaacaaggtgtaccggcagaccaacctggagaacctggaccaggccttctctgtggcggagcgggacctgggagtgacgcggctcctggaccctgaggacgtggatgtccctcagcccgacgagaagtccatcatcacctacgtctcgtcgctgtatgacgccatgccccgcgtgccggacgtgcaggatggggtgagggccaacgagctgcagctgcgctggcaggagtaccgggagctggtgctgctgctgcttcagtggatgcgacaccacacggccgcctttgaggaacgcaggttcccctccagcttcgaggagattgagatcctgtggtctcagttcctgaagtttaaggagatggagctaccagccaaggaggccgacaagaacaggtccaagggcatctaccaatccctggagggagcggtgcaagcaggccagctcaaggtgccccctggctaccacccgctggatgtggagaaggagtggggcaagctgcacgtggccatcctggagcgggagaagcagctccgcagcgagtttgagaggctggagtgtcttcagcgcatcgtgaccaagctgcagatggaggcggggctgtgtgaggagcagctgaaccaggccgacgccctgctgcagtcggatgtccggctgctggctgcaggcaaagtgccacagcgggcgggggaggtggaacgggacttggacaaggcggatagcatgatccggctgctcttcaacgacgtgcagaccctcaaggatggacggcacccgcagggcgagcagatgtaccgcagggtgtaccgtctgcacgagcgcctggtagccatccgcaccgagtacaacctacggctgaaggcaggcgtggcggcccctgcaacccaggtggcccaggtgactctgcagagtgtgcagaggcgccccgagctggaggactccactctgcgctacctgcaggacctgctggcctgggtggaggagaaccagcaccgtgtggatggcgctgagtggggtgtggacctgcccagcgtggaggcgcagctgggcagccaccgaggcctgcaccagtccatcgaagaattccgggccaagatcgagcgggcacggagtgacgagggccagctctcccccgccacccggggtgcctaccgtgactgcctgggtcggctggacctgcagtacgccaagctgctgaactcctccaaggcccgcctcaggtccctggagagcttgcacagctttgtggcagccgccactaaggagctaatgtggctgaatgagaaggaggaggaggaggtgggcttcgactggagcgaccgcaacaccaacatgaccgccaagaaggagagctactcggcgctgatgcgggagctggagctgaaggagaagaagatcaaggagctccaaaatgctggggaccggctgctgcgggaggaccacccggcccggcccacggtggagtccttccaggcggccctgcagacgcagtggagctggatgctacagctgtgctgctgtatcgaggcacacctgaaggagaacgctgcctactttcagttcttctcagatgtgcgggaggccgaggggcagttgcagaagctgcaggaggcactgcgtaggaaatacagttgtgatcgctccgccaccgtcacccggctggaggacctgctgcaggatgcccaggacgagaaggaacagctgaacgagtacaagggccacctctcaggcctggccaagcgggccaaggccgtcgtgcagctgaagccccgccacccagcccaccccatgcggggccgcctgcccctgctggccgtgtgcgactataagcaggtggaggtgactgtgcacaagggtgacgagtgccagctggtgggccctgcacagccgtcccactggaaggtgctcagcagctccggcagcgaggccgccgtgccctccgtgtgcttcctggtgcccccgcccaaccaggaggcccaggaggccgtcaccaggctggaggcccagcaccaggccctggtcacgctgtggcaccagttgcacgtggacatgaagagccttctggcctggcagagccttcgccgcgacgtgcagctcatccgctcctggtccctggccacgttccgcaccctgaagccagaggagcagcgccaagccctgcacagcctggagctgcactaccaggccttcctgcgggacagccaggacgcgggcggcttcggacccgaggaccggctgatggctgagcgcgagtacggctcctgcagccaccactaccagcagctgctgcagagcctggaacagggtgcacaggaagagtctcgctgccagcgctgcatctccgagctcaaagacatccggctgcagctggaggcctgtgagacgcgcaccgtgcaccgcctgcggctgccgctggacaaagagccggcacgggagtgtgcccagcgcatcgccgagcagcagaaggcacaggcagaggtggaggggctgggcaagggggtcgcccggctctctgccgaggccgagaaggtcttggccctaccagagccatcgcctgcggcccccacgctgcgctcggagctggagctgacgctgggcaagctggagcaggtccgcagcctgtctgccatctacctggagaagctcaagaccatcagcctggtgatccgcggcacgcagggggccgaggaggtgctcagggcccacgaggagcagctcaaggaggcccaggccgtgccggccaccctcccggagctcgaggccaccaaggcctctctgaagaagctgcgggcccaggccgaggcacagcagcccacgttcgacgccctgcgggatgagctgcggggggcacaggaggtgggggagcgactgcagcagcggcacggggagcgggacgtggaggtggagcgctggcgggagcgggtcgcccagttgcttgagcgctggcaggctgtgctggcccagaccgacgtgcggcagcgcgagctcgagcaactgggccgccagctgcgttactaccgcgagagtgcagaccccttgggcgcctggctgcaggacgccaggcggcggcaggagcagatccaggccatgccgctggccgacagccaggctgtgcgggagcagctgcggcaggagcaggccctgctggaggagatcgagcgccacggcgagaaggtcgaggagtgccagaggtttgcgaaacagtacatcaacgccatcaaggactatgaactccagctggtgacgtacaaggcgcagcttgagccggtggcctccccggccaagaagcccaaggtccagtcgggatcagagagtgtcatccaggagtacgtggacctgcgtacgcactacagcgagctgaccacactgacgagccagtacatcaagttcatcagcgagactctgcggcgcatggaggaggaggagaggctggctgagcagcagcgggcagaggagcgcgagcggctggccgaggtggaggccgcgctggagaagcagcggcagctggccgaggcgcacgcccaggcaaaggcacaggcggagcgggaggcgaaggagctgcagcagcgcatgcaggaggaggtggtgcggcgggaggaggcggcggtggacgcgcagcagcagaagcgcagcattcaggaggagctgcagcagctgcggcagagctcggaggcggagatccaggccaaggcccggcaggcagaggcggctgagcgcagccggctgcgcatcgaggaggagatccgcgtggtgcgcctgcagttggaggccaccgagcgccagcgtggcggggctgagggggagctgcaggcactgcgtgcacgggcggaggaggctgaggcacaaaagcgacaggcgcaggaggaggccgagcgcttgcggaggcaggtgcaggacgagagccagcgtaagcggcaggcggaggtggagctggcctcgcgcgtgaaggccgaggccgaggcggcgcgcgagaagcagcgggccctgcaggccctggaggagctgcggctgcaggcggaggaggcggagcggcgcctgcggcaggccgaggtggagcgagcgcggcaggtacaggtggccctggagacggcgcagcgcagtgcagaggcggagctgcagagcaaacgcgcctccttcgccgagaagacggcacagctggagcgctccctgcaggaggaacacgtggctgtggcacagctgcgggaggaggctgagcggcgggcacagcagcaggccgaggccgagcgggcgcgcgaggaggcagagcgggagctggagcgctggcagctcaaggccaacgaggcgctacggctgcggctgcaggcggaggaggtggcgcagcagaagagcctggcgcaggccgaggctgagaagcagaaggaggaggcggagcgcgaggcgcggcggcgcggcaaggcggaggagcaggccgtccggcagcgggagctggctgaacaagagctggagaagcagcggcagctggcggaaggcaccgcgcagcagcgcctggccgcggagcaggagttgatccggctgcgggccgagacggagcagggggagcagcagcggcagctgctggaggaggagctggcccggctgcagcgtgaggcggctgcagccacgcagaaacggcaggagctggaagccgagctggccaaggtgcgggccgagatggaggtgctgctggccagcaaggcgagggctgaggaggagtcgcgctccaccagcgagaagtccaagcagaggctggaggccgaggccggccggttccgcgagctggccgaggaggccgcccgcctgcgtgccctggcggaagaggccaagcggcagcggcagctggccgaggaagacgcggcgcggcagcgggccgaggcggagcgggtgcttgcggagaagctggccgccatcggcgaggccacgcggctcaagacggaggcggagatcgcgctcaaggagaaggaggcggagaacgagcgcctgcggcggctggcggaggacgaggccttccagcggcggcggctggaggagcaggccgcgcaacacaaggctgacatcgaggagcgcctggcccagctgcgcaaggcatcggacagcgagctggagcggcagaaggggctggtggaggacacgctgaggcagcggcggcaggtggaggaggagatcctggcgctgaaggcgagcttcgagaaggcggccgctggcaaggcggagctggagctggagctgggacgcatccgcagcaacgcggaggacacgctgcgcagcaaggagcaggccgagctggaggctgcgaggcagcggcagctggcggcggaggaggagcggcggcgccgtgaggctgaggagcgcgtgcagaagagcctggcggccgaggaggaggccgcacggcagcggaaggcggcgctggaggaagtcgagcggctgaaagccaaggtggaggaggcgcggcgcctgcgggagcgagcggagcaggagtcggcgcggcagctgcagctggcccaggaggccgcccagaagcggctgcaggcggaagagaaggcacacgccttcgcggtgcagcagaaggagcaggagctacagcagacgctgcagcaggagcagagcgtgctggaccagctgcgcggcgaggcggaggcggcccggcgggcggctgaggaggcggaggaggcccgggtgcaggcggagcgtgaggcggcgcagtcccggcggcaggtggaagaggccgagcggctgaagcagtcggcagaggagcaggcacaggcccgggctcaggcacaggcggctgcagagaagctgcgcaaggaggccgagcaagaggcggcgcggcgggcacaggcggagcaggcggccctgcggcagaagcaggcagctgacgcggagatggagaagcataagaaattcgccgagcag

SEQ ID NO: 681 - DNA, 32765 bp, Homo sapiens
  misc_feature (977)..(977): second gene starts at position 977
atgagcttcaccactcgctccaccttctccaccaactaccggtccctgggctctgtccaggcgcccagctacggcgcccggccggtcagcagcgcggccagcgtctatgcaggcgctgggggctctggttcccggatctccgtgtcccgctccaccagcttcaggggcggcatggggtccgggggcctggccaccgggatagccgggggtctggcaggaatgggaggcatccagaacgagaaggagaccatgcaaagcctgaacgaccgcctggcctcttacctggacagagtgaggagcctggagaccgagaaccggaggctggagagcaaaatccgggagcacttggagaagaagggaccccaggtcagagactggagccattacttcaagatcatcgaggacctgagggctcagatcttcgcaaatactgtggacaatgcccgcatcgttctgcagattgacaatgcccgtcttgctgctgatgactttagagtcaagtatgagacagagctggccatgcgccagtctgtggagaacgacatccatgggctccgcaaggtcattgatgacaccaatatcacacgactgcagctggagacagagatcgaggctctcaaggaggagctgctcttcatgaagaagaaccacgaagaggaagtaaaaggcctacaagcccagattgccagctctgggttgaccgtggaggtagatgcccccaaatctcaggacctcgccaagatcatggcagacatccgggcccaatatgacgagctggctcggaagaaccgagaggagctagacaagtactggtctcagcagattgaggagagcaccacagtggtcaccacacagtctgctgaggttggagctgctgagacgacgctcacagagctgagacgtacagtccagtccttggagatcgacctggactccatgagaaatctgaaggccagcttggagaacagcctgagggtggagaagcagcggcagctggccgaggcgcacgcccaggcaaaggcacaggcggagcgggaggcgaaggagctgcagcagcgcatgcaggaggaggtggtgcggcgggaggaggcggcggtggacgcgcagcagcagaagcgcagcattcaggaggagctgcagcagctgcggcagagctcggaggcggagatccaggccaaggcccggcaggcagaggcggctgagcgcagccggctgcgcatcgaggaggagatccgcgtggtgcgcctgcagttggaggccaccgagcgccagcgtggcggggctgagggggagctgcaggcactgcgtgcacgggcggaggaggctgaggcacaaaagcgacaggcgcaggaggaggccgagcgcttgcggaggcaggtgcaggacgagagccagcgtaagcggcaggcggaggtggagctggcctcgcgcgtgaaggccgaggccgaggcggcgcgcgagaagcagcgggccctgcaggccctggaggagctgcggctgcaggcggaggaggcggagcggcgcctgcggcaggccgaggtggagcgagcgcggcaggtacaggtggccctggagacggcgcagcgcagtgcagaggcggagctgcagagcaaacgcgcctccttcgccgagaagacggcacagctggagcgctccctgcaggaggaacacgtggctgtggcacagctgcgggaggaggctgagcggcgggcacagcagcaggccgaggccgagcgggcgcgcgaggaggcagagcgggagctggagcgctggcagctcaaggccaacgaggcgctacggctgcggctgcaggcggaggaggtggcgcagcagaagagcctggcgcaggccgaggctgagaagcagaaggaggaggcggagcgcgaggcgcggcggcgcggcaaggcggaggagcaggccgtccggcagcgggagctggctgaacaagagctggagaagcagcggcagctggcggaaggcaccgcgcagcagcgcctggccgcggagcaggagttgatccggctgcgggccgagacggagcagggggagcagcagcggcagctgctggaggaggagctggcccggctgcagcgtgaggcggctgcagccacgcagaaacggcaggagctggaagccgagctggccaaggtgcgggccgagatggaggtgctgctggccagcaaggcgagggctgaggaggagtcgcgctccaccagcgagaagtccaagcagaggctggaggccgaggccggccggttccgcgagctggccgaggaggccgcccgcctgcgtgccctggcggaagaggccaagcggcagcggcagctggccgaggaagacgcggcgcggcagcgggccgaggcggagcgggtgcttgcggagaagctggccgccatcggcgaggccacgcggctcaagacggaggcggagatcgcgctcaaggagaaggaggcggagaacgagcgcctgcggcggctggcggaggacgaggccttccagcggcggcggctggaggagcaggccgcgcaacacaaggctgacatcgaggagcgcctggcccagctgcgcaaggcatcggacagcgagctggagcggcagaaggggctggtggaggacacgctgaggcagcggcggcaggtggaggaggagatcctggcgctgaaggcgagcttcgagaaggcggccgctggcaaggcggagctggagctggagctgggacgcatccgcagcaacgcggaggacacgctgcgcagcaaggagcaggccgagctggaggctgcgaggcagcggcagctggcggcggaggaggagcggcggcgccgtgaggctgaggagcgcgtgcagaagagcctggcggccgaggaggaggccgcacggcagcggaaggcggcgctggaggaagtcgagcggctgaaagccaaggtggaggaggcgcggcgcctgcgggagcgagcggagcaggagtcggcgcggcagctgcagctggcccaggaggccgcccagaagcggctgcaggcggaagagaaggcacacgccttcgcggtgcagcagaaggagcaggagctacagcagacgctgcagcaggagcagagcgtgctggaccagctgcgcggcgaggcggaggcggcccggcgggcggctgaggaggcggaggaggcccgggtgcaggcggagcgtgaggcggcgcagtcccggcggcaggtggaagaggccgagcggctgaagcagtcggcagaggagcaggcacaggcccgggctcaggcacaggcggctgcagagaagctgcgcaaggaggccgagcaagaggcggcgcggcgggcacaggcggagcaggcggccctgcggcagaagcaggcagctgacgcggagatggagaagcataagaaattcgccgagcagacgctgcggcagaaggcgcaggtggagcaggagctgacaacactgcggctgcagctggaggagaccgaccaccagaagaacctgctggacgaggagctgcagcggctgaaggcggaggccacggaggccgcacgccagcgcagccaggtggaggaggagctcttctcggtgcgcgtgcagatggaggagctgagcaagctcaaggcacgcatcgaggctgagaaccgcgcactcatcttgcgtgacaaggacaatacgcagcgcttcctgcaggaggaggctgagaagatgaagcaggtggcggaggaggccgcgcggctgagtgtggcggcccaagaggctgcgcgactgcggcagctggcagaggaggacctggcacagcagcgggccttggcagagaagatgctcaaggagaagatgcaggcggtgcaggaggccacgcgactcaaggctgaggcggaactgctgcagcagcagaaggagcttgcgcaggagcaggcgcggcggctgcaggaggacaaggagcagatggcgcagcagctggcggaggagacgcagggcttccagcggacgctggaggccgagcggcagcggcagctggagatgagcgctgaggctgagcgcctcaagctgcgtgtggccgagatgagccgagcccaggcccgcgctgaggaggacgcccagcgcttccggaagcaggcggaggagatcggtgagaagctgcaccgcacggagctcgccacccaggagaaggtgaccctggtgcagacactggagatccagcgacagcagagtgaccatgatgccgagcgcctgcgggaggccatcgctgagctggagcgtgagaaggagaagctccaacaggaggccaaactgctgcagctcaagtctgaggagatgcagacggtgcagcaggagcagctgctgcaggagacgcaggccctgcagcaaagcttcctctctgaaaaggacagcctgctacagcgggagcgcttcatcgagcaggagaaggccaagctggagcagctcttccaggacgaggtggccaaggcacagcagctgcgtgaggagcagcagcggcagcagcagcagatggagcaggaacggcagcggctggtggccagcatggaggaggcgcggcggcggcagcatgaggccgaggagggcgtgcggcgcaagcaggaggagctgcagcagctggagcagcagcggcggcagcaggaggagctgctggctgaggagaaccagaggctgcgtgagcagctgcagctcctggaggagcagcaccgggccgcgctggcgcactcagaggaggtcactgcctcgcaggtggctgccacaaagaccctgcccaatggccgggatgcacttgatggccccgcggcagaggcagagccggagcacagcttcgatggcctgcggcggaaggtgtcagctcagaggctgcaggaggccggcatcctgagtgcggaggagctgcagcggttggcgcagggccacaccacggtggacgagctcgcacggcgggaagacgtgcgccactacctgcagggccgcagcagtatcgcagggctgttgctgaaggccaccaatgagaagctgagtgtttacgccgccctgcagaggcagctgctgagtcccggcacggccctcatcctgctggaggcgcaggcggcctcaggcttcctgctggaccctgtgcggaaccggcggctgaccgtcaacgaggctgtgaaggagggtgtggtgggccccgagctgcaccacaagctgctgtcggccgagcgcgccgtcactggctacaaggacccctacactggccagcagatctctctcttccaagccatgcagaagggcctcatcgtccgggagcacggcatccgcctgctggaggcccagatcgccacgggcggcgttatcgaccccgtgcacagccaccgcgtgcccgtggacgtggcctaccggcgcggctacttcgacgaggagatgaaccgcgtcctggcggaccccagcgacgacaccaagggcttctttgaccccaacacgcacgagaacctcacgtacctgcagctactggagcgctgcgtggaggaccccgagacgggcctgtgccttctgccactcacggataaggctgccaagggcggggagctggtctacactgactccgaggcccgggacgtctttgagaaggccaccgtgtctgcgccgttcggcaagttccagggcaagacggtgaccatttgggagatcatcaactcggaatacttcacggcagagcagcggcgggacctgctgcggcagttccgcacgggccggatcacagtggagaagatcatcaagatcatcatcacggtggtggaggagcaggagcagaagggccggctttgctttgagggcctgcgcagcctggtgccagccgccgagctgctggagagcagggtcatcgaccgcgagctctaccagcagctgcagcgaggtgagcgctctgtgcgagacgtagccgaggtggacactgtgcggcgggctctccggggtgccaacgtcatcgcgggtgtatggctggaggaggcggggcagaagctgagtatctacaatgccctgaagaaagacctgctgccatccgacatggccgtggccctgttggaagcccaggccggcaccgggcacatcatcgaccccgccaccagcgcccggctgaccgtggacgaggcagtgcgtgctggcctggtgggccccgagtttcatgagaagctgctatcagccgagaaggctgtgacagggtacagggacccctacacagggcagagcgtctccctgttccaggccctgaagaagggcctcattccccgggagcagggcctgcgcctgttggacgcccagctgtccacgggcggcatcgtggaccccagcaagagccaccgcgtgcccctggatgtcgcctgcgcccgaggctgcctggatgaggagaccagcagggccctgtcggcaccaagggccgacgccaaggcctacagtgaccccagcacaggggagccggccacctacggcgagctccagcagcggtgccggcccgaccagctgaccgggctgagcctgctgccgctctcagaaaaggctgctcgggcccggcaggaggagctctactcagagctgcaggcccgtgagacctttgaaaagaccccggttgaggtccccgtgggtggcttcaagggcaggacggtgacggtgtgggagctcatcagctctgagtacttcactgcggagcagcggcaggagctgttgcgtcagttccgcacgggcaaggtcaccgtggagaaggtcatcaagattctcattaccatcgtggaggaggtggagaccctgcggcaggagaggctgtccttcagcggcctccgtgcccctgtgccagccagcgagctcctggcttccggggtcctcagcagagcccagtttgagcagctcaaggacggcaagacgacggtcaaggacctttcggagctgggctccgtgcggacgctgctgcagggcagtggctgcctcgccggcatctacctggaggacaccaaggagaaggtgtccatctacgaggccatgcgccggggcctgctgagagccacaacggctgcgctcctgctggaggcgcaggcggccactggcttcctggtggaccccgtgcggaaccagcgcctgtatgtccacgaggccgtgaaggcgggcgtggtgggccccgagcttcacgagcagctgctgtctgccgagaaggccgtcaccggctacagagacccctactcgggcagcaccatctccctcttccaggccatgcagaagggcctggttctccggcagcacggcatccgcctgctggaggcccagatcgccacgggcggcatcatcgaccccgtgcacagccaccgcgtgcctgtggacgtggcctaccagcgcggctacttcagtgaggagatgaaccgcgtcctggcggaccccagcgacgacaccaagggcttctttgaccccaacacgcatgagaacctcacgtacaggcagctgctggagcggtgcgtggaggaccccgagacgggcttgcgccttctgccactgaaaggggcggagaaggctgaggtggtggagaccacgcaggtgtacactgaggaggagacaagaagggcatttgaagagacacagatcgacattcccggcggcggcagccacggcggctccaccatgtccctgtgggaggtgatgcagtcggacctgatccccgaggagcagcgggcccagctgatggctgacttccaggccggccgggtgaccaaggaacgcatgatcatcatcatcatcgagatcattgagaagacagagatcatccgccagcagggtctggcctcctacgactacgtgcgccgccgcctcacggctgaggacctgttcgaggctcggatcatctctctcgagacctacaacctgctccgggagggcaccaggagcctccgtgaggctctcgaggcggagtccgcctggtgctacctctatggcacgggctccgtggctggtgtctacctgcccggttccaggcagacactgagcatctaccaggctctcaagaaagggctgctgagtgccgaggtggcccgcctgctgctggaggcacaggcagccacaggcttcctgctggacccggtgaagggggagcggctgactgtggatgaggctgtgcggaagggcctcgtggggcccgagctgcacgaccgcctgctctcggctgagcgggcggtcaccggctaccgtgacccctacaccgagcagaccatctcgctcttccaggccatgaagaaggagctgatccctactgaggaggccctgcggctgctggatgcccagctggccaccggcggcatcgtggacccccgcctgggcttccaccttcccctggaggtggcttaccagcgtggctacctcaacaaggacacgcacgaccagctgtcagagcccagcgaggtgcgcagctacgtggacccgtccaccgacgagcgcctcagctacacgcagctgctcaggcggtgccgtcgtgacgacggcaccggccagctgctcctgccactgtcggacgcccgcaagctgaccttccgtggcctgcggaagcagatcaccatggaggagctggtgcgctcgcaggtcatggacgaggccacggcgctgcagctgcgggagggcctgacctccatcgaggaggtcaccaagaacttgcagaagttcctggaaggcaccagctgcatcgctggtgtcttcgtggacgccaccaaggaacggctctcggtgtaccaggccatgaagaagggcatcatccgccccggcacagcctttgagctcctggaggcgcaggcggccaccggttacgtcatcgaccccatcaagggactgaagctgacggtggaggaggctgtgcgtatgggcattgtgggccccgagttcaaggacaagctgctgtcggccgagcgcgccgtcactgggtacaaggacccctactctgggaagctcatctccctcttccaggccatgaagaagggcctgatcctgaaggaccatggcatccgcctgctggaggcccagatcgccacgggcggcatcatcgaccctgaggagagccaccggctgcccgtggaggtggcctacaagcgcggcctcttcgatgaggagatgaacgagatcctgaccgacccctcggacgacaccaagggcttctttgaccctaacacggaggagaacctcacctacctgcagctgatggagcgttgtatcactgacccccagacgggcctgtgtctcttgccgctgaaggagaagaagcgggagcggaagacgtcctccaagtcctccgtgcgcaagcgccgagtggtcatcgtggaccccgagacgggcaaggagatgtcagtgtacgaggcctaccgcaagggcctgattgaccaccagacgtacctggagctgtccgagcaggagtgcgagtgggaggagatcaccatctcctcctcggacggcgtggtcaagtccatgatcatcgaccgccgctccgggcgccagtacgacatcgatgatgccatcgccaagaacctcatcgaccgctcggcactggaccagtaccgcgccggcacgctctccatcaccgagttcgccgacatgctctcgggcaacgccggtggtttccgctcccgttcctcctcggtgggatcctcctcctcctaccccatcagccccgccgtctccaggacccagctggcctcctggtcagaccccactgaggagacgggccccgtggctggcatcctggacacggagacgctggagaaggtgtccatcaccgaggccatgcaccggaacctggtggataacatcacggggcagcggctgctggaggcgcaggcctgcaccgggggcatcatcgaccccagcaccggtgagcgcttccctgtcaccgacgccgtcaacaagggcctggtggacaagatcatggtggaccgcatcaacctggcccagaaggccttctgcggcttcgaggacccacgcaccaagaccaagatgtcggccgcccaggccctgaagaagggctggctctactacgaggccggccagcgcttcctggaggtgcagtacctgaccggcggcttgatcgagcccgacacgccgggccgcgtgcccctggacgaggccctgcagcgcggcacggtggacgcccgcaccgcacagaagctgcgtgacgtgggcgcctactccaagtacctcacctgccctaagaccaagctcaagatctcctataaggacgcgctggaccgcagcatggtggaggagggcacggggctgcggctgctggaggctgccgcgcagtccaccaagggctactacagcccctacagcgtcagcggctccggctctaccgctggctcccgcaccggctcgcgcaccggctcccgggccggctcccgccgcggcagctttgacgccaccggctccggcttctccatgaccttctcttcatcctcctactcctcctcgggctacggccgccgctacgcctcggggtcctcggcctccctggggggccctgagtctgccgtggcctgaggctgcctgcgcccaccccgctctgcatgcggcccagcccggctcccaccgaggcgcgggggccgttttcaacgcttaaaggtgtcttcctcccaagtggtgcctaaagtttaaccaaaaagaccagactaatatattaatatatatctgctgtccagacagcctgtatcttgggggacagggctggcccagccctgctggccgcctcaccccctcgggtctcctcactcccttctacctgccactcacacagccaggtgccttggagggtcccaagctgggccccagcccaccctcctgtcttcccagggtagcccgcctgccagtcctagctgcacagggcagctgggcccaaccctgtctgtagagggccctggtgtttctagcactggcctgcacggtgggccttgctggggacggggggccccagtcagcctctctcccagtctacccagagaagccccttccccatgggaagacgaggccctcgggcccagcccccacagtgctgtctgatctgtgctttccagctcaccccccacactcactcctgagacccctggcctccggcgtcagcctccagcctctgttcccctagtaagtgccttccatgtcggcctctaaccccaggccccgaggacccagacccagtggggaggcggacgttccagccggcatggctgggaactgcagacctgtcctcctggtgggtccaggggcccctccagcttgtggagccccacactggggtgccgcctgcccgtctctctcccatggagccccagccccctttgggcccagggacaccagccaggctctgtgctgaccctcctgttgcacccagccctggtctcagcagcgaccacccctgcctccaccctctgagctttgcatgttccactaaccccgggcgggtggcaggtggaggtgtcaggctgctggcgcctctgcaagggcagaacactaacctgaccgtgggcggggccttgcggtatccgcccccaataaaagcaattccaaccttattgatcagctgaagccccgcccctggccggcaagccctgccccggacctccgggctcctcccccggctgcggcgctggcctgggcagtgcggtgcggggctggactctgcctggtggtggcacagccgccctcagccccggcgcagacatggacccctcgcgagccatccagaacgagatcagctccctcaaagatgagcgggatcgtgtgcagaagaaaaccttcaccaagtgggtcaacaagcacctcatcaaggcccagaggcacatcagtgacctgtatgaagacctccgcgatggccacaacctcatctccctgctggaggtcctctcgggggacagcctgccccgggagaaggggaggatgcgtttccacaagctgcagaatgtccagattgccctggactacctccggcaccgccaggtgaagctggtgaacatcaggaatgatgacatcgctgacggcaaccccaagctgacccttggcctcatctggacaatcattctgcacttccagatctcagatatccaggtgagtgggcagtcggaggacatgacggccaaggagaagctgctgctgtggtcgcagcgaatggtggaggggtaccagggcctgcgatgcgacaacttcacctccagctggagagacggccgcctcttcaatgccatcatccaccggcacaagcccctgctcatcgacatgaacaaggtgtaccggcagaccaacctggagaacctggaccaggccttctctgtggcggagcgggacctgggagtgacgcggctcctggaccctgaggacgtggatgtccctcagcccgacgagaagtccatcatcacctacgtctcgtcgctgtatgacgccatgccccgcgtgccggacgtgcaggatggggtgagggccaacgagctgcagctgcgctggcaggagtaccgggagctggtgctgctgctgcttcagtggatgcgacaccacacggccgcctttgaggaacgcaggttcccctccagcttcgaggagattgagatcctgtggtctcagttcctgaagtttaaggagatggagctaccagccaaggaggccgacaagaacaggtccaagggcatctaccaatccctggagggagcggtgcaagcaggccagctcaaggtgccccctggctaccacccgctggatgtggagaaggagtggggcaagctgcacgtggccatcctggagcgggagaagcagctccgcagcgagtttgagaggctggagtgtcttcagcgcatcgtgaccaagctgcagatggaggcggggctgtgtgaggagcagctgaaccaggccgacgccctgctgcagtcggatgtccggctgctggctgcaggcaaagtgccacagcgggcgggggaggtggaacgggacttggacaaggcggatagcatgatccggctgctcttcaacgacgtgcagaccctcaaggatggacggcacccgcagggcgagcagatgtaccgcagggtgtaccgtctgcacgagcgcctggtagccatccgcaccgagtacaacctacggctgaaggcaggcgtggcggcccctgcaacccaggtggcccaggtgactctgcagagtgtgcagaggcgccccgagctggaggactccactctgcgctacctgcaggacctgctggcctgggtggaggagaaccagcaccgtgtggatggcgctgagtggggtgtggacctgcccagcgtggaggcgcagctgggcagccaccgaggcctgcaccagtccatcgaagaattccgggccaagatcgagcgggcacggagtgacgagggccagctctcccccgccacccggggtgcctaccgtgactgcctgggtcggctggacctgcagtacgccaagctgctgaactcctccaaggcccgcctcaggtccctggagagcttgcacagctttgtggcagccgccactaaggagctaatgtggctgaatgagaaggaggaggaggaggtgggcttcgactggagcgaccgcaacaccaacatgaccgccaagaaggagagctactcggcgctgatgcgggagctggagctgaaggagaagaagatcaaggagctccaaaatgctggggaccggctgctgcgggaggaccacccggcccggcccacggtggagtccttccaggcggccctgcagacgcagtggagctggatgctacagctgtgctgctgtatcgaggcacacctgaaggagaacgctgcctactttcagttcttctcagatgtgcgggaggccgaggggcagttgcagaagctgcaggaggcactgcgtaggaaatacagttgtgatcgctccgccaccgtcacccggctggaggacctgctgcaggatgcccaggacgagaaggaacagctgaacgagtacaagggccacctctcaggcctggccaagcgggccaaggccgtcgtgcagctgaagccccgccacccagcccaccccatgcggggccgcctgcccctgctggccgtgtgcgactataagcaggtggaggtgactgtgcacaagggtgacgagtgccagctggtgggccctgcacagccgtcccactggaaggtgctcagcagctccggcagcgaggccgccgtgccctccgtgtgcttcctggtgcccccgcccaaccaggaggcccaggaggccgtcaccaggctggaggcccagcaccaggccctggtcacgctgtggcaccagttgcacgtggacatgaagagccttctggcctggcagagccttcgccgcgacgtgcagctcatccgctcctggtccctggccacgttccgcaccctgaagccagaggagcagcgccaagccctgcacagcctggagctgcactaccaggccttcctgcgggacagccaggacgcgggcggcttcggacccgaggaccggctgatggctgagcgcgagtacggctcctgcagccaccactaccagcagctgctgcagagcctggaacagggtgcacaggaagagtctcgctgccagcgctgcatctccgagctcaaagacatccggctgcagctggaggcctgtgagacgcgcaccgtgcaccgcctgcggctgccgctggacaaagagccggcacgggagtgtgcccagcgcatcgccgagcagcagaaggcacaggcagaggtggaggggctgggcaagggggtcgcccggctctctgccgaggccgagaaggtcttggccctaccagagccatcgcctgcggcccccacgctgcgctcggagctggagctgacgctgggcaagctggagcaggtccgcagcctgtctgccatctacctggagaagctcaagaccatcagcctggtgatccgcggcacgcagggggccgaggaggtgctcagggcccacgaggagcagctcaaggaggcccaggccgtgccggccaccctcccggagctcgaggccaccaaggcctctctgaagaagctgcgggcccaggccgaggcacagcagcccacgttcgacgccctgcgggatgagctgcggggggcacaggaggtgggggagcgactgcagcagcggcacggggagcgggacgtggaggtggagcgctggcgggagcgggtcgcccagttgcttgagcgctggcaggctgtgctggcccagaccgacgtgcggcagcgcgagctcgagcaactgggccgccagctgcgttactaccgcgagagtgcagaccccttgggcgcctggctgcaggacgccaggcggcggcaggagcagatccaggccatgccgctggccgacagccaggctgtgcgggagcagctgcggcaggagcaggccctgctggaggagatcgagcgccacggcgagaaggtcgaggagtgccagaggtttgcgaaacagtacatcaacgccatcaaggactatgaactccagctggtgacgtacaaggcgcagcttgagccggtggcctccccggccaagaagcccaaggtccagtcgggatcagagagtgtcatccaggagtacgtggacctgcgtacgcactacagcgagctgaccacactgacgagccagtacatcaagttcatcagcgagactctgcggcgcatggaggaggaggagaggctggctgagcagcagcgggcagaggagcgcgagcggctggccgaggtggaggccgcgctggagaagcagcggcagctggccgaggcgcacgcccaggcaaaggcacaggcggagcgggaggcgaaggagctgcagcagcgcatgcaggaggaggtggtgcggcgggaggaggcggcggtggacgcgcagcagcagaagcgcagcattcaggaggagctgcagcagctgcggcagagctcggaggcggagatccaggccaaggcccggcaggcagaggcggctgagcgcagccggctgcgcatcgaggaggagatccgcgtggtgcgcctgcagttggaggccaccgagcgccagcgtggcggggctgagggggagctgcaggcactgcgtgcacgggcggaggaggctgaggcacaaaagcgacaggcgcaggaggaggccgagcgcttgcggaggcaggtgcaggacgagagccagcgtaagcggcaggcggaggtggagctggcctcgcgcgtgaaggccgaggccgaggcggcgcgcgagaagcagcgggccctgcaggccctggaggagctgcggctgcaggcggaggaggcggagcggcgcctgcggcaggccgaggtggagcgagcgcggcaggtacaggtggccctggagacggcgcagcgcagtgcagaggcggagctgcagagcaaacgcgcctccttcgccgagaagacggcacagctggagcgctccctgcaggaggaacacgtggctgtggcacagctgcgggaggaggctgagcggcgggcacagcagcaggccgaggccgagcgggcgcgcgaggaggcagagcgggagctggagcgctggcagctcaaggccaacgaggcgctacggctgcggctgcaggcggaggaggtggcgcagcagaagagcctggcgcaggccgaggctgagaagcagaaggaggaggcggagcgcgaggcgcggcggcgcggcaaggcggaggagcaggccgtccggcagcgggagctggctgaacaagagctggagaagcagcggcagctggcggaaggcaccgcgcagcagcgcctggccgcggagcaggagttgatccggctgcgggccgagacggagcagggggagcagcagcggcagctgctggaggaggagctggcccggctgcagcgtgaggcggctgcagccacgcagaaacggcaggagctggaagccgagctggccaaggtgcgggccgagatggaggtgctgctggccagcaaggcgagggctgaggaggagtcgcgctccaccagcgagaagtccaagcagaggctggaggccgaggccggccggttccgcgagctggccgaggaggccgcccgcctgcgtgccctggcggaagaggccaagcggcagcggcagctggccgaggaagacgcggcgcggcagcgggccgaggcggagcgggtgcttgcggagaagctggccgccatcggcgaggccacgcggctcaagacggaggcggagatcgcgctcaaggagaaggaggcggagaacgagcgcctgcggcggctggcggaggacgaggccttccagcggcggcggctggaggagcaggccgcgcaacacaaggctgacatcgaggagcgcctggcccagctgcgcaaggcatcggacagcgagctggagcggcagaaggggctggtggaggacacgctgaggcagcggcggcaggtggaggaggagatcctggcgctgaaggcgagcttcgagaaggcggccgctggcaaggcggagctggagctggagctgggacgcatccgcagcaacgcggaggacacgctgcgcagcaaggagcaggccgagctggaggctgcgaggcagcggcagctggcggcggaggaggagcggcggcgccgtgaggctgaggagcgcgtgcagaagagcctggcggccgaggaggaggccgcacggcagcggaaggcggcgctggaggaagtcgagcggctgaaagccaaggtggaggaggcgcggcgcctgcgggagcgagcggagcaggagtcggcgcggcagctgcagctggcccaggaggccgcccagaagcggctgcaggcggaagagaaggcacacgccttcgcggtgcagcagaaggagcaggagctacagcagacgctgcagcaggagcagagcgtgctggaccagctgcgcggcgaggcggaggcggcccggcgggcggctgaggaggcggaggaggcccgggtgcaggcggagcgtgaggcggcgcagtcccggcggcaggtggaagaggccgagcggctgaagcagtcggcagaggagcaggcacaggcccgggctcaggcacaggcggctgcagagaagctgcgcaaggaggccgagcaagaggcggcgcggcgggcacaggcggagcaggcggccctgcggcagaagcaggcagctgacgcggagatggagaagcataagaaattcgccgagcagacgctgcggcagaaggcgcaggtggagcaggagctgacaacactgcggctgcagctggaggagaccgaccaccagaagaacctgctggacgaggagctgcagcggctgaaggcggaggccacggaggccgcacgccagcgcagccaggtggaggaggagctcttctcggtgcgcgtgcagatggaggagctgagcaagctcaaggcacgcatcgaggctgagaaccgcgcactcatcttgcgtgacaaggacaatacgcagcgcttcctgcaggaggaggctgagaagatgaagcaggtggcggaggaggccgcgcggctgagtgtggcggcccaagaggctgcgcgactgcggcagctggcagaggaggacctggcacagcagcgggccttggcagagaagatgctcaaggagaagatgcaggcggtgcaggaggccacgcgactcaaggctgaggcggaactgctgcagcagcagaaggagcttgcgcaggagcaggcgcggcggctgcaggaggacaaggagcagatggcgcagcagctggcggaggagacgcagggcttccagcggacgctggaggccgagcggcagcggcagctggagatgagcgctgaggctgagcgcctcaagctgcgtgtggccgagatgagccgagcccaggcccgcgctgaggaggacgcccagcgcttccggaagcaggcggaggagatcggtgagaagctgcaccgcacggagctcgccacccaggagaaggtgaccctggtgcagacactggagatccagcgacagcagagtgaccatgatgccgagcgcctgcgggaggccatcgctgagctggagcgtgagaaggagaagctccaacaggaggccaaactgctgcagctcaagtctgaggagatgcagacggtgcagcaggagcagctgctgcaggagacgcaggccctgcagcaaagcttcctctctgaaaaggacagcctgctacagcgggagcgcttcatcgagcaggagaaggccaagctggagcagctcttccaggacgaggtggccaaggcacagcagctgcgtgaggagcagcagcggcagcagcagcagatggagcaggaacggcagcggctggtggccagcatggaggaggcgcggcggcggcagcatgaggccgaggagggcgtgcggcgcaagcaggaggagctgcagcagctggagcagcagcggcggcagcaggaggagctgctggctgaggagaaccagaggctgcgtgagcagctgcagctcctggaggagcagcaccgggccgcgctggcgcactcagaggaggtcactgcctcgcaggtggctgccacaaagaccctgcccaatggccgggatgcacttgatggccccgcggcagaggcagagccggagcacagcttcgatggcctgcggcggaaggtgtcagctcagaggctgcaggaggccggcatcctgagtgcggaggagctgcagcggttggcgcagggccacaccacggtggacgagctcgcacggcgggaagacgtgcgccactacctgcagggccgcagcagtatcgcagggctgttgctgaaggccaccaatgagaagctgagtgtttacgccgccctgcagaggcagctgctgagtcccggcacggccctcatcctgctggaggcgcaggcggcctcaggcttcctgctggaccctgtgcggaaccggcggctgaccgtcaacgaggctgtgaaggagggtgtggtgggccccgagctgcaccacaagctgctgtcggccgagcgcgccgtcactggctacaaggacccctacactggccagcagatctctctcttccaagccatgcagaagggcctcatcgtccgggagcacggcatccgcctgctggaggcccagatcgccacgggcggcgttatcgaccccgtgcacagccaccgcgtgcccgtggacgtggcctaccggcgcggctacttcgacgaggagatgaaccgcgtcctggcggaccccagcgacgacaccaagggcttctttgaccccaacacgcacgagaacctcacgtacctgcagctactggagcgctgcgtggaggaccccgagacgggcctgtgccttctgccactcacggataaggctgccaagggcggggagctggtctacactgactccgaggcccgggacgtctttgagaaggccaccgtgtctgcgccgttcggcaagttccagggcaagacggtgaccatttgggagatcatcaactcggaatacttcacggcagagcagcggcgggacctgctgcggcagttccgcacgggccggatcacagtggagaagatcatcaagatcatcatcacggtggtggaggagcaggagcagaagggccggctttgctttgagggcctgcgcagcctggtgccagccgccgagctgctggagagcagggtcatcgaccgcgagctctaccagcagctgcagcgaggtgagcgctctgtgcgagacgtagccgaggtggacactgtgcggcgggctctccggggtgccaacgtcatcgcgggtgtatggctggaggaggcggggcagaagctgagtatctacaatgccctgaagaaagacctgctgccatccgacatggccgtggccctgttggaagcccaggccggcaccgggcacatcatcgaccccgccaccagcgcccggctgaccgtggacgaggcagtgcgtgctggcctggtgggccccgagtttcatgagaagctgctatcagccgagaaggctgtgacagggtacagggacccctacacagggcagagcgtctccctgttccaggccctgaagaagggcctcattccccgggagcagggcctgcgcctgttggacgcccagctgtccacgggcggcatcgtggaccccagcaagagccaccgcgtgcccctggatgtcgcctgcgcccgaggctgcctggatgaggagaccagcagggccctgtcggcaccaagggccgacgccaaggcctacagtgaccccagcacaggggagccggccacctacggcgagctccagcagcggtgccggcccgaccagctgaccgggctgagcctgctgccgctctcagaaaaggctgctcgggcccggcaggaggagctctactcagagctgcaggcccgtgagacctttgaaaagaccccggttgaggtccccgtgggtggcttcaagggcaggacggtgacggtgtgggagctcatcagctctgagtacttcactgcggagcagcggcaggagctgttgcgtcagttccgcacgggcaaggtcaccgtggagaaggtcatcaagattctcattaccatcgtggaggaggtggagaccctgcggcaggagaggctgtccttcagcggcctccgtgcccctgtgccagccagcgagctcctggcttccggggtcctcagcagagcccagtttgagcagctcaaggacggcaagacgacggtcaaggacctttcggagctgggctccgtgcggacgctgctgcagggcagtggctgcctcgccggcatctacctggaggacaccaaggagaaggtgtccatctacgaggccatgcgccggggcctgctgagagccacaacggctgcgctcctgctggaggcgcaggcggccactggcttcctggtggaccccgtgcggaaccagcgcctgtatgtccacgaggccgtgaaggcgggcgtggtgggccccgagcttcacgagcagctgctgtctgccgagaaggccgtcaccggctacagagacccctactcgggcagcaccatctccctcttccaggccatgcagaagggcctggttctccggcagcacggcatccgcctgctggaggcccagatcgccacgggcggcatcatcgaccccgtgcacagccaccgcgtgcctgtggacgtggcctaccagcgcggctacttcagtgaggagatgaaccgcgtcctggcggaccccagcgacgacaccaagggcttctttgaccccaacacgcatgagaacctcacgtacaggcagctgctggagcggtgcgtggaggaccccgagacgggcttgcgccttctgccactgaaaggggcggagaaggctgaggtggtggagaccacgcaggtgtacactgaggaggagacaagaagggcatttgaagagacacagatcgacattcccggcggcggcagccacggcggctccaccatgtccctgtgggaggtgatgcagtcggacctgatccccgaggagcagcgggcccagctgatggctgacttccaggccggccgggtgaccaaggaacgcatgatcatcatcatcatcgagatcattgagaagacagagatcatccgccagcagggtctggcctcctacgactacgtgcgccgccgcctcacggctgaggacctgttcgaggctcggatcatctctctcgagacctacaacctgctccgggagggcaccaggagcctccgtgaggctctcgaggcggagtccgcctggtgctacctctatggcacgggctccgtggctggtgtctacctgcccggttccaggcagacactgagcatctaccaggctctcaagaaagggctgctgagtgccgaggtggcccgcctgctgctggaggcacaggcagccacaggcttcctgctggacccggtgaagggggagcggctgactgtggatgaggctgtgcggaagggcctcgtggggcccgagctgcacgaccgcctgctctcggctgagcgggcggtcaccggctaccgtgacccctacaccgagcagaccatctcgctcttccaggccatgaagaaggagctgatccctactgaggaggccctgcggctgctggatgcccagctggccaccggcggcatcgtggacccccgcctgggcttccaccttcccctggaggtggcttaccagcgtggctacctcaacaaggacacgcacgaccagctgtcagagcccagcgaggtgcgcagctacgtggacccgtccaccgacgagcgcctcagctacacgcagctgctcaggcggtgccgtcgtgacgacggcaccggccagctgctcctgccactgtcggacgcccgcaagctgaccttccgtggcctgcggaagcagatcaccatggaggagctggtgcgctcgcaggtcatggacgaggccacggcgctgcagctgcgggagggcctgacctccatcgaggaggtcaccaagaacttgcagaagttcctggaaggcaccagctgcatcgctggtgtcttcgtggacgccaccaaggaacggctctcggtgtaccaggccatgaagaagggcatcatccgccccggcacagcctttgagctcctggaggcgcaggcggccaccggttacgtcatcgaccccatcaagggactgaagctgacggtggaggaggctgtgcgtatgggcattgtgggccccgagttcaaggacaagctgctgtcggccgagcgcgccgtcactgggtacaaggacccctactctgggaagctcatctccctcttccaggccatgaagaagggcctgatcctgaaggaccatggcatccgcctgctggaggcccagatcgccacgggcggcatcatcgaccctgaggagagccaccggctgcccgtggaggtggcctacaagcgcggcctcttcgatgaggagatgaacgagatcctgaccgacccctcggacgacaccaagggcttctttgaccctaacacggaggagaacctcacctacctgcagctgatggagcgttgtatcactgacccccagacgggcctgtgtctcttgccgctgaaggagaagaagcgggagcggaagacgtcctccaagtcctccgtgcgcaagcgccgagtggtcatcgtggaccccgagacgggcaaggagatgtcagtgtacgaggcctaccgcaagggcctgattgaccaccagacgtacctggagctgtccgagcaggagtgcgagtgggaggagatcaccatctcctcctcggacggcgtggtcaagtccatgatcatcgaccgccgctccgggcgccagtacgacatcgatgatgccatcgccaagaacctcatcgaccgctcggcactggaccagtaccgcgccggcacgctctccatcaccgagttcgccgacatgctctcgggcaacgccggtggtttccgctcccgttcctcctcggtgggatcctcctcctcctaccccatcagccccgccgtctccaggacccagctggcctcctggtcagaccccactgaggagacgggccccgtggctggcatcctggacacggagacgctggagaaggtgtccatcaccgaggccatgcaccggaacctggtggataacatcacggggcagcggctgctggaggcgcaggcctgcaccgggggcatcatcgaccccagcaccggtgagcgcttccctgtcaccgacgccgtcaacaagggcctggtggacaagatcatggtggaccgcatcaacctggcccagaaggccttctgcggcttcgaggacccacgcaccaagaccaagatgtcggccgcccaggccctgaagaagggctggctctactacgaggccggccagcgcttcctggaggtgcagtacctgaccggcggcttgatcgagcccgacacgccgggccgcgtgcccctggacgaggccctgcagcgcggcacggtggacgcccgcaccgcacagaagctgcgtgacgtgggcgcctactccaagtacctcacctgccctaagaccaagctcaagatctcctataaggacgcgctggaccgcagcatggtggaggagggcacggggctgcggctgctggaggctgccgcgcagtccaccaagggctactacagcccctacagcgtcagcggctccggctctaccgctggctcccgcaccggctcgcgcaccggctcccgggccggctcccgccgcggcagctttgacgccaccggctccggcttctccatgaccttctcttcatcctcctactcctcctcgggctacggccgccgctacgcctcggggtcctcggcctccctggggggccctgagtctgccgtggcctgaggctgcctgcgcccaccccgctctgcatgcggcccagcccggctcccaccgaggcgcgggggccgttttcaacgcttaaaggtgtcttcctcccaagtggtgcctaaagtttaaccaaaaagaccagactaatatattaatatatatctgctgtccagacagcctgtatcttgggggacagggctggcccagccctgctggccgcctcaccccctcgggtctcctcactcccttctacctgccactcacacagccaggtgccttggagggtcccaagctgggccccagcccaccctcctgtcttcccagggtagcccgcctgccagtcctagctgcacagggcagctgggcccaaccctgtctgtagagggccctggtgtttctagcactggcctgcacggtgggccttgctggggacggggggccccagtcagcctctctcccagtctacccagagaagccccttccccatgggaagacgaggccctcgggcccagcccccacagtgctgtctgatctgtgctttccagctcaccccccacactcactcctgagacccctggcctccggcgtcagcctccagcctctgttcccctagtaagtgccttccatgtcggcctctaaccccaggccccgaggacccagacccagtggggaggcggacgttccagccggcatggctgggaactgcagacctgtcctcctggtgggtccaggggcccctccagcttgtggagccccacactggggtgccgcctgcccgtctctctcccatggagccccagccccctttgggcccagggacaccagccaggctctgtgctgaccctcctgttgcacccagccctggtctcagcagcgaccacccctgcctccaccctctgagctttgcatgttccactaaccccgggcgggtggcaggtggaggtgtcaggctgctggcgcctctgcaagggcagaacactaacctgaccgtgggcggggccttgcggtatccgcccccaataaaagcaattccaaccttattgatcagctgaagccccgcccctggccggcaagccctgccccggacctccgggctcctcccccggctgcggcgctggcctgggcagtgcggtgcggggctggactctgcctggtggtggcacagccgccctcagccccggcgcagacatggacccctcgcgagccatccagaacgagatcagctccctcaaagatgagcgggatcgtgtgcagaagaaaaccttcaccaagtgggtcaacaagcacctcatcaaggcccagaggcacatcagtgacctgtatgaagacctccgcgatggccacaacctcatctccctgctggaggtcctctcgggggacagcctgccccgggagaaggggaggatgcgtttccacaagctgcagaatgtccagattgccctggactacctccggcaccgccaggtgaagctggtgaacatcaggaatgatgacatcgctgacggcaaccccaagctgacccttggcctcatctggacaatcattctgcacttccagatctcagatatccaggtgagtgggcagtcggaggacatgacggccaaggagaagctgctgctgtggtcgcagcgaatggtggaggggtaccagggcctgcgatgcgacaacttcacctccagctggagagacggccgcctcttcaatgccatcatccaccggcacaagcccctgctcatcgacatgaacaaggtgtaccggcagaccaacctggagaacctggaccaggccttctctgtggcggagcgggacctgggagtgacgcggctcctggaccctgaggacgtggatgtccctcagcccgacgagaagtccatcatcacctacgtctcgtcgctgtatgacgccatgccccgcgtgccggacgtgcaggatggggtgagggccaacgagctgcagctgcgctggcaggagtaccgggagctggtgctgctgctgcttcagtggatgcgacaccacacggccgcctttgaggaacgcaggttcccctccagcttcgaggagattgagatcctgtggtctcagttcctgaagtttaaggagatggagctaccagccaaggaggccgacaagaacaggtccaagggcatctaccaatccctggagggagcggtgcaagcaggccagctcaaggtgccccctggctaccacccgctggatgtggagaaggagtggggcaagctgcacgtggccatcctggagcgggagaagcagctccgcagcgagtttgagaggctggagtgtcttcagcgcatcgtgaccaagctgcagatggaggcggggctgtgtgaggagcagctgaaccaggccgacgccctgctgcagtcggatgtccggctgctggctgcaggcaaagtgccacagcgggcgggggaggtggaacgggacttggacaaggcggatagcatgatccggctgctcttcaacgacgtgcagaccctcaaggatggacggcacccgcagggcgagcagatgtaccgcagggtgtaccgtctgcacgagcgcctggtagccatccgcaccgagtacaacctacggctgaaggcaggcgtggcggcccctgcaacccaggtggcccaggtgactctgcagagtgtgcagaggcgccccgagctggaggactccactctgcgctacctgcaggacctgctggcctgggtggaggagaaccagcaccgtgtggatggcgctgagtggggtgtggacctgcccagcgtggaggcgcagctgggcagccaccgaggcctgcaccagtccatcgaagaattccgggccaagatcgagcgggcacggagtgacgagggccagctctcccccgccacccggggtgcctaccgtgactgcctgggtcggctggacctgcagtacgccaagctgctgaactcctccaaggcccgcctcaggtccctggagagcttgcacagctttgtggcagccgccactaaggagctaatgtggctgaatgagaaggaggaggaggaggtgggcttcgactggagcgaccgcaacaccaacatgaccgccaagaaggagagctactcggcgctgatgcgggagctggagctgaaggagaagaagatcaaggagctccaaaatgctggggaccggctgctgcgggaggaccacccggcccggcccacggtggagtccttccaggcggccctgcagacgcagtggagctggatgctacagctgtgctgctgtatcgaggcacacctgaaggagaacgctgcctactttcagttcttctcagatgtgcgggaggccgaggggcagttgcagaagctgcaggaggcactgcgtaggaaatacagttgtgatcgctccgccaccgtcacccggctggaggacctgctgcaggatgcccaggacgagaaggaacagctgaacgagtacaagggccacctctcaggcctggccaagcgggccaaggccgtcgtgcagctgaagccccgccacccagcccaccccatgcggggccgcctgcccctgctggccgtgtgcgactataagcaggtggaggtgactgtgcacaagggtgacgagtgccagctggtgggccctgcacagccgtcccactggaaggtgctcagcagctccggcagcgaggccgccgtgccctccgtgtgcttcctggtgcccccgcccaaccaggaggcccaggaggccgtcaccaggctggaggcccagcaccaggccctggtcacgctgtggcaccagttgcacgtggacatgaagagccttctggcctggcagagccttcgccgcgacgtgcagctcatccgctcctggtccctggccacgttccgcaccctgaagccagaggagcagcgccaagccctgcacagcctggagctgcactaccaggccttcctgcgggacagccaggacgcgggcggcttcggacccgaggaccggctgatggctgagcgcgagtacggctcctgcagccaccactaccagcagctgctgcagagcctggaacagggtgcacaggaagagtctcgctgccagcgctgcatctccgagctcaaagacatccggctgcagctggaggcctgtgagacgcgcaccgtgcaccgcctgcggctgccgctggacaaagagccggcacgggagtgtgcccagcgcatcgccgagcagcagaaggcacaggcagaggtggaggggctgggcaagggggtcgcccggctctctgccgaggccgagaaggtcttggccctaccagagccatcgcctgcggcccccacgctgcgctcggagctggagctgacgctgggcaagctggagcaggtccgcagcctgtctgccatctacctggagaagctcaagaccatcagcctggtgatccgcggcacgcagggggccgaggaggtgctcagggcccacgaggagcagctcaaggaggcccaggccgtgccggccaccctcccggagctcgaggccaccaaggcctctctgaagaagctgcgggcccaggccgaggcacagcagcccacgttcgacgccctgcgggatgagctgcggggggcacaggaggtgggggagcgactgcagcagcggcacggggagcgggacgtggaggtggagcgctggcgggagcgggtcgcccagttgcttgagcgctggcaggctgtgctggcccagaccgacgtgcggcagcgcgagctcgagcaactgggccgccagctgcgttactaccgcgagagtgcagaccccttgggcgcctggctgcaggacgccaggcggcggcaggagcagatccaggccatgccgctggccgacagccaggctgtgcgggagcagctgcggcaggagcaggccctgctggaggagatcgagcgccacggcgagaaggtcgaggagtgccagaggtttgcgaaacagtacatcaacgccatcaaggactatgaactccagctggtgacgtacaaggcgcagcttgagccggtggcctccccggccaagaagcccaaggtccagtcgggatcagagagtgtcatccaggagtacgtggacctgcgtacgcactacagcgagctgaccacactgacgagccagtacatcaagttcatcagcgagactctgcggcgcatggaggaggaggagaggctggctgagcagcagcgggcagaggagcgcgagcggctggccgaggtggaggccgcgctggagaagcagcggcagctggccgaggcgcacgcccaggcaaaggcacaggcggagcgggaggcgaaggagctgcagcagcgcatgcaggaggaggtggtgcggcgggaggaggcggcggtggacgcgcagcagcagaagcgcagcattcaggaggagctgcagcagctgcggcagagctcggaggcggagatccaggccaaggcccggcaggcagaggcggctgagcgcagccggctgcgcatcgaggaggagatccgcgtggtgcgcctgcagttggaggccaccgagcgccagcgtggcggggctgagggggagctgcaggcactgcgtgcacgggcggaggaggctgaggcacaaaagcgacaggcgcaggaggaggccgagcgcttgcggaggcaggtgcaggacgagagccagcgtaagcggcaggcggaggtggagctggcctcgcgcgtgaaggccgaggccgaggcggcgcgcgagaagcagcgggccctgcaggccctggaggagctgcggctgcaggcggaggaggcggagcggcgcctgcggcaggccgaggtggagcgagcgcggcaggtacaggtggccctggagacggcgcagcgcagtgcagaggcggagctgcagagcaaacgcgcctccttcgccgagaagacggcacagctggagcgctccctgcaggaggaacacgtggctgtggcacagctgcgggaggaggctgagcggcgggcacagcagcaggccgaggccgagcgggcgcgcgaggaggcagagcgggagctggagcgctggcagctcaaggccaacgaggcgctacggctgcggctgcaggcggaggaggtggcgcagcagaagagcctggcgcaggccgaggctgagaagcagaaggaggaggcggagcgcgaggcgcggcggcgcggcaaggcggaggagcaggccgtccggcagcgggagctggctgaacaagagctggagaagcagcggcagctggcggaaggcaccgcgcagcagcgcctggccgcggagcaggagttgatccggctgcgggccgagacggagcagggggagcagcagcggcagctgctggaggaggagctggcccggctgcagcgtgaggcggctgcagccacgcagaaacggcaggagctggaagccgagctggccaaggtgcgggccgagatggaggtgctgctggccagcaaggcgagggctgaggaggagtcgcgctccaccagcgagaagtccaagcagaggctggaggccgaggccggccggttccgcgagctggccgaggaggccgcccgcctgcgtgccctggcggaagaggccaagcggcagcggcagctggccgaggaagacgcggcgcggcagcgggccgaggcggagcgggtgcttgcggagaagctggccgccatcggcgaggccacgcggctcaagacggaggcggagatcgcgctcaaggagaaggaggcggagaacgagcgcctgcggcggctggcggaggacgaggccttccagcggcggcggctggaggagcaggccgcgcaacacaaggctgacatcgaggagcgcctggcccagctgcgcaaggcatcggacagcgagctggagcggcagaaggggctggtggaggacacgctgaggcagcggcggcaggtggaggaggagatcctggcgctgaaggcgagcttcgagaaggcggccgctggcaaggcggagctggagctggagctgggacgcatccgcagcaacgcggaggacacgctgcgcagcaaggagcaggccgagctggaggctgcgaggcagcggcagctggcggcggaggaggagcggcggcgccgtgaggctgaggagcgcgtgcagaagagcctggcggccgaggaggaggccgcacggcagcggaaggcggcgctggaggaagtcgagcggctgaaagccaaggtggaggaggcgcggcgcctgcgggagcgagcggagcaggagtcggcgcggcagctgcagctggcccaggaggccgcccagaagcggctgcaggcggaagagaaggcacacgccttcgcggtgcagcagaaggagcaggagctacagcagacgctgcagcaggagcagagcgtgctggaccagctgcgcggcgaggcggaggcggcccggcgggcggctgaggaggcggaggaggcccgggtgcaggcggagcgtgaggcggcgcagtcccggcggcaggtggaagaggccgagcggctgaagcagtcggcagaggagcaggcacaggcccgggctcaggc

SEQ ID NO: 682 - DNA, 32765 bp, Homo sapiens
  misc_feature (977)..(977): second gene starts at position 977
atgagcttcaccactcgctccaccttctccaccaactaccggtccctgggctctgtccaggcgcccagctacggcgcccggccggtcagcagcgcggccagcgtctatgcaggcgctgggggctctggttcccggatctccgtgtcccgctccaccagcttcaggggcggcatggggtccgggggcctggccaccgggatagccgggggtctggcaggaatgggaggcatccagaacgagaaggagaccatgcaaagcctgaacgaccgcctggcctcttacctggacagagtgaggagcctggagaccgagaaccggaggctggagagcaaaatccgggagcacttggagaagaagggaccccaggtcagagactggagccattacttcaagatcatcgaggacctgagggctcagatcttcgcaaatactgtggacaatgcccgcatcgttctgcagattgacaatgcccgtcttgctgctgatgactttagagtcaagtatgagacagagctggccatgcgccagtctgtggagaacgacatccatgggctccgcaaggtcattgatgacaccaatatcacacgactgcagctggagacagagatcgaggctctcaaggaggagctgctcttcatgaagaagaaccacgaagaggaagtaaaaggcctacaagcccagattgccagctctgggttgaccgtggaggtagatgcccccaaatctcaggacctcgccaagatcatggcagacatccgggcccaatatgacgagctggctcggaagaaccgagaggagctagacaagtactggtctcagcagattgaggagagcaccacagtggtcaccacacagtctgctgaggttggagctgctgagacgacgctcacagagctgagacgtacagtccagtccttggagatcgacctggactccatgagaaatctgaaggccagcttggagaacagcctgagggtggagaagcagcggcagctggccgaggcgcacgcccaggcaaaggcacaggcggagcgggaggcgaaggagctgcagcagcgcatgcaggaggaggtggtgcggcgggaggaggcggcggtggacgcgcagcagcagaagcgcagcattcaggaggagctgcagcagctgcggcagagctcggaggcggagatccaggccaaggcccggcaggcagaggcggctgagcgcagccggctgcgcatcgaggaggagatccgcgtggtgcgcctgcagttggaggccaccgagcgccagcgtggcggggctgagggggagctgcaggcactgcgtgcacgggcggaggaggctgaggcacaaaagcgacaggcgcaggaggaggccgagcgcttgcggaggcaggtgcaggacgagagccagcgtaagcggcaggcggaggtggagctggcctcgcgcgtgaaggccgaggccgaggcggcgcgcgagaagcagcgggccctgcaggccctggaggagctgcggctgcaggcggaggaggcggagcggcgcctgcggcaggccgaggtggagcgagcgcggcaggtacaggtggccctggagacggcgcagcgcagtgcagaggcggagctgcagagcaaacgcgcctccttcgccgagaagacggcacagctggagcgctccctgcaggaggaacacgtggctgtggcacagctgcgggaggaggctgagcggcgggcacagcagcaggccgaggccgagcgggcgcgcgaggaggcagagcgggagctggagcgctggcagctcaaggccaacgaggcgctacggctgcggctgcaggcggaggaggtggcgcagcagaagagcctggcgcaggccgaggctgagaagcagaaggaggaggcggagcgcgaggcgcggcggcgcggcaaggcggaggagcaggccgtccggcagcgggagctggctgaacaagagctggagaagcagcggcagctggcggaaggcaccgcgcagcagcgcctggccgcggagcaggagttgatccggctgcgggccgagacggagcagggggagcagcagcggcagctgctggaggaggagctggcccggctgcagcgtgaggcggctgcagccacgcagaaacggcaggagctggaagccgagctggccaaggtgcgggccgagatggaggtgctgctggccagcaaggcgagggctgaggaggagtcgcgctccaccagcgagaagtccaagcagaggctggaggccgaggccggccggttccgcgagctggccgaggaggccgcccgcctgcgtgccctggcggaagaggccaagcggcagcggcagctggccgaggaagacgcggcgcggcagcgggccgaggcggagcgggtgcttgcggagaagctggccgccatcggcgaggccacgcggctcaagacggaggcggagatcgcgctcaaggagaaggaggcggagaacgagcgcctgcggcggctggcggaggacgaggccttccagcggcggcggctggaggagcaggccgcgcaacacaaggctgacatcgaggagcgcctggcccagctgcgcaaggcatcggacagcgagctggagcggcagaaggggctggtggaggacacgctgaggcagcggcggcaggtggaggaggagatcctggcgctgaaggcgagcttcgagaaggcggccgctggcaaggcggagctggagctggagctgggacgcatccgcagcaacgcggaggacacgctgcgcagcaaggagcaggccgagctggaggctgcgaggcagcggcagctggcggcggaggaggagcggcggcgccgtgaggctgaggagcgcgtgcagaagagcctggcggccgaggaggaggccgcacggcagcggaaggcggcgctggaggaagtcgagcggctgaaagccaaggtggaggaggcgcggcgcctgcgggagcgagcggagcaggagtcggcgcggcagctgcagctggcccaggaggccgcccagaagcggctgcaggcggaagagaaggcacacgccttcgcggtgcagcagaaggagcaggagctacagcagacgctgcagcaggagcagagcgtgctggaccagctgcgcggcgaggcggaggcggcccggcgggcggctgaggaggcggaggaggcccgggtgcaggcggagcgtgaggcggcgcagtcccggcggcaggtggaagaggccgagcggctgaagcagtcggcagaggagcaggcacaggcccgggctcaggcacaggcggctgcagagaagctgcgcaaggaggccgagcaagaggcggcgcggcgggcacaggcggagcaggcggccctgcggcagaagcaggcagctgacgcggagatggagaagcataagaaattcgccgagcagacgctgcggcagaaggcgcaggtggagcaggagctgacaacactgcggctgcagctggaggagaccgaccaccagaagaacctgctggacgaggagctgcagcggctgaaggcggaggccacggaggccgcacgccagcgcagccaggtggaggaggagctcttctcggtgcgcgtgcagatggaggagctgagcaagctcaaggcacgcatcgaggctgagaaccgcgcactcatcttgcgtgacaaggacaatacgcagcgcttcctgcaggaggaggctgagaagatgaagcaggtggcggaggaggccgcgcggctgagtgtggcggcccaagaggctgcgcgactgcggcagctggcagaggaggacctggcacagcagcgggccttggcagagaagatgctcaaggagaagatgcaggcggtgcaggaggccacgcgactcaaggctgaggcggaactgctgcagcagcagaaggagcttgcgcaggagcaggcgcggcggctgcaggaggacaaggagcagatggcgcagcagctggcggaggagacgcagggcttccagcggacgctggaggccgagcggcagcggcagctggagatgagcgctgaggctgagcgcctcaagctgcgtgtggccgagatgagccgagcccaggcccgcgctgaggaggacgcccagcgcttccggaagcaggcggaggagatcggtgagaagctgcaccgcacggagctcgccacccaggagaaggtgaccctggtgcagacactggagatccagcgacagcagagtgaccatgatgccgagcgcctgcgggaggccatcgctgagctggagcgtgagaaggagaagctccaacaggaggccaaactgctgcagctcaagtctgaggagatgcagacggtgcagcaggagcagctgctgcaggagacgcaggccctgcagcaaagcttcctctctgaaaaggacagcctgctacagcgggagcgcttcatcgagcaggagaaggccaagctggagcagctcttccaggacgaggtggccaaggcacagcagctgcgtgaggagcagcagcggcagcagcagcagatggagcaggaacggcagcggctggtggccagcatggaggaggcgcggcggcggcagcatgaggccgaggagggcgtgcggcgcaagcaggaggagctgcagcagctggagcagcagcggcggcagcaggaggagctgctggctgaggagaaccagaggctgcgtgagcagctgcagctcctggaggagcagcaccgggccgcgctggcgcactcagaggaggtcactgcctcgcaggtggctgccacaaagaccctgcccaatggccgggatgcacttgatggccccgcggcagaggcagagccggagcacagcttcgatggcctgcggcggaaggtgtcagctcagaggctgcaggaggccggcatcctgagtgcggaggagctgcagcggttggcgcagggccacaccacggtggacgagctcgcacggcgggaagacgtgcgccactacctgcagggccgcagcagtatcgcagggctgttgctgaaggccaccaatgagaagctgagtgtttacgccgccctgcagaggcagctgctgagtcccggcacggccctcatcctgctggaggcgcaggcggcctcaggcttcctgctggaccctgtgcggaaccggcggctgaccgtcaacgaggctgtgaaggagggtgtggtgggccccgagctgcaccacaagctgctgtcggccgagcgcgccgtcactggctacaaggacccctacactggccagcagatctctctcttccaagccatgcagaagggcctcatcgtccgggagcacggcatccgcctgctggaggcccagatcgccacgggcggcgttatcgaccccgtgcacagccaccgcgtgcccgtggacgtggcctaccggcgcggctacttcgacgaggagatgaaccgcgtcctggcggaccccagcgacgacaccaagggcttctttgaccccaacacgcacgagaacctcacgtacctgcagctactggagcgctgcgtggaggaccccgagacgggcctgtgccttctgccactcacggataaggctgccaagggcggggagctggtctacactgactccgaggcccgggacgtctttgagaaggccaccgtgtctgcgccgttcggcaagttccagggcaagacggtgaccatttgggagatcatcaactcggaatacttcacggcagagcagcggcgggacctgctgcggcagttccgcacgggccggatcacagtggagaagatcatcaagatcatcatcacggtggtggaggagcaggagcagaagggccggctttgctttgagggcctgcgcagcctggtgccagccgccgagctgctggagagcagggtcatcgaccgcgagctctaccagcagctgcagcgaggtgagcgctctgtgcgagacgtagccgaggtggacactgtgcggcgggctctccggggtgccaacgtcatcgcgggtgtatggctggaggaggcggggcagaagctgagtatctacaatgccctgaagaaagacctgctgccatccgacatggccgtggccctgttggaagcccaggccggcaccgggcacatcatcgaccccgccaccagcgcccggctgaccgtggacgaggcagtgcgtgctggcctggtgggccccgagtttcatgagaagctgctatcagccgagaaggctgtgacagggtacagggacccctacacagggcagagcgtctccctgttccaggccctgaagaagggcctcattccccgggagcagggcctgcgcctgttggacgcccagctgtccacgggcggcatcgtggaccccagcaagagccaccgcgtgcccctggatgtcgcctgcgcccgaggctgcctggatgaggagaccagcagggccctgtcggcaccaagggccgacgccaaggcctacagtgaccccagcacaggggagccggccacctacggcgagctccagcagcggtgccggcccgaccagctgaccgggctgagcctgctgccgctctcagaaaaggctgctcgggcccggcaggaggagctctactcagagctgcaggcccgtgagacctttgaaaagaccccggttgaggtccccgtgggtggcttcaagggcaggacggtgacggtgtgggagctcatcagctctgagtacttcactgcggagcagcggcaggagctgttgcgtcagttccgcacgggcaaggtcaccgtggagaaggtcatcaagattctcattaccatcgtggaggaggtggagaccctgcggcaggagaggctgtccttcagcggcctccgtgcccctgtgccagccagcgagctcctggcttccggggtcctcagcagagcccagtttgagcagctcaaggacggcaagacgacggtcaaggacctttcggagctgggctccgtgcggacgctgctgcagggcagtggctgcctcgccggcatctacctggaggacaccaaggagaaggtgtccatctacgaggccatgcgccggggcctgctgagagccacaacggctgcgctcctgctggaggcgcaggcggccactggcttcctggtggaccccgtgcggaaccagcgcctgtatgtccacgaggccgtgaaggcgggcgtggtgggccccgagcttcacgagcagctgctgtctgccgagaaggccgtcaccggctacagagacccctactcgggcagcaccatctccctcttccaggccatgcagaagggcctggttctccggcagcacggcatccgcctgctggaggcccagatcgccacgggcggcatcatcgaccccgtgcacagccaccgcgtgcctgtggacgtggcctaccagcgcggctacttcagtgaggagatgaaccgcgtcctggcggaccccagcgacgacaccaagggcttctttgaccccaacacgcatgagaacctcacgtacaggcagctgctggagcggtgcgtggaggaccccgagacgggcttgcgccttctgccactgaaaggggcggagaaggctgaggtggtggagaccacgcaggtgtacactgaggaggagacaagaagggcatttgaagagacacagatcgacattcccggcggcggcagccacggcggctccaccatgtccctgtgggaggtgatgcagtcggacctgatccccgaggagcagcgggcccagctgatggctgacttccaggccggccgggtgaccaaggaacgcatgatcatcatcatcatcgagatcattgagaagacagagatcatccgccagcagggtctggcctcctacgactacgtgcgccgccgcctcacggctgaggacctgttcgaggctcggatcatctctctcgagacctacaacctgctccgggagggcaccaggagcctccgtgaggctctcgaggcggagtccgcctggtgctacctctatggcacgggctccgtggctggtgtctacctgcccggttccaggcagacactgagcatctaccaggctctcaagaaagggctgctgagtgccgaggtggcccgcctgctgctggaggcacaggcagccacaggcttcctgctggacccggtgaagggggagcggctgactgtggatgaggctgtgcggaagggcctcgtggggcccgagctgcacgaccgcctgctctcggctgagcgggcggtcaccggctaccgtgacccctacaccgagcagaccatctcgctcttccaggccatgaagaaggagctgatccctactgaggaggccctgcggctgctggatgcccagctggccaccggcggcatcgtggacccccgcctgggcttccaccttcccctggaggtggcttaccagcgtggctacctcaacaaggacacgcacgaccagctgtcagagcccagcgaggtgcgcagctacgtggacccgtccaccgacgagcgcctcagctacacgcagctgctcaggcggtgccgtcgtgacgacggcaccggccagctgctcctgccactgtcggacgcccgcaagctgaccttccgtggcctgcggaagcagatcaccatggaggagctggtgcgctcgcaggtcatggacgaggccacggcgctgcagctgcgggagggcctgacctccatcgaggaggtcaccaagaacttgcagaagttcctggaaggcaccagctgcatcgctggtgtcttcgtggacgccaccaaggaacggctctcggtgtaccaggccatgaagaagggcatcatccgccccggcacagcctttgagctcctggaggcgcaggcggccaccggttacgtcatcgaccccatcaagggactgaagctgacggtggaggaggctgtgcgtatgggcattgtgggccccgagttcaaggacaagctgctgtcggccgagcgcgccgtcactgggtacaaggacccctactctgggaagctcatctccctcttccaggccatgaagaagggcctgatcctgaaggaccatggcatccgcctgctggaggcccagatcgccacgggcggcatcatcgaccctgaggagagccaccggctgcccgtggaggtggcctacaagcgcggcctcttcgatgaggagatgaacgagatcctgaccgacccctcggacgacaccaagggcttctttgaccctaacacggaggagaacctcacctacctgcagctgatggagcgttgtatcactgacccccagacgggcctgtgtctcttgccgctgaaggagaagaagcgggagcggaagacgtcctccaagtcctccgtgcgcaagcgccgagtggtcatcgtggaccccgagacgggcaaggagatgtcagtgtacgaggcctaccgcaagggcctgattgaccaccagacgtacctggagctgtccgagcaggagtgcgagtgggaggagatcaccatctcctcctcggacggcgtggtcaagtccatgatcatcgaccgccgctccgggcgccagtacgacatcgatgatgccatcgccaagaacctcatcgaccgctcggcactggaccagtaccgcgccggcacgctctccatcaccgagttcgccgacatgctctcgggcaacgccggtggtttccgctcccgttcctcctcggtgggatcctcctcctcctaccccatcagccccgccgtctccaggacccagctggcctcctggtcagaccccactgaggagacgggccccgtggctggcatcctggacacggagacgctggagaaggtgtccatcaccgaggccatgcaccggaacctggtggataacatcacggggcagcggctgctggaggcgcaggcctgcaccgggggcatcatcgaccccagcaccggtgagcgcttccctgtcaccgacgccgtcaacaagggcctggtggacaagatcatggtggaccgcatcaacctggcccagaaggccttctgcggcttcgaggacccacgcaccaagaccaagatgtcggccgcccaggccctgaagaagggctggctctactacgaggccggccagcgcttcctggaggtgcagtacctgaccggcggcttgatcgagcccgacacgccgggccgcgtgcccctggacgaggccctgcagcgcggcacggtggacgcccgcaccgcacagaagctgcgtgacgtgggcgcctactccaagtacctcacctgccctaagaccaagctcaagatctcctataaggacgcgctggaccgcagcatggtggaggagggcacggggctgcggctgctggaggctgccgcgcagtccaccaagggctactacagcccctacagcgtcagcggctccggctctaccgctggctcccgcaccggctcgcgcaccggctcccgggccggctcccgccgcggcagctttgacgccaccggctccggcttctccatgaccttctcttcatcctcctactcctcctcgggctacggccgccgctacgcctcggggtcctcggcctccctggggggccctgagtctgccgtggcctgaggctgcctgcgcccaccccgctctgcatgcggcccagcccggctcccaccgaggcgcgggggccgttttcaacgcttaaaggtgtcttcctcccaagtggtgcctaaagtttaaccaaaaagaccagactaatatattaatatatatctgctgtccagacagcctgtatcttgggggacagggctggcccagccctgctggccgcctcaccccctcgggtctcctcactcccttctacctgccactcacacagccaggtgccttggagggtcccaagctgggccccagcccaccctcctgtcttcccagggtagcccgcctgccagtcctagctgcacagggcagctgggcccaaccctgtctgtagagggccctggtgtttctagcactggcctgcacggtgggccttgctggggacggggggccccagtcagcctctctcccagtctacccagagaagccccttccccatgggaagacgaggccctcgggcccagcccccacagtgctgtctgatctgtgctttccagctcaccccccacactcactcctgagacccctggcctccggcgtcagcctccagcctctgttcccctagtaagtgccttccatgtcggcctctaaccccaggccccgaggacccagacccagtggggaggcggacgttccagccggcatggctgggaactgcagacctgtcctcctggtgggtccaggggcccctccagcttgtggagccccacactggggtgccgcctgcccgtctctctcccatggagccccagccccctttgggcccagggacaccagccaggctctgtgctgaccctcctgttgcacccagccctggtctcagcagcgaccacccctgcctccaccctctgagctttgcatgttccactaaccccgggcgggtggcaggtggaggtgtcaggctgctggcgcctctgcaagggcagaacactaacctgaccgtgggcggggccttgcggtatccgcccccaataaaagcaattccaaccttgtggccggcatgtcgggggcggggggcgcctttgcctcgccgagggaggtcttgctggagcggccgtgctggctggacgggggctgcgagccggcccgcaggggctacctctaccagcagctgtgctgcgtagatgagcgggatcgtgtgcagaagaaaaccttcaccaagtgggtcaacaagcacctcatcaaggcccagaggcacatcagtgacctgtatgaagacctccgcgatggccacaacctcatctccctgctggaggtcctctcgggggacagcctgccccgggagaaggggaggatgcgtttccacaagctgcagaatgtccagattgccctggactacctccggcaccgccaggtgaagctggtgaacatcaggaatgatgacatcgctgacggcaaccccaagctgacccttggcctcatctggacaatcattctgcacttccagatctcagatatccaggtgagtgggcagtcggaggacatgacggccaaggagaagctgctgctgtggtcgcagcgaatggtggaggggtaccagggcctgcgatgcgacaacttcacctccagctggagagacggccgcctcttcaatgccatcatccaccggcacaagcccctgctcatcgacatgaacaaggtgtaccggcagaccaacctggagaacctggaccaggccttctctgtggcggagcgggacctgggagtgacgcggctcctggaccctgaggacgtggatgtccctcagcccgacgagaagtccatcatcacctacgtctcgtcgctgtatgacgccatgccccgcgtgccggacgtgcaggatggggtgagggccaacgagctgcagctgcgctggcaggagtaccgggagctggtgctgctgctgcttcagtggatgcgacaccacacggccgcctttgaggaacgcaggttcccctccagcttcgaggagattgagatcctgtggtctcagttcctgaagtttaaggagatggagctaccagccaaggaggccgacaagaacaggtccaagggcatctaccaatccctggagggagcggtgcaagcaggccagctcaaggtgccccctggctaccacccgctggatgtggagaaggagtggggcaagctgcacgtggccatcctggagcgggagaagcagctccgcagcgagtttgagaggctggagtgtcttcagcgcatcgtgaccaagctgcagatggaggcggggctgtgtgaggagcagctgaaccaggccgacgccctgctgcagtcggatgtccggctgctggctgcaggcaaagtgccacagcgggcgggggaggtggaacgggacttggacaaggcggatagcatgatccggctgctcttcaacgacgtgcagaccctcaaggatggacggcacccgcagggcgagcagatgtaccgcagggtgtaccgtctgcacgagcgcctggtagccatccgcaccgagtacaacctacggctgaaggcaggcgtggcggcccctgcaacccaggtggcccaggtgactctgcagagtgtgcagaggcgccccgagctggaggactccactctgcgctacctgcaggacctgctggcctgggtggaggagaaccagcaccgtgtggatggcgctgagtggggtgtggacctgcccagcgtggaggcgcagctgggcagccaccgaggcctgcaccagtccatcgaagaattccgggccaagatcgagcgggcacggagtgacgagggccagctctcccccgccacccggggtgcctaccgtgactgcctgggtcggctggacctgcagtacgccaagctgctgaactcctccaaggcccgcctcaggtccctggagagcttgcacagctttgtggcagccgccactaaggagctaatgtggctgaatgagaaggaggaggaggaggtgggcttcgactggagcgaccgcaacaccaacatgaccgccaagaaggagagctactcggcgctgatgcgggagctggagctgaaggagaagaagatcaaggagctccaaaatgctggggaccggctgctgcgggaggaccacccggcccggcccacggtggagtccttccaggcggccctgcagacgcagtggagctggatgctacagctgtgctgctgtatcgaggcacacctgaaggagaacgctgcctactttcagttcttctcagatgtgcgggaggccgaggggcagttgcagaagctgcaggaggcactgcgtaggaaatacagttgtgatcgctccgccaccgtcacccggctggaggacctgctgcaggatgcccaggacgagaaggaacagctgaacgagtacaagggccacctctcaggcctggccaagcgggccaaggccgtcgtgcagctgaagccccgccacccagcccaccccatgcggggccgcctgcccctgctggccgtgtgcgactataagcaggtggaggtgactgtgcacaagggtgacgagtgccagctggtgggccctgcacagccgtcccactggaaggtgctcagcagctccggcagcgaggccgccgtgccctccgtgtgcttcctggtgcccccgcccaaccaggaggcccaggaggccgtcaccaggctggaggcccagcaccaggccctggtcacgctgtggcaccagttgcacgtggacatgaagagccttctggcctggcagagccttcgccgcgacgtgcagctcatccgctcctggtccctggccacgttccgcaccctgaagccagaggagcagcgccaagccctgcacagcctggagctgcactaccaggccttcctgcgggacagccaggacgcgggcggcttcggacccgaggaccggctgatggctgagcgcgagtacggctcctgcagccaccactaccagcagctgctgcagagcctggaacagggtgcacaggaagagtctcgctgccagcgctgcatctccgagctcaaagacatccggctgcagctggaggcctgtgagacgcgcaccgtgcaccgcctgcggctgccgctggacaaagagccggcacgggagtgtgcccagcgcatcgccgagcagcagaaggcacaggcagaggtggaggggctgggcaagggggtcgcccggctctctgccgaggccgagaaggtcttggccctaccagagccatcgcctgcggcccccacgctgcgctcggagctggagctgacgctgggcaagctggagcaggtccgcagcctgtctgccatctacctggagaagctcaagaccatcagcctggtgatccgcggcacgcagggggccgaggaggtgctcagggcccacgaggagcagctcaaggaggcccaggccgtgccggccaccctcccggagctcgaggccaccaaggcctctctgaagaagctgcgggcccaggccgaggcacagcagcccacgttcgacgccctgcgggatgagctgcggggggcacaggaggtgggggagcgactgcagcagcggcacggggagcgggacgtggaggtggagcgctggcgggagcgggtcgcccagttgcttgagcgctggcaggctgtgctggcccagaccgacgtgcggcagcgcgagctcgagcaactgggccgccagctgcgttactaccgcgagagtgcagaccccttgggcgcctggctgcaggacgccaggcggcggcaggagcagatccaggccatgccgctggccgacagccaggctgtgcgggagcagctgcggcaggagcaggccctgctggaggagatcgagcgccacggcgagaaggtcgaggagtgccagaggtttgcgaaacagtacatcaacgccatcaaggactatgaactccagctggtgacgtacaaggcgcagcttgagccggtggcctccccggccaagaagcccaaggtccagtcgggatcagagagtgtcatccaggagtacgtggacctgcgtacgcactacagcgagctgaccacactgacgagccagtacatcaagttcatcagcgagactctgcggcgcatggaggaggaggagaggctggctgagcagcagcgggcagaggagcgcgagcggctggccgaggtggaggccgcgctggagaagcagcggcagctggccgaggcgcacgcccaggcaaaggcacaggcggagcgggaggcgaaggagctgcagcagcgcatgcaggaggaggtggtgcggcgggaggaggcggcggtggacgcgcagcagcagaagcgcagcattcaggaggagctgcagcagctgcggcagagctcggaggcggagatccaggccaaggcccggcaggcagaggcggctgagcgcagccggctgcgcatcgaggaggagatccgcgtggtgcgcctgcagttggaggccaccgagcgccagcgtggcggggctgagggggagctgcaggcactgcgtgcacgggcggaggaggctgaggcacaaaagcgacaggcgcaggaggaggccgagcgcttgcggaggcaggtgcaggacgagagccagcgtaagcggcaggcggaggtggagctggcctcgcgcgtgaaggccgaggccgaggcggcgcgcgagaagcagcgggccctgcaggccctggaggagctgcggctgcaggcggaggaggcggagcggcgcctgcggcaggccgaggtggagcgagcgcggcaggtacaggtggccctggagacggcgcagcgcagtgcagaggcggagctgcagagcaaacgcgcctccttcgccgagaagacggcacagctggagcgctccctgcaggaggaacacgtggctgtggcacagctgcgggaggaggctgagcggcgggcacagcagcaggccgaggccgagcgggcgcgcgaggaggcagagcgggagctggagcgctggcagctcaaggccaacgaggcgctacggctgcggctgcaggcggaggaggtggcgcagcagaagagcctggcgcaggccgaggctgagaagcagaaggaggaggcggagcgcgaggcgcggcggcgcggcaaggcggaggagcaggccgtccggcagcgggagctggctgaacaagagctggagaagcagcggcagctggcggaaggcaccgcgcagcagcgcctggccgcggagcaggagttgatccggctgcgggccgagacggagcagggggagcagcagcggcagctgctggaggaggagctggcccggctgcagcgtgaggcggctgcagccacgcagaaacggcaggagctggaagccgagctggccaaggtgcgggccgagatggaggtgctgctggccagcaaggcgagggctgaggaggagtcgcgctccaccagcgagaagtccaagcagaggctggaggccgaggccggccggttccgcgagctggccgaggaggccgcccgcctgcgtgccctggcggaagaggccaagcggcagcggcagctggccgaggaagacgcggcgcggcagcgggccgaggcggagcgggtgcttgcggagaagctggccgccatcggcgaggccacgcggctcaagacggaggcggagatcgcgctcaaggagaaggaggcggagaacgagcgcctgcggcggctggcggaggacgaggccttccagcggcggcggctggaggagcaggccgcgcaacacaaggctgacatcgaggagcgcctggcccagctgcgcaaggcatcggacagcgagctggagcggcagaaggggctggtggaggacacgctgaggcagcggcggcaggtggaggaggagatcctggcgctgaaggcgagcttcgagaaggcggccgctggcaaggcggagctggagctggagctgggacgcatccgcagcaacgcggaggacacgctgcgcagcaaggagcaggccgagctggaggctgcgaggcagcggcagctggcggcggaggaggagcggcggcgccgtgaggctgaggagcgcgtgcagaagagcctggcggccgaggaggaggccgcacggcagcggaaggcggcgctggaggaagtcgagcggctgaaagccaaggtggaggaggcgcggcgcctgcgggagcgagcggagcaggagtcggcgcggcagctgcagctggcccaggaggccgcccagaagcggctgcaggcggaagagaaggcacacgccttcgcggtgcagcagaaggagcaggagctacagcagacgctgcagcaggagcagagcgtgctggaccagctgcgcggcgaggcggaggcggcccggcgggcggctgaggaggcggaggaggcccgggtgcaggcggagcgtgaggcggcgcagtcccggcggcaggtggaagaggccgagcggctgaagcagtcggcagaggagcaggcacaggcccgggctcaggcacaggcggctgcagagaagctgcgcaaggaggccgagcaagaggcggcgcggcgggcacaggcggagcaggcggccctgcggcagaagcaggcagctgacgcggagatggagaagcataagaaattcgccgagcagacgctgcggcagaaggcgcaggtggagcaggagctgacaacactgcggctgcagctggaggagaccgaccaccagaagaacctgctggacgaggagctgcagcggctgaaggcggaggccacggaggccgcacgccagcgcagccaggtggaggaggagctcttctcggtgcgcgtgcagatggaggagctgagcaagctcaaggcacgcatcgaggctgagaaccgcgcactcatcttgcgtgacaaggacaatacgcagcgcttcctgcaggaggaggctgagaagatgaagcaggtggcggaggaggccgcgcggctgagtgtggcggcccaagaggctgcgcgactgcggcagctggcagaggaggacctggcacagcagcgggccttggcagagaagatgctcaaggagaagatgcaggcggtgcaggaggccacgcgactcaaggctgaggcggaactgctgcagcagcagaaggagcttgcgcaggagcaggcgcggcggctgcaggaggacaaggagcagatggcgcagcagctggcggaggagacgcagggcttccagcggacgctggaggccgagcggcagcggcagctggagatgagcgctgaggctgagcgcctcaagctgcgtgtggccgagatgagccgagcccaggcccgcgctgaggaggacgcccagcgcttccggaagcaggcggaggagatcggtgagaagctgcaccgcacggagctcgccacccaggagaaggtgaccctggtgcagacactggagatccagcgacagcagagtgaccatgatgccgagcgcctgcgggaggccatcgctgagctggagcgtgagaaggagaagctccaacaggaggccaaactgctgcagctcaagtctgaggagatgcagacggtgcagcaggagcagctgctgcaggagacgcaggccctgcagcaaagcttcctctctgaaaaggacagcctgctacagcgggagcgcttcatcgagcaggagaaggccaagctggagcagctcttccaggacgaggtggccaaggcacagcagctgcgtgaggagcagcagcggcagcagcagcagatggagcaggaacggcagcggctggtggccagcatggaggaggcgcggcggcggcagcatgaggccgaggagggcgtgcggcgcaagcaggaggagctgcagcagctggagcagcagcggcggcagcaggaggagctgctggctgaggagaaccagaggctgcgtgagcagctgcagctcctggaggagcagcaccgggccgcgctggcgcactcagaggaggtcactgcctcgcaggtggctgccacaaagaccctgcccaatggccgggatgcacttgatggccccgcggcagaggcagagccggagcacagcttcgatggcctgcggcggaaggtgtcagctcagaggctgcaggaggccggcatcctgagtgcggaggagctgcagcggttggcgcagggccacaccacggtggacgagctcgcacggcgggaagacgtgcgccactacctgcagggccgcagcagtatcgcagggctgttgctgaaggccaccaatgagaagctgagtgtttacgccgccctgcagaggcagctgctgagtcccggcacggccctcatcctgctggaggcgcaggcggcctcaggcttcctgctggaccctgtgcggaaccggcggctgaccgtcaacgaggctgtgaaggagggtgtggtgggccccgagctgcaccacaagctgctgtcggccgagcgcgccgtcactggctacaaggacccctacactggccagcagatctctctcttccaagccatgcagaagggcctcatcgtccgggagcacggcatccgcctgctggaggcccagatcgccacgggcggcgttatcgaccccgtgcacagccaccgcgtgcccgtggacgtggcctaccggcgcggctacttcgacgaggagatgaaccgcgtcctggcggaccccagcgacgacaccaagggcttctttgaccccaacacgcacgagaacctcacgtacctgcagctactggagcgctgcgtggaggaccccgagacgggcctgtgccttctgccactcacggataaggctgccaagggcggggagctggtctacactgactccgaggcccgggacgtctttgagaaggccaccgtgtctgcgccgttcggcaagttccagggcaagacggtgaccatttgggagatcatcaactcggaatacttcacggcagagcagcggcgggacctgctgcggcagttccgcacgggccggatcacagtggagaagatcatcaagatcatcatcacggtggtggaggagcaggagcagaagggccggctttgctttgagggcctgcgcagcctggtgccagccgccgagctgctggagagcagggtcatcgaccgcgagctctaccagcagctgcagcgaggtgagcgctctgtgcgagacgtagccgaggtggacactgtgcggcgggctctccggggtgccaacgtcatcgcgggtgtatggctggaggaggcggggcagaagctgagtatctacaatgccctgaagaaagacctgctgccatccgacatggccgtggccctgttggaagcccaggccggcaccgggcacatcatcgaccccgccaccagcgcccggctgaccgtggacgaggcagtgcgtgctggcctggtgggccccgagtttcatgagaagctgctatcagccgagaaggctgtgacagggtacagggacccctacacagggcagagcgtctccctgttccaggccctgaagaagggcctcattccccgggagcagggcctgcgcctgttggacgcccagctgtccacgggcggcatcgtggaccccagcaagagccaccgcgtgcccctggatgtcgcctgcgcccgaggctgcctggatgaggagaccagcagggccctgtcggcaccaagggccgacgccaaggcctacagtgaccccagcacaggggagccggccacctacggcgagctccagcagcggtgccggcccgaccagctgaccgggctgagcctgctgccgctctcagaaaaggctgctcgggcccggcaggaggagctctactcagagctgcaggcccgtgagacctttgaaaagaccccggttgaggtccccgtgggtggcttcaagggcaggacggtgacggtgtgggagctcatcagctctgagtacttcactgcggagcagcggcaggagctgttgcgtcagttccgcacgggcaaggtcaccgtggagaaggtcatcaagattctcattaccatcgtggaggaggtggagaccctgcggcaggagaggctgtccttcagcggcctccgtgcccctgtgccagccagcgagctcctggcttccggggtcctcagcagagcccagtttgagcagctcaaggacggcaagacgacggtcaaggacctttcggagctgggctccgtgcggacgctgctgcagggcagtggctgcctcgccggcatctacctggaggacaccaaggagaaggtgtccatctacgaggccatgcgccggggcctgctgagagccacaacggctgcgctcctgctggaggcgcaggcggccactggcttcctggtggaccccgtgcggaaccagcgcctgtatgtccacgaggccgtgaaggcgggcgtggtgggccccgagcttcacgagcagctgctgtctgccgagaaggccgtcaccggctacagagacccctactcgggcagcaccatctccctcttccaggccatgcagaagggcctggttctccggcagcacggcatccgcctgctggaggcccagatcgccacgggcggcatcatcgaccccgtgcacagccaccgcgtgcctgtggacgtggcctaccagcgcggctacttcagtgaggagatgaaccgcgtcctggcggaccccagcgacgacaccaagggcttctttgaccccaacacgcatgagaacctcacgtacaggcagctgctggagcggtgcgtggaggaccccgagacgggcttgcgccttctgccactgaaaggggcggagaaggctgaggtggtggagaccacgcaggtgtacactgaggaggagacaagaagggcatttgaagagacacagatcgacattcccggcggcggcagccacggcggctccaccatgtccctgtgggaggtgatgcagtcggacctgatccccgaggagcagcgggcccagctgatggctgacttccaggccggccgggtgaccaaggaacgcatgatcatcatcatcatcgagatcattgagaagacagagatcatccgccagcagggtctggcctcctacgactacgtgcgccgccgcctcacggctgaggacctgttcgaggctcggatcatctctctcgagacctacaacctgctccgggagggcaccaggagcctccgtgaggctctcgaggcggagtccgcctggtgctacctctatggcacgggctccgtggctggtgtctacctgcccggttccaggcagacactgagcatctaccaggctctcaagaaagggctgctgagtgccgaggtggcccgcctgctgctggaggcacaggcagccacaggcttcctgctggacccggtgaagggggagcggctgactgtggatgaggctgtgcggaagggcctcgtggggcccgagctgcacgaccgcctgctctcggctgagcgggcggtcaccggctaccgtgacccctacaccgagcagaccatctcgctcttccaggccatgaagaaggagctgatccctactgaggaggccctgcggctgctggatgcccagctggccaccggcggcatcgtggacccccgcctgggcttccaccttcccctggaggtggcttaccagcgtggctacctcaacaaggacacgcacgaccagctgtcagagcccagcgaggtgcgcagctacgtggacccgtccaccgacgagcgcctcagctacacgcagctgctcaggcggtgccgtcgtgacgacggcaccggccagctgctcctgccactgtcggacgcccgcaagctgaccttccgtggcctgcggaagcagatcaccatggaggagctggtgcgctcgcaggtcatggacgaggccacggcgctgcagctgcgggagggcctgacctccatcgaggaggtcaccaagaacttgcagaagttcctggaaggcaccagctgcatcgctggtgtcttcgtggacgccaccaaggaacggctctcggtgtaccaggccatgaagaagggcatcatccgccccggcacagcctttgagctcctggaggcgcaggcggccaccggttacgtcatcgaccccatcaagggactgaagctgacggtggaggaggctgtgcgtatgggcattgtgggccccgagttcaaggacaagctgctgtcggccgagcgcgccgtcactgggtacaaggacccctactctgggaagctcatctccctcttccaggccatgaagaagggcctgatcctgaaggaccatggcatccgcctgctggaggcccagatcgccacgggcggcatcatcgaccctgaggagagccaccggctgcccgtggaggtggcctacaagcgcggcctcttcgatgaggagatgaacgagatcctgaccgacccctcggacgacaccaagggcttctttgaccctaacacggaggagaacctcacctacctgcagctgatggagcgttgtatcactgacccccagacgggcctgtgtctcttgccgctgaaggagaagaagcgggagcggaagacgtcctccaagtcctccgtgcgcaagcgccgagtggtcatcgtggaccccgagacgggcaaggagatgtcagtgtacgaggcctaccgcaagggcctgattgaccaccagacgtacctggagctgtccgagcaggagtgcgagtgggaggagatcaccatctcctcctcggacggcgtggtcaagtccatgatcatcgaccgccgctccgggcgccagtacgacatcgatgatgccatcgccaagaacctcatcgaccgctcggcactggaccagtaccgcgccggcacgctctccatcaccgagttcgccgacatgctctcgggcaacgccggtggtttccgctcccgttcctcctcggtgggatcctcctcctcctaccccatcagccccgccgtctccaggacccagctggcctcctggtcagaccccactgaggagacgggccccgtggctggcatcctggacacggagacgctggagaaggtgtccatcaccgaggccatgcaccggaacctggtggataacatcacggggcagcggctgctggaggcgcaggcctgcaccgggggcatcatcgaccccagcaccggtgagcgcttccctgtcaccgacgccgtcaacaagggcctggtggacaagatcatggtggaccgcatcaacctggcccagaaggccttctgcggcttcgaggacccacgcaccaagaccaagatgtcggccgcccaggccctgaagaagggctggctctactacgaggccggccagcgcttcctggaggtgcagtacctgaccggcggcttgatcgagcccgacacgccgggccgcgtgcccctggacgaggccctgcagcgcggcacggtggacgcccgcaccgcacagaagctgcgtgacgtgggcgcctactccaagtacctcacctgccctaagaccaagctcaagatctcctataaggacgcgctggaccgcagcatggtggaggagggcacggggctgcggctgctggaggctgccgcgcagtccaccaagggctactacagcccctacagcgtcagcggctccggctctaccgctggctcccgcaccggctcgcgcaccggctcccgggccggctcccgccgcggcagctttgacgccaccggctccggcttctccatgaccttctcttcatcctcctactcctcctcgggctacggccgccgctacgcctcggggtcctcggcctccctggggggccctgagtctgccgtggcctgaggctgcctgcgcccaccccgctctgcatgcggcccagcccggctcccaccgaggcgcgggggccgttttcaacgcttaaaggtgtcttcctcccaagtggtgcctaaagtttaaccaaaaagaccagactaatatattaatatatatctgctgtccagacagcctgtatcttgggggacagggctggcccagccctgctggccgcctcaccccctcgggtctcctcactcccttctacctgccactcacacagccaggtgccttggagggtcccaagctgggccccagcccaccctcctgtcttcccagggtagcccgcctgccagtcctagctgcacagggcagctgggcccaaccctgtctgtagagggccctggtgtttctagcactggcctgcacggtgggccttgctggggacggggggccccagtcagcctctctcccagtctacccagagaagccccttccccatgggaagacgaggccctcgggcccagcccccacagtgctgtctgatctgtgctttccagctcaccccccacactcactcctgagacccctggcctccggcgtcagcctccagcctctgttcccctagtaagtgccttccatgtcggcctctaaccccaggccccgaggacccagacccagtggggaggcggacgttccagccggcatggctgggaactgcagacctgtcctcctggtgggtccaggggcccctccagcttgtggagccccacactggggtgccgcctgcccgtctctctcccatggagccccagccccctttgggcccagggacaccagccaggctctgtgctgaccctcctgttgcacccagccctggtctcagcagcgaccacccctgcctccaccctctgagctttgcatgttccactaaccccgggcgggtggcaggtggaggtgtcaggctgctggcgcctctgcaagggcagaacactaacctgaccgtgggcggggccttgcggtatccgcccccaataaaagcaattccaaccttgtggccggcatgtcgggggcggggggcgcctttgcctcgccgagggaggtcttgctggagcggccgtgctggctggacgggggctgcgagccggcccgcaggggctacctctaccagcagctgtgctgcgtagatgagcgggatcgtgtgcagaagaaaaccttcaccaagtgggtcaacaagcacctcatcaaggcccagaggcacatcagtgacctgtatgaagacctccgcgatggccacaacctcatctccctgctggaggtcctctcgggggacagcctgccccgggagaaggggaggatgcgtttccacaagctgcagaatgtccagattgccctggactacctccggcaccgccaggtgaagctggtgaacatcaggaatgatgacatcgctgacggcaaccccaagctgacccttggcctcatctggacaatcattctgcacttccagatctcagatatccaggtgagtgggcagtcggaggacatgacggccaaggagaagctgctgctgtggtcgcagcgaatggtggaggggtaccagggcctgcgatgcgacaacttcacctccagctggagagacggccgcctcttcaatgccatcatccaccggcacaagcccctgctcatcgacatgaacaaggtgtaccggcagaccaacctggagaacctggaccaggccttctctgtggcggagcgggacctgggagtgacgcggctcctggaccctgaggacgtggatgtccctcagcccgacgagaagtccatcatcacctacgtctcgtcgctgtatgacgccatgccccgcgtgccggacgtgcaggatggggtgagggccaacgagctgcagctgcgctggcaggagtaccgggagctggtgctgctgctgcttcagtggatgcgacaccacacggccgcctttgaggaacgcaggttcccctccagcttcgaggagattgagatcctgtggtctcagttcctgaagtttaaggagatggagctaccagccaaggaggccgacaagaacaggtccaagggcatctaccaatccctggagggagcggtgcaagcaggccagctcaaggtgccccctggctaccacccgctggatgtggagaaggagtggggcaagctgcacgtggccatcctggagcgggagaagcagctccgcagcgagtttgagaggctggagtgtcttcagcgcatcgtgaccaagctgcagatggaggcggggctgtgtgaggagcagctgaaccaggccgacgccctgctgcagtcggatgtccggctgctggctgcaggcaaagtgccacagcgggcgggggaggtggaacgggacttggacaaggcggatagcatgatccggctgctcttcaacgacgtgcagaccctcaaggatggacggcacccgcagggcgagcagatgtaccgcagggtgtaccgtctgcacgagcgcctggtagccatccgcaccgagtacaacctacggctgaaggcaggcgtggcggcccctgcaacccaggtggcccaggtgactctgcagagtgtgcagaggcgccccgagctggaggactccactctgcgctacctgcaggacctgctggcctgggtggaggagaaccagcaccgtgtggatggcgctgagtggggtgtggacctgcccagcgtggaggcgcagctgggcagccaccgaggcctgcaccagtccatcgaagaattccgggccaagatcgagcgggcacggagtgacgagggccagctctcccccgccacccggggtgcctaccgtgactgcctgggtcggctggacctgcagtacgccaagctgctgaactcctccaaggcccgcctcaggtccctggagagcttgcacagctttgtggcagccgccactaaggagctaatgtggctgaatgagaaggaggaggaggaggtgggcttcgactggagcgaccgcaacaccaacatgaccgccaagaaggagagctactcggcgctgatgcgggagctggagctgaaggagaagaagatcaaggagctccaaaatgctggggaccggctgctgcgggaggaccacccggcccggcccacggtggagtccttccaggcggccctgcagacgcagtggagctggatgctacagctgtgctgctgtatcgaggcacacctgaaggagaacgctgcctactttcagttcttctcagatgtgcgggaggccgaggggcagttgcagaagctgcaggaggcactgcgtaggaaatacagttgtgatcgctccgccaccgtcacccggctggaggacctgctgcaggatgcccaggacgagaaggaacagctgaacgagtacaagggccacctctcaggcctggccaagcgggccaaggccgtcgtgcagctgaagccccgccacccagcccaccccatgcggggccgcctgcccctgctggccgtgtgcgactataagcaggtggaggtgactgtgcacaagggtgacgagtgccagctggtgggccctgcacagccgtcccactggaaggtgctcagcagctccggcagcgaggccgccgtgccctccgtgtgcttcctggtgcccccgcccaaccaggaggcccaggaggccgtcaccaggctggaggcccagcaccaggccctggtcacgctgtggcaccagttgcacgtggacatgaagagccttctggcctggcagagccttcgccgcgacgtgcagctcatccgctcctggtccctggccacgttccgcaccctgaagccagaggagcagcgccaagccctgcacagcctggagctgcactaccaggccttcctgcgggacagccaggacgcgggcggcttcggacccgaggaccggctgatggctgagcgcgagtacggctcctgcagccaccactaccagcagctgctgcagagcctggaacagggtgcacaggaagagtctcgctgccagcgctgcatctccgagctcaaagacatccggctgcagctggaggcctgtgagacgcgcaccgtgcaccgcctgcggctgccgctggacaaagagccggcacgggagtgtgcccagcgcatcgccgagcagcagaaggcacaggcagaggtggaggggctgggcaagggggtcgcccggctctctgccgaggccgagaaggtcttggccctaccagagccatcgcctgcggcccccacgctgcgctcggagctggagctgacgctgggcaagctggagcaggtccgcagcctgtctgccatctacctggagaagctcaagaccatcagcctggtgatccgcggcacgcagggggccgaggaggtgctcagggcccacgaggagcagctcaaggaggcccaggccgtgccggccaccctcccggagctcgaggccaccaaggcctctctgaagaagctgcgggcccaggccgaggcacagcagcccacgttcgacgccctgcgggatgagctgcggggggcacaggaggtgggggagcgactgcagcagcggcacggggagcgggacgtggaggtggagcgctggcgggagcgggtcgcccagttgcttgagcgctggcaggctgtgctggcccagaccgacgtgcggcagcgcgagctcgagcaactgggccgccagctgcgttactaccgcgagagtgcagaccccttgggcgcctggctgcaggacgccaggcggcggcaggagcagatccaggccatgccgctggccgacagccaggctgtgcgggagcagctgcggcaggagcaggccctgctggaggagatcgagcgccacggcgagaaggtcgaggagtgccagaggtttgcgaaacagtacatcaacgccatcaaggactatgaactccagctggtgacgtacaaggcgcagcttgagccggtggcctccccggccaagaagcccaaggtccagtcgggatcagagagtgtcatccaggagtacgtggacctgcgtacgcactacagcgagctgaccacactgacgagccagtacatcaagttcatcagcgagactctgcggcgcatggaggaggaggagaggctggctgagcagcagcgggcagaggagcgcgagcggctggccgaggtggaggccgcgctggagaagcagcggcagctggccgaggcgcacgcccaggcaaaggcacaggcggagcgggaggcgaaggagctgcagcagcgcatgcaggaggaggtggtgcggcgggaggaggcggcggtggacgcgcagcagcagaagcgcagcattcaggaggagctgcagcagctgcggcagagctcggaggcggagatccaggccaaggcccggcaggcagaggcggctgagcgcagccggctgcgcatcgaggaggagatccgcgtggtgcgcctgcagttggaggccaccgagcgccagcgtggcggggctgagggggagctgcaggcactgcgtgcacgggcggaggaggctgaggcacaaaagcgacaggcgcaggaggaggccgagcgcttgcggaggcaggtgcaggacgagagccagcgtaagcggcaggcggaggtggagctggcctcgcgcgtgaaggccgaggccgaggcggcgcgcgagaagcagcgggccctgcaggccctggaggagctgcggctgcaggcggaggaggcggagcggcgcctgcggcaggccgaggtggagcgagcgcggcaggtacaggtggccctggagacggcgcagcgcagtgcagaggcggagctgcagagcaaacgcgcctccttcgccgagaagacggcacagctggagcgctccctgcaggaggaacacgtggctgtggcacagctgcgggaggaggctgagcggcgggcacagcagcaggccgaggccgagcgggcgcgcgaggaggcagagcgggagctggagcgctggcagctcaaggccaacgaggcgctacggctgcggctgcaggcggaggaggtggcgcagcagaagagcctggcgcaggccgaggctgagaagcagaaggaggaggcggagcgcgaggcgcggcggcgcggcaaggcggaggagcaggccgtccggcagcgggagctggctgaacaagagctggagaagcagcggcagctggcggaaggcaccgcgcagcagcgcctggccgcggagcaggagttgatccggctgcgggccgagacggagcagggggagcagcagcggcagctgctggaggaggagctggcccggctgcagcgtgaggcggctgcagccacgcagaaacggcaggagctggaagccgagctggccaaggtgcgggccgagatggaggtgctgctggccagcaaggcgagggctgaggaggagtcgcgctccaccagcgagaagtccaagcagaggctggaggccgaggccggccggttccgcgagctggccgaggaggccgcccgcctgcgtgccctggcggaagaggccaagcggcagcggcagctggccgaggaagacgcggcgcggcagcgggccgaggcggagcgggtgcttgcggagaagctggccgccatcggcgaggccacgcggctcaagacggaggcggagatcgcgctcaaggagaaggaggcggagaacgagcgcctgcggcggctggcggaggacgaggccttccagcggcggcggctggaggagcaggccgcgcaacacaaggctgacatcgaggagcgcctggcccagctgcgcaaggcatcggacagcgagctggagcggcagaaggggctggtggaggacacgctgaggcagcggcggcaggtggaggaggagatcctggcgctgaaggcgagcttcgagaaggcggccgctggcaaggcggagctggagctggagctgggacgcatccgcagcaacgcggaggacacgctgcgcagcaaggagcaggccgagctggaggctgcgaggcagcggcagctggcggcggaggaggagcggcggcgccgtgaggctgaggagcgcgtgcagaagagcctggcggccgaggaggaggccgcacggcagcggaaggcggcgctggaggaagtcgagcggctgaaagccaaggtggaggaggcgcggcgcctgcgggagcgagcggagcaggagtcggcgcggcagctgcagctggcccaggaggccgcccagaagcggctgcaggcggaagagaaggcacacgccttcgcggtgcagcagaaggagcaggagctacagcagacgctgcagcaggagcagagcgtgctggaccagctgcgcggcgaggcggaggcggcccggcgggcggctgaggaggcggaggaggcccgggtgcaggcggagcgtgaggcggcgcagtcccggcggcaggtggaagaggccgagcggctgaagcagtcggcagaggagcaggcacaggcccgggctcaggcacaggcggctgcagagaagctgcgcaaggaggccgagcaagaggcggcgcggcgggcacaggcggagcaggcggccctgcggcagaagcaggcagctgacgcggagatggagaagcataagaaa

SEQ ID NO: 683 - DNA, 32765 bp, Homo sapiens
  misc_feature (977)..(977): second gene starts at position 977
atgagcttcaccactcgctccaccttctccaccaactaccggtccctgggctctgtccaggcgcccagctacggcgcccggccggtcagcagcgcggccagcgtctatgcaggcgctgggggctctggttcccggatctccgtgtcccgctccaccagcttcaggggcggcatggggtccgggggcctggccaccgggatagccgggggtctggcaggaatgggaggcatccagaacgagaaggagaccatgcaaagcctgaacgaccgcctggcctcttacctggacagagtgaggagcctggagaccgagaaccggaggctggagagcaaaatccgggagcacttggagaagaagggaccccaggtcagagactggagccattacttcaagatcatcgaggacctgagggctcagatcttcgcaaatactgtggacaatgcccgcatcgttctgcagattgacaatgcccgtcttgctgctgatgactttagagtcaagtatgagacagagctggccatgcgccagtctgtggagaacgacatccatgggctccgcaaggtcattgatgacaccaatatcacacgactgcagctggagacagagatcgaggctctcaaggaggagctgctcttcatgaagaagaaccacgaagaggaagtaaaaggcctacaagcccagattgccagctctgggttgaccgtggaggtagatgcccccaaatctcaggacctcgccaagatcatggcagacatccgggcccaatatgacgagctggctcggaagaaccgagaggagctagacaagtactggtctcagcagattgaggagagcaccacagtggtcaccacacagtctgctgaggttggagctgctgagacgacgctcacagagctgagacgtacagtccagtccttggagatcgacctggactccatgagaaatctgaaggccagcttggagaacagcctgagggtggagaagcagcggcagctggccgaggcgcacgcccaggcaaaggcacaggcggagcgggaggcgaaggagctgcagcagcgcatgcaggaggaggtggtgcggcgggaggaggcggcggtggacgcgcagcagcagaagcgcagcattcaggaggagctgcagcagctgcggcagagctcggaggcggagatccaggccaaggcccggcaggcagaggcggctgagcgcagccggctgcgcatcgaggaggagatccgcgtggtgcgcctgcagttggaggccaccgagcgccagcgtggcggggctgagggggagctgcaggcactgcgtgcacgggcggaggaggctgaggcacaaaagcgacaggcgcaggaggaggccgagcgcttgcggaggcaggtgcaggacgagagccagcgtaagcggcaggcggaggtggagctggcctcgcgcgtgaaggccgaggccgaggcggcgcgcgagaagcagcgggccctgcaggccctggaggagctgcggctgcaggcggaggaggcggagcggcgcctgcggcaggccgaggtggagcgagcgcggcaggtacaggtggccctggagacggcgcagcgcagtgcagaggcggagctgcagagcaaacgcgcctccttcgccgagaagacggcacagctggagcgctccctgcaggaggaacacgtggctgtggcacagctgcgggaggaggctgagcggcgggcacagcagcaggccgaggccgagcgggcgcgcgaggaggcagagcgggagctggagcgctggcagctcaaggccaacgaggcgctacggctgcggctgcaggcggaggaggtggcgcagcagaagagcctggcgcaggccgaggctgagaagcagaaggaggaggcggagcgcgaggcgcggcggcgcggcaaggcggaggagcaggccgtccggcagcgggagctggctgaacaagagctggagaagcagcggcagctggcggaaggcaccgcgcagcagcgcctggccgcggagcaggagttgatccggctgcgggccgagacggagcagggggagcagcagcggcagctgctggaggaggagctggcccggctgcagcgtgaggcggctgcagccacgcagaaacggcaggagctggaagccgagctggccaaggtgcgggccgagatggaggtgctgctggccagcaaggcgagggctgaggaggagtcgcgctccaccagcgagaagtccaagcagaggctggaggccgaggccggccggttccgcgagctggccgaggaggccgcccgcctgcgtgccctggcggaagaggccaagcggcagcggcagctggccgaggaagacgcggcgcggcagcgggccgaggcggagcgggtgcttgcggagaagctggccgccatcggcgaggccacgcggctcaagacggaggcggagatcgcgctcaaggagaaggaggcggagaacgagcgcctgcggcggctggcggaggacgaggccttccagcggcggcggctggaggagcaggccgcgcaacacaaggctgacatcgaggagcgcctggcccagctgcgcaaggcatcggacagcgagctggagcggcagaaggggctggtggaggacacgctgaggcagcggcggcaggtggaggaggagatcctggcgctgaaggcgagcttcgagaaggcggccgctggcaaggcggagctggagctggagctgggacgcatccgcagcaacgcggaggacacgctgcgcagcaaggagcaggccgagctggaggctgcgaggcagcggcagctggcggcggaggaggagcggcggcgccgtgaggctgaggagcgcgtgcagaagagcctggcggccgaggaggaggccgcacggcagcggaaggcggcgctggaggaagtcgagcggctgaaagccaaggtggaggaggcgcggcgcctgcgggagcgagcggagcaggagtcggcgcggcagctgcagctggcccaggaggccgcccagaagcggctgcaggcggaagagaaggcacacgccttcgcggtgcagcagaaggagcaggagctacagcagacgctgcagcaggagcagagcgtgctggaccagctgcgcggcgaggcggaggcggcccggcgggcggctgaggaggcggaggaggcccgggtgcaggcggagcgtgaggcggcgcagtcccggcggcaggtggaagaggccgagcggctgaagcagtcggcagaggagcaggcacaggcccgggctcaggcacaggcggctgcagagaagctgcgcaaggaggccgagcaagaggcggcgcggcgggcacaggcggagcaggcggccctgcggcagaagcaggcagctgacgcggagatggagaagcataagaaattcgccgagcagacgctgcggcagaaggcgcaggtggagcaggagctgacaacactgcggctgcagctggaggagaccgaccaccagaagaacctgctggacgaggagctgcagcggctgaaggcggaggccacggaggccgcacgccagcgcagccaggtggaggaggagctcttctcggtgcgcgtgcagatggaggagctgagcaagctcaaggcacgcatcgaggctgagaaccgcgcactcatcttgcgtgacaaggacaatacgcagcgcttcctgcaggaggaggctgagaagatgaagcaggtggcggaggaggccgcgcggctgagtgtggcggcccaagaggctgcgcgactgcggcagctggcagaggaggacctggcacagcagcgggccttggcagagaagatgctcaaggagaagatgcaggcggtgcaggaggccacgcgactcaaggctgaggcggaactgctgcagcagcagaaggagcttgcgcaggagcaggcgcggcggctgcaggaggacaaggagcagatggcgcagcagctggcggaggagacgcagggcttccagcggacgctggaggccgagcggcagcggcagctggagatgagcgctgaggctgagcgcctcaagctgcgtgtggccgagatgagccgagcccaggcccgcgctgaggaggacgcccagcgcttccggaagcaggcggaggagatcggtgagaagctgcaccgcacggagctcgccacccaggagaaggtgaccctggtgcagacactggagatccagcgacagcagagtgaccatgatgccgagcgcctgcgggaggccatcgctgagctggagcgtgagaaggagaagctccaacaggaggccaaactgctgcagctcaagtctgaggagatgcagacggtgcagcaggagcagctgctgcaggagacgcaggccctgcagcaaagcttcctctctgaaaaggacagcctgctacagcgggagcgcttcatcgagcaggagaaggccaagctggagcagctcttccaggacgaggtggccaaggcacagcagctgcgtgaggagcagcagcggcagcagcagcagatggagcaggaacggcagcggctggtggccagcatggaggaggcgcggcggcggcagcatgaggccgaggagggcgtgcggcgcaagcaggaggagctgcagcagctggagcagcagcggcggcagcaggaggagctgctggctgaggagaaccagaggctgcgtgagcagctgcagctcctggaggagcagcaccgggccgcgctggcgcactcagaggaggtcactgcctcgcaggtggctgccacaaagaccctgcccaatggccgggatgcacttgatggccccgcggcagaggcagagccggagcacagcttcgatggcctgcggcggaaggtgtcagctcagaggctgcaggaggccggcatcctgagtgcggaggagctgcagcggttggcgcagggccacaccacggtggacgagctcgcacggcgggaagacgtgcgccactacctgcagggccgcagcagtatcgcagggctgttgctgaaggccaccaatgagaagctgagtgtttacgccgccctgcagaggcagctgctgagtcccggcacggccctcatcctgctggaggcgcaggcggcctcaggcttcctgctggaccctgtgcggaaccggcggctgaccgtcaacgaggctgtgaaggagggtgtggtgggccccgagctgcaccacaagctgctgtcggccgagcgcgccgtcactggctacaaggacccctacactggccagcagatctctctcttccaagccatgcagaagggcctcatcgtccgggagcacggcatccgcctgctggaggcccagatcgccacgggcggcgttatcgaccccgtgcacagccaccgcgtgcccgtggacgtggcctaccggcgcggctacttcgacgaggagatgaaccgcgtcctggcggaccccagcgacgacaccaagggcttctttgaccccaacacgcacgagaacctcacgtacctgcagctactggagcgctgcgtggaggaccccgagacgggcctgtgccttctgccactcacggataaggctgccaagggcggggagctggtctacactgactccgaggcccgggacgtctttgagaaggccaccgtgtctgcgccgttcggcaagttccagggcaagacggtgaccatttgggagatcatcaactcggaatacttcacggcagagcagcggcgggacctgctgcggcagttccgcacgggccggatcacagtggagaagatcatcaagatcatcatcacggtggtggaggagcaggagcagaagggccggctttgctttgagggcctgcgcagcctggtgccagccgccgagctgctggagagcagggtcatcgaccgcgagctctaccagcagctgcagcgaggtgagcgctctgtgcgagacgtagccgaggtggacactgtgcggcgggctctccggggtgccaacgtcatcgcgggtgtatggctggaggaggcggggcagaagctgagtatctacaatgccctgaagaaagacctgctgccatccgacatggccgtggccctgttggaagcccaggccggcaccgggcacatcatcgaccccgccaccagcgcccggctgaccgtggacgaggcagtgcgtgctggcctggtgggccccgagtttcatgagaagctgctatcagccgagaaggctgtgacagggtacagggacccctacacagggcagagcgtctccctgttccaggccctgaagaagggcctcattccccgggagcagggcctgcgcctgttggacgcccagctgtccacgggcggcatcgtggaccccagcaagagccaccgcgtgcccctggatgtcgcctgcgcccgaggctgcctggatgaggagaccagcagggccctgtcggcaccaagggccgacgccaaggcctacagtgaccccagcacaggggagccggccacctacggcgagctccagcagcggtgccggcccgaccagctgaccgggctgagcctgctgccgctctcagaaaaggctgctcgggcccggcaggaggagctctactcagagctgcaggcccgtgagacctttgaaaagaccccggttgaggtccccgtgggtggcttcaagggcaggacggtgacggtgtgggagctcatcagctctgagtacttcactgcggagcagcggcaggagctgttgcgtcagttccgcacgggcaaggtcaccgtggagaaggtcatcaagattctcattaccatcgtggaggaggtggagaccctgcggcaggagaggctgtccttcagcggcctccgtgcccctgtgccagccagcgagctcctggcttccggggtcctcagcagagcccagtttgagcagctcaaggacggcaagacgacggtcaaggacctttcggagctgggctccgtgcggacgctgctgcagggcagtggctgcctcgccggcatctacctggaggacaccaaggagaaggtgtccatctacgaggccatgcgccggggcctgctgagagccacaacggctgcgctcctgctggaggcgcaggcggccactggcttcctggtggaccccgtgcggaaccagcgcctgtatgtccacgaggccgtgaaggcgggcgtggtgggccccgagcttcacgagcagctgctgtctgccgagaaggccgtcaccggctacagagacccctactcgggcagcaccatctccctcttccaggccatgcagaagggcctggttctccggcagcacggcatccgcctgctggaggcccagatcgccacgggcggcatcatcgaccccgtgcacagccaccgcgtgcctgtggacgtggcctaccagcgcggctacttcagtgaggagatgaaccgcgtcctggcggaccccagcgacgacaccaagggcttctttgaccccaacacgcatgagaacctcacgtacaggcagctgctggagcggtgcgtggaggaccccgagacgggcttgcgccttctgccactgaaaggggcggagaaggctgaggtggtggagaccacgcaggtgtacactgaggaggagacaagaagggcatttgaagagacacagatcgacattcccggcggcggcagccacggcggctccaccatgtccctgtgggaggtgatgcagtcggacctgatccccgaggagcagcgggcccagctgatggctgacttccaggccggccgggtgaccaaggaacgcatgatcatcatcatcatcgagatcattgagaagacagagatcatccgccagcagggtctggcctcctacgactacgtgcgccgccgcctcacggctgaggacctgttcgaggctcggatcatctctctcgagacctacaacctgctccgggagggcaccaggagcctccgtgaggctctcgaggcggagtccgcctggtgctacctctatggcacgggctccgtggctggtgtctacctgcccggttccaggcagacactgagcatctaccaggctctcaagaaagggctgctgagtgccgaggtggcccgcctgctgctggaggcacaggcagccacaggcttcctgctggacccggtgaagggggagcggctgactgtggatgaggctgtgcggaagggcctcgtggggcccgagctgcacgaccgcctgctctcggctgagcgggcggtcaccggctaccgtgacccctacaccgagcagaccatctcgctcttccaggccatgaagaaggagctgatccctactgaggaggccctgcggctgctggatgcccagctggccaccggcggcatcgtggacccccgcctgggcttccaccttcccctggaggtggcttaccagcgtggctacctcaacaaggacacgcacgaccagctgtcagagcccagcgaggtgcgcagctacgtggacccgtccaccgacgagcgcctcagctacacgcagctgctcaggcggtgccgtcgtgacgacggcaccggccagctgctcctgccactgtcggacgcccgcaagctgaccttccgtggcctgcggaagcagatcaccatggaggagctggtgcgctcgcaggtcatggacgaggccacggcgctgcagctgcgggagggcctgacctccatcgaggaggtcaccaagaacttgcagaagttcctggaaggcaccagctgcatcgctggtgtcttcgtggacgccaccaaggaacggctctcggtgtaccaggccatgaagaagggcatcatccgccccggcacagcctttgagctcctggaggcgcaggcggccaccggttacgtcatcgaccccatcaagggactgaagctgacggtggaggaggctgtgcgtatgggcattgtgggccccgagttcaaggacaagctgctgtcggccgagcgcgccgtcactgggtacaaggacccctactctgggaagctcatctccctcttccaggccatgaagaagggcctgatcctgaaggaccatggcatccgcctgctggaggcccagatcgccacgggcggcatcatcgaccctgaggagagccaccggctgcccgtggaggtggcctacaagcgcggcctcttcgatgaggagatgaacgagatcctgaccgacccctcggacgacaccaagggcttctttgaccctaacacggaggagaacctcacctacctgcagctgatggagcgttgtatcactgacccccagacgggcctgtgtctcttgccgctgaaggagaagaagcgggagcggaagacgtcctccaagtcctccgtgcgcaagcgccgagtggtcatcgtggaccccgagacgggcaaggagatgtcagtgtacgaggcctaccgcaagggcctgattgaccaccagacgtacctggagctgtccgagcaggagtgcgagtgggaggagatcaccatctcctcctcggacggcgtggtcaagtccatgatcatcgaccgccgctccgggcgccagtacgacatcgatgatgccatcgccaagaacctcatcgaccgctcggcactggaccagtaccgcgccggcacgctctccatcaccgagttcgccgacatgctctcgggcaacgccggtggtttccgctcccgttcctcctcggtgggatcctcctcctcctaccccatcagccccgccgtctccaggacccagctggcctcctggtcagaccccactgaggagacgggccccgtggctggcatcctggacacggagacgctggagaaggtgtccatcaccgaggccatgcaccggaacctggtggataacatcacggggcagcggctgctggaggcgcaggcctgcaccgggggcatcatcgaccccagcaccggtgagcgcttccctgtcaccgacgccgtcaacaagggcctggtggacaagatcatggtggaccgcatcaacctggcccagaaggccttctgcggcttcgaggacccacgcaccaagaccaagatgtcggccgcccaggccctgaagaagggctggctctactacgaggccggccagcgcttcctggaggtgcagtacctgaccggcggcttgatcgagcccgacacgccgggccgcgtgcccctggacgaggccctgcagcgcggcacggtggacgcccgcaccgcacagaagctgcgtgacgtgggcgcctactccaagtacctcacctgccctaagaccaagctcaagatctcctataaggacgcgctggaccgcagcatggtggaggagggcacggggctgcggctgctggaggctgccgcgcagtccaccaagggctactacagcccctacagcgtcagcggctccggctctaccgctggctcccgcaccggctcgcgcaccggctcccgggccggctcccgccgcggcagctttgacgccaccggctccggcttctccatgaccttctcttcatcctcctactcctcctcgggctacggccgccgctacgcctcggggtcctcggcctccctggggggccctgagtctgccgtggcctgaggctgcctgcgcccaccccgctctgcatgcggcccagcccggctcccaccgaggcgcgggggccgttttcaacgcttaaaggtgtcttcctcccaagtggtgcctaaagtttaaccaaaaagaccagactaatatattaatatatatctgctgtccagacagcctgtatcttgggggacagggctggcccagccctgctggccgcctcaccccctcgggtctcctcactcccttctacctgccactcacacagccaggtgccttggagggtcccaagctgggccccagcccaccctcctgtcttcccagggtagcccgcctgccagtcctagctgcacagggcagctgggcccaaccctgtctgtagagggccctggtgtttctagcactggcctgcacggtgggccttgctggggacggggggccccagtcagcctctctcccagtctacccagagaagccccttccccatgggaagacgaggccctcgggcccagcccccacagtgctgtctgatctgtgctttccagctcaccccccacactcactcctgagacccctggcctccggcgtcagcctccagcctctgttcccctagtaagtgccttccatgtcggcctctaaccccaggccccgaggacccagacccagtggggaggcggacgttccagccggcatggctgggaactgcagacctgtcctcctggtgggtccaggggcccctccagcttgtggagccccacactggggtgccgcctgcccgtctctctcccatggagccccagccccctttgggcccagggacaccagccaggctctgtgctgaccctcctgttgcacccagccctggtctcagcagcgaccacccctgcctccaccctctgagctttgcatgttccactaaccccgggcgggtggcaggtggaggtgtcaggctgctggcgcctctgcaagggcagaacactaacctgaccgtgggcggggccttgcggtatccgcccccaataaaagcaattccaacctttgagctgagcctgtgccgagtgagcgtctcgtggggccgccagccttcagctgcctgtgtgccacacggggctgcccagagcaccgtgcctgaggccgagggtccgggcgacgaaggtgtgggggcagcatgtctcagcaccagctccgcgtgccgcagcccgagggcctgggccgaaagagaaccagctcggaggacaacctgtacctggctgtgctcagggcctctgagggcaagaaagatgagcgggatcgtgtgcagaagaaaaccttcaccaagtgggtcaacaagcacctcatcaaggcccagaggcacatcagtgacctgtatgaagacctccgcgatggccacaacctcatctccctgctggaggtcctctcgggggacagcctgccccgggagaaggggaggatgcgtttccacaagctgcagaatgtccagattgccctggactacctccggcaccgccaggtgaagctggtgaacatcaggaatgatgacatcgctgacggcaaccccaagctgacccttggcctcatctggacaatcattctgcacttccagatctcagatatccaggtgagtgggcagtcggaggacatgacggccaaggagaagctgctgctgtggtcgcagcgaatggtggaggggtaccagggcctgcgatgcgacaacttcacctccagctggagagacggccgcctcttcaatgccatcatccaccggcacaagcccctgctcatcgacatgaacaaggtgtaccggcagaccaacctggagaacctggaccaggccttctctgtggcggagcgggacctgggagtgacgcggctcctggaccctgaggacgtggatgtccctcagcccgacgagaagtccatcatcacctacgtctcgtcgctgtatgacgccatgccccgcgtgccggacgtgcaggatggggtgagggccaacgagctgcagctgcgctggcaggagtaccgggagctggtgctgctgctgcttcagtggatgcgacaccacacggccgcctttgaggaacgcaggttcccctccagcttcgaggagattgagatcctgtggtctcagttcctgaagtttaaggagatggagctaccagccaaggaggccgacaagaacaggtccaagggcatctaccaatccctggagggagcggtgcaagcaggccagctcaaggtgccccctggctaccacccgctggatgtggagaaggagtggggcaagctgcacgtggccatcctggagcgggagaagcagctccgcagcgagtttgagaggctggagtgtcttcagcgcatcgtgaccaagctgcagatggaggcggggctgtgtgaggagcagctgaaccaggccgacgccctgctgcagtcggatgtccggctgctggctgcaggcaaagtgccacagcgggcgggggaggtggaacgggacttggacaaggcggatagcatgatccggctgctcttcaacgacgtgcagaccctcaaggatggacggcacccgcagggcgagcagatgtaccgcagggtgtaccgtctgcacgagcgcctggtagccatccgcaccgagtacaacctacggctgaaggcaggcgtggcggcccctgcaacccaggtggcccaggtgactctgcagagtgtgcagaggcgccccgagctggaggactccactctgcgctacctgcaggacctgctggcctgggtggaggagaaccagcaccgtgtggatggcgctgagtggggtgtggacctgcccagcgtggaggcgcagctgggcagccaccgaggcctgcaccagtccatcgaagaattccgggccaagatcgagcgggcacggagtgacgagggccagctctcccccgccacccggggtgcctaccgtgactgcctgggtcggctggacctgcagtacgccaagctgctgaactcctccaaggcccgcctcaggtccctggagagcttgcacagctttgtggcagccgccactaaggagctaatgtggctgaatgagaaggaggaggaggaggtgggcttcgactggagcgaccgcaacaccaacatgaccgccaagaaggagagctactcggcgctgatgcgggagctggagctgaaggagaagaagatcaaggagctccaaaatgctggggaccggctgctgcgggaggaccacccggcccggcccacggtggagtccttccaggcggccctgcagacgcagtggagctggatgctacagctgtgctgctgtatcgaggcacacctgaaggagaacgctgcctactttcagttcttctcagatgtgcgggaggccgaggggcagttgcagaagctgcaggaggcactgcgtaggaaatacagttgtgatcgctccgccaccgtcacccggctggaggacctgctgcaggatgcccaggacgagaaggaacagctgaacgagtacaagggccacctctcaggcctggccaagcgggccaaggccgtcgtgcagctgaagccccgccacccagcccaccccatgcggggccgcctgcccctgctggccgtgtgcgactataagcaggtggaggtgactgtgcacaagggtgacgagtgccagctggtgggccctgcacagccgtcccactggaaggtgctcagcagctccggcagcgaggccgccgtgccctccgtgtgcttcctggtgcccccgcccaaccaggaggcccaggaggccgtcaccaggctggaggcccagcaccaggccctggtcacgctgtggcaccagttgcacgtggacatgaagagccttctggcctggcagagccttcgccgcgacgtgcagctcatccgctcctggtccctggccacgttccgcaccctgaagccagaggagcagcgccaagccctgcacagcctggagctgcactaccaggccttcctgcgggacagccaggacgcgggcggcttcggacccgaggaccggctgatggctgagcgcgagtacggctcctgcagccaccactaccagcagctgctgcagagcctggaacagggtgcacaggaagagtctcgctgccagcgctgcatctccgagctcaaagacatccggctgcagctggaggcctgtgagacgcgcaccgtgcaccgcctgcggctgccgctggacaaagagccggcacgggagtgtgcccagcgcatcgccgagcagcagaaggcacaggcagaggtggaggggctgggcaagggggtcgcccggctctctgccgaggccgagaaggtcttggccctaccagagccatcgcctgcggcccccacgctgcgctcggagctggagctgacgctgggcaagctggagcaggtccgcagcctgtctgccatctacctggagaagctcaagaccatcagcctggtgatccgcggcacgcagggggccgaggaggtgctcagggcccacgaggagcagctcaaggaggcccaggccgtgccggccaccctcccggagctcgaggccaccaaggcctctctgaagaagctgcgggcccaggccgaggcacagcagcccacgttcgacgccctgcgggatgagctgcggggggcacaggaggtgggggagcgactgcagcagcggcacggggagcgggacgtggaggtggagcgctggcgggagcgggtcgcccagttgcttgagcgctggcaggctgtgctggcccagaccgacgtgcggcagcgcgagctcgagcaactgggccgccagctgcgttactaccgcgagagtgcagaccccttgggcgcctggctgcaggacgccaggcggcggcaggagcagatccaggccatgccgctggccgacagccaggctgtgcgggagcagctgcggcaggagcaggccctgctggaggagatcgagcgccacggcgagaaggtcgaggagtgccagaggtttgcgaaacagtacatcaacgccatcaaggactatgaactccagctggtgacgtacaaggcgcagcttgagccggtggcctccccggccaagaagcccaaggtccagtcgggatcagagagtgtcatccaggagtacgtggacctgcgtacgcactacagcgagctgaccacactgacgagccagtacatcaagttcatcagcgagactctgcggcgcatggaggaggaggagaggctggctgagcagcagcgggcagaggagcgcgagcggctggccgaggtggaggccgcgctggagaagcagcggcagctggccgaggcgcacgcccaggcaaaggcacaggcggagcgggaggcgaaggagctgcagcagcgcatgcaggaggaggtggtgcggcgggaggaggcggcggtggacgcgcagcagcagaagcgcagcattcaggaggagctgcagcagctgcggcagagctcggaggcggagatccaggccaaggcccggcaggcagaggcggctgagcgcagccggctgcgcatcgaggaggagatccgcgtggtgcgcctgcagttggaggccaccgagcgccagcgtggcggggctgagggggagctgcaggcactgcgtgcacgggcggaggaggctgaggcacaaaagcgacaggcgcaggaggaggccgagcgcttgcggaggcaggtgcaggacgagagccagcgtaagcggcaggcggaggtggagctggcctcgcgcgtgaaggccgaggccgaggcggcgcgcgagaagcagcgggccctgcaggccctggaggagctgcggctgcaggcggaggaggcggagcggcgcctgcggcaggccgaggtggagcgagcgcggcaggtacaggtggccctggagacggcgcagcgcagtgcagaggcggagctgcagagcaaacgcgcctccttcgccgagaagacggcacagctggagcgctccctgcaggaggaacacgtggctgtggcacagctgcgggaggaggctgagcggcgggcacagcagcaggccgaggccgagcgggcgcgcgaggaggcagagcgggagctggagcgctggcagctcaaggccaacgaggcgctacggctgcggctgcaggcggaggaggtggcgcagcagaagagcctggcgcaggccgaggctgagaagcagaaggaggaggcggagcgcgaggcgcggcggcgcggcaaggcggaggagcaggccgtccggcagcgggagctggctgaacaagagctggagaagcagcggcagctggcggaaggcaccgcgcagcagcgcctggccgcggagcaggagttgatccggctgcgggccgagacggagcagggggagcagcagcggcagctgctggaggaggagctggcccggctgcagcgtgaggcggctgcagccacgcagaaacggcaggagctggaagccgagctggccaaggtgcgggccgagatggaggtgctgctggccagcaaggcgagggctgaggaggagtcgcgctccaccagcgagaagtccaagcagaggctggaggccgaggccggccggttccgcgagctggccgaggaggccgcccgcctgcgtgccctggcggaagaggccaagcggcagcggcagctggccgaggaagacgcggcgcggcagcgggccgaggcggagcgggtgcttgcggagaagctggccgccatcggcgaggccacgcggctcaagacggaggcggagatcgcgctcaaggagaaggaggcggagaacgagcgcctgcggcggctggcggaggacgaggccttccagcggcggcggctggaggagcaggccgcgcaacacaaggctgacatcgaggagcgcctggcccagctgcgcaaggcatcggacagcgagctggagcggcagaaggggctggtggaggacacgctgaggcagcggcggcaggtggaggaggagatcctggcgctgaaggcgagcttcgagaaggcggccgctggcaaggcggagctggagctggagctgggacgcatccgcagcaacgcggaggacacgctgcgcagcaaggagcaggccgagctggaggctgcgaggcagcggcagctggcggcggaggaggagcggcggcgccgtgaggctgaggagcgcgtgcagaagagcctggcggccgaggaggaggccgcacggcagcggaaggcggcgctggaggaagtcgagcggctgaaagccaaggtggaggaggcgcggcgcctgcgggagcgagcggagcaggagtcggcgcggcagctgcagctggcccaggaggccgcccagaagcggctgcaggcggaagagaaggcacacgccttcgcggtgcagcagaaggagcaggagctacagcagacgctgcagcaggagcagagcgtgctggaccagctgcgcggcgaggcggaggcggcccggcgggcggctgaggaggcggaggaggcccgggtgcaggcggagcgtgaggcggcgcagtcccggcggcaggtggaagaggccgagcggctgaagcagtcggcagaggagcaggcacaggcccgggctcaggcacaggcggctgcagagaagctgcgcaaggaggccgagcaagaggcggcgcggcgggcacaggcggagcaggcggccctgcggcagaagcaggcagctgacgcggagatggagaagcataagaaattcgccgagcagacgctgcggcagaaggcgcaggtggagcaggagctgacaacactgcggctgcagctggaggagaccgaccaccagaagaacctgctggacgaggagctgcagcggctgaaggcggaggccacggaggccgcacgccagcgcagccaggtggaggaggagctcttctcggtgcgcgtgcagatggaggagctgagcaagctcaaggcacgcatcgaggctgagaaccgcgcactcatcttgcgtgacaaggacaatacgcagcgcttcctgcaggaggaggctgagaagatgaagcaggtggcggaggaggccgcgcggctgagtgtggcggcccaagaggctgcgcgactgcggcagctggcagaggaggacctggcacagcagcgggccttggcagagaagatgctcaaggagaagatgcaggcggtgcaggaggccacgcgactcaaggctgaggcggaactgctgcagcagcagaaggagcttgcgcaggagcaggcgcggcggctgcaggaggacaaggagcagatggcgcagcagctggcggaggagacgcagggcttccagcggacgctggaggccgagcggcagcggcagctggagatgagcgctgaggctgagcgcctcaagctgcgtgtggccgagatgagccgagcccaggcccgcgctgaggaggacgcccagcgcttccggaagcaggcggaggagatcggtgagaagctgcaccgcacggagctcgccacccaggagaaggtgaccctggtgcagacactggagatccagcgacagcagagtgaccatgatgccgagcgcctgcgggaggccatcgctgagctggagcgtgagaaggagaagctccaacaggaggccaaactgctgcagctcaagtctgaggagatgcagacggtgcagcaggagcagctgctgcaggagacgcaggccctgcagcaaagcttcctctctgaaaaggacagcctgctacagcgggagcgcttcatcgagcaggagaaggccaagctggagcagctcttccaggacgaggtggccaaggcacagcagctgcgtgaggagcagcagcggcagcagcagcagatggagcaggaacggcagcggctggtggccagcatggaggaggcgcggcggcggcagcatgaggccgaggagggcgtgcggcgcaagcaggaggagctgcagcagctggagcagcagcggcggcagcaggaggagctgctggctgaggagaaccagaggctgcgtgagcagctgcagctcctggaggagcagcaccgggccgcgctggcgcactcagaggaggtcactgcctcgcaggtggctgccacaaagaccctgcccaatggccgggatgcacttgatggccccgcggcagaggcagagccggagcacagcttcgatggcctgcggcggaaggtgtcagctcagaggctgcaggaggccggcatcctgagtgcggaggagctgcagcggttggcgcagggccacaccacggtggacgagctcgcacggcgggaagacgtgcgccactacctgcagggccgcagcagtatcgcagggctgttgctgaaggccaccaatgagaagctgagtgtttacgccgccctgcagaggcagctgctgagtcccggcacggccctcatcctgctggaggcgcaggcggcctcaggcttcctgctggaccctgtgcggaaccggcggctgaccgtcaacgaggctgtgaaggagggtgtggtgggccccgagctgcaccacaagctgctgtcggccgagcgcgccgtcactggctacaaggacccctacactggccagcagatctctctcttccaagccatgcagaagggcctcatcgtccgggagcacggcatccgcctgctggaggcccagatcgccacgggcggcgttatcgaccccgtgcacagccaccgcgtgcccgtggacgtggcctaccggcgcggctacttcgacgaggagatgaaccgcgtcctggcggaccccagcgacgacaccaagggcttctttgaccccaacacgcacgagaacctcacgtacctgcagctactggagcgctgcgtggaggaccccgagacgggcctgtgccttctgccactcacggataaggctgccaagggcggggagctggtctacactgactccgaggcccgggacgtctttgagaaggccaccgtgtctgcgccgttcggcaagttccagggcaagacggtgaccatttgggagatcatcaactcggaatacttcacggcagagcagcggcgggacctgctgcggcagttccgcacgggccggatcacagtggagaagatcatcaagatcatcatcacggtggtggaggagcaggagcagaagggccggctttgctttgagggcctgcgcagcctggtgccagccgccgagctgctggagagcagggtcatcgaccgcgagctctaccagcagctgcagcgaggtgagcgctctgtgcgagacgtagccgaggtggacactgtgcggcgggctctccggggtgccaacgtcatcgcgggtgtatggctggaggaggcggggcagaagctgagtatctacaatgccctgaagaaagacctgctgccatccgacatggccgtggccctgttggaagcccaggccggcaccgggcacatcatcgaccccgccaccagcgcccggctgaccgtggacgaggcagtgcgtgctggcctggtgggccccgagtttcatgagaagctgctatcagccgagaaggctgtgacagggtacagggacccctacacagggcagagcgtctccctgttccaggccctgaagaagggcctcattccccgggagcagggcctgcgcctgttggacgcccagctgtccacgggcggcatcgtggaccccagcaagagccaccgcgtgcccctggatgtcgcctgcgcccgaggctgcctggatgaggagaccagcagggccctgtcggcaccaagggccgacgccaaggcctacagtgaccccagcacaggggagccggccacctacggcgagctccagcagcggtgccggcccgaccagctgaccgggctgagcctgctgccgctctcagaaaaggctgctcgggcccggcaggaggagctctactcagagctgcaggcccgtgagacctttgaaaagaccccggttgaggtccccgtgggtggcttcaagggcaggacggtgacggtgtgggagctcatcagctctgagtacttcactgcggagcagcggcaggagctgttgcgtcagttccgcacgggcaaggtcaccgtggagaaggtcatcaagattctcattaccatcgtggaggaggtggagaccctgcggcaggagaggctgtccttcagcggcctccgtgcccctgtgccagccagcgagctcctggcttccggggtcctcagcagagcccagtttgagcagctcaaggacggcaagacgacggtcaaggacctttcggagctgggctccgtgcggacgctgctgcagggcagtggctgcctcgccggcatctacctggaggacaccaaggagaaggtgtccatctacgaggccatgcgccggggcctgctgagagccacaacggctgcgctcctgctggaggcgcaggcggccactggcttcctggtggaccccgtgcggaaccagcgcctgtatgtccacgaggccgtgaaggcgggcgtggtgggccccgagcttcacgagcagctgctgtctgccgagaaggccgtcaccggctacagagacccctactcgggcagcaccatctccctcttccaggccatgcagaagggcctggttctccggcagcacggcatccgcctgctggaggcccagatcgccacgggcggcatcatcgaccccgtgcacagccaccgcgtgcctgtggacgtggcctaccagcgcggctacttcagtgaggagatgaaccgcgtcctggcggaccccagcgacgacaccaagggcttctttgaccccaacacgcatgagaacctcacgtacaggcagctgctggagcggtgcgtggaggaccccgagacgggcttgcgccttctgccactgaaaggggcggagaaggctgaggtggtggagaccacgcaggtgtacactgaggaggagacaagaagggcatttgaagagacacagatcgacattcccggcggcggcagccacggcggctccaccatgtccctgtgggaggtgatgcagtcggacctgatccccgaggagcagcgggcccagctgatggctgacttccaggccggccgggtgaccaaggaacgcatgatcatcatcatcatcgagatcattgagaagacagagatcatccgccagcagggtctggcctcctacgactacgtgcgccgccgcctcacggctgaggacctgttcgaggctcggatcatctctctcgagacctacaacctgctccgggagggcaccaggagcctccgtgaggctctcgaggcggagtccgcctggtgctacctctatggcacgggctccgtggctggtgtctacctgcccggttccaggcagacactgagcatctaccaggctctcaagaaagggctgctgagtgccgaggtggcccgcctgctgctggaggcacaggcagccacaggcttcctgctggacccggtgaagggggagcggctgactgtggatgaggctgtgcggaagggcctcgtggggcccgagctgcacgaccgcctgctctcggctgagcgggcggtcaccggctaccgtgacccctacaccgagcagaccatctcgctcttccaggccatgaagaaggagctgatccctactgaggaggccctgcggctgctggatgcccagctggccaccggcggcatcgtggacccccgcctgggcttccaccttcccctggaggtggcttaccagcgtggctacctcaacaaggacacgcacgaccagctgtcagagcccagcgaggtgcgcagctacgtggacccgtccaccgacgagcgcctcagctacacgcagctgctcaggcggtgccgtcgtgacgacggcaccggccagctgctcctgccactgtcggacgcccgcaagctgaccttccgtggcctgcggaagcagatcaccatggaggagctggtgcgctcgcaggtcatggacgaggccacggcgctgcagctgcgggagggcctgacctccatcgaggaggtcaccaagaacttgcagaagttcctggaaggcaccagctgcatcgctggtgtcttcgtggacgccaccaaggaacggctctcggtgtaccaggccatgaagaagggcatcatccgccccggcacagcctttgagctcctggaggcgcaggcggccaccggttacgtcatcgaccccatcaagggactgaagctgacggtggaggaggctgtgcgtatgggcattgtgggccccgagttcaaggacaagctgctgtcggccgagcgcgccgtcactgggtacaaggacccctactctgggaagctcatctccctcttccaggccatgaagaagggcctgatcctgaaggaccatggcatccgcctgctggaggcccagatcgccacgggcggcatcatcgaccctgaggagagccaccggctgcccgtggaggtggcctacaagcgcggcctcttcgatgaggagatgaacgagatcctgaccgacccctcggacgacaccaagggcttctttgaccctaacacggaggagaacctcacctacctgcagctgatggagcgttgtatcactgacccccagacgggcctgtgtctcttgccgctgaaggagaagaagcgggagcggaagacgtcctccaagtcctccgtgcgcaagcgccgagtggtcatcgtggaccccgagacgggcaaggagatgtcagtgtacgaggcctaccgcaagggcctgattgaccaccagacgtacctggagctgtccgagcaggagtgcgagtgggaggagatcaccatctcctcctcggacggcgtggtcaagtccatgatcatcgaccgccgctccgggcgccagtacgacatcgatgatgccatcgccaagaacctcatcgaccgctcggcactggaccagtaccgcgccggcacgctctccatcaccgagttcgccgacatgctctcgggcaacgccggtggtttccgctcccgttcctcctcggtgggatcctcctcctcctaccccatcagccccgccgtctccaggacccagctggcctcctggtcagaccccactgaggagacgggccccgtggctggcatcctggacacggagacgctggagaaggtgtccatcaccgaggccatgcaccggaacctggtggataacatcacggggcagcggctgctggaggcgcaggcctgcaccgggggcatcatcgaccccagcaccggtgagcgcttccctgtcaccgacgccgtcaacaagggcctggtggacaagatcatggtggaccgcatcaacctggcccagaaggccttctgcggcttcgaggacccacgcaccaagaccaagatgtcggccgcccaggccctgaagaagggctggctctactacgaggccggccagcgcttcctggaggtgcagtacctgaccggcggcttgatcgagcccgacacgccgggccgcgtgcccctggacgaggccctgcagcgcggcacggtggacgcccgcaccgcacagaagctgcgtgacgtgggcgcctactccaagtacctcacctgccctaagaccaagctcaagatctcctataaggacgcgctggaccgcagcatggtggaggagggcacggggctgcggctgctggaggctgccgcgcagtccaccaagggctactacagcccctacagcgtcagcggctccggctctaccgctggctcccgcaccggctcgcgcaccggctcccgggccggctcccgccgcggcagctttgacgccaccggctccggcttctccatgaccttctcttcatcctcctactcctcctcgggctacggccgccgctacgcctcggggtcctcggcctccctggggggccctgagtctgccgtggcctgaggctgcctgcgcccaccccgctctgcatgcggcccagcccggctcccaccgaggcgcgggggccgttttcaacgcttaaaggtgtcttcctcccaagtggtgcctaaagtttaaccaaaaagaccagactaatatattaatatatatctgctgtccagacagcctgtatcttgggggacagggctggcccagccctgctggccgcctcaccccctcgggtctcctcactcccttctacctgccactcacacagccaggtgccttggagggtcccaagctgggccccagcccaccctcctgtcttcccagggtagcccgcctgccagtcctagctgcacagggcagctgggcccaaccctgtctgtagagggccctggtgtttctagcactggcctgcacggtgggccttgctggggacggggggccccagtcagcctctctcccagtctacccagagaagccccttccccatgggaagacgaggccctcgggcccagcccccacagtgctgtctgatctgtgctttccagctcaccccccacactcactcctgagacccctggcctccggcgtcagcctccagcctctgttcccctagtaagtgccttccatgtcggcctctaaccccaggccccgaggacccagacccagtggggaggcggacgttccagccggcatggctgggaactgcagacctgtcctcctggtgggtccaggggcccctccagcttgtggagccccacactggggtgccgcctgcccgtctctctcccatggagccccagccccctttgggcccagggacaccagccaggctctgtgctgaccctcctgttgcacccagccctggtctcagcagcgaccacccctgcctccaccctctgagctttgcatgttccactaaccccgggcgggtggcaggtggaggtgtcaggctgctggcgcctctgcaagggcagaacactaacctgaccgtgggcggggccttgcggtatccgcccccaataaaagcaattccaacctttgagctgagcctgtgccgagtgagcgtctcgtggggccgccagccttcagctgcctgtgtgccacacggggctgcccagagcaccgtgcctgaggccgagggtccgggcgacgaaggtgtgggggcagcatgtctcagcaccagctccgcgtgccgcagcccgagggcctgggccgaaagagaaccagctcggaggacaacctgtacctggctgtgctcagggcctctgagggcaagaaagatgagcgggatcgtgtgcagaagaaaaccttcaccaagtgggtcaacaagcacctcatcaaggcccagaggcacatcagtgacctgtatgaagacctccgcgatggccacaacctcatctccctgctggaggtcctctcgggggacagcctgccccgggagaaggggaggatgcgtttccacaagctgcagaatgtccagattgccctggactacctccggcaccgccaggtgaagctggtgaacatcaggaatgatgacatcgctgacggcaaccccaagctgacccttggcctcatctggacaatcattctgcacttccagatctcagatatccaggtgagtgggcagtcggaggacatgacggccaaggagaagctgctgctgtggtcgcagcgaatggtggaggggtaccagggcctgcgatgcgacaacttcacctccagctggagagacggccgcctcttcaatgccatcatccaccggcacaagcccctgctcatcgacatgaacaaggtgtaccggcagaccaacctggagaacctggaccaggccttctctgtggcggagcgggacctgggagtgacgcggctcctggaccctgaggacgtggatgtccctcagcccgacgagaagtccatcatcacctacgtctcgtcgctgtatgacgccatgccccgcgtgccggacgtgcaggatggggtgagggccaacgagctgcagctgcgctggcaggagtaccgggagctggtgctgctgctgcttcagtggatgcgacaccacacggccgcctttgaggaacgcaggttcccctccagcttcgaggagattgagatcctgtggtctcagttcctgaagtttaaggagatggagctaccagccaaggaggccgacaagaacaggtccaagggcatctaccaatccctggagggagcggtgcaagcaggccagctcaaggtgccccctggctaccacccgctggatgtggagaaggagtggggcaagctgcacgtggccatcctggagcgggagaagcagctccgcagcgagtttgagaggctggagtgtcttcagcgcatcgtgaccaagctgcagatggaggcggggctgtgtgaggagcagctgaaccaggccgacgccctgctgcagtcggatgtccggctgctggctgcaggcaaagtgccacagcgggcgggggaggtggaacgggacttggacaaggcggatagcatgatccggctgctcttcaacgacgtgcagaccctcaaggatggacggcacccgcagggcgagcagatgtaccgcagggtgtaccgtctgcacgagcgcctggtagccatccgcaccgagtacaacctacggctgaaggcaggcgtggcggcccctgcaacccaggtggcccaggtgactctgcagagtgtgcagaggcgccccgagctggaggactccactctgcgctacctgcaggacctgctggcctgggtggaggagaaccagcaccgtgtggatggcgctgagtggggtgtggacctgcccagcgtggaggcgcagctgggcagccaccgaggcctgcaccagtccatcgaagaattccgggccaagatcgagcgggcacggagtgacgagggccagctctcccccgccacccggggtgcctaccgtgactgcctgggtcggctggacctgcagtacgccaagctgctgaactcctccaaggcccgcctcaggtccctggagagcttgcacagctttgtggcagccgccactaaggagctaatgtggctgaatgagaaggaggaggaggaggtgggcttcgactggagcgaccgcaacaccaacatgaccgccaagaaggagagctactcggcgctgatgcgggagctggagctgaaggagaagaagatcaaggagctccaaaatgctggggaccggctgctgcgggaggaccacccggcccggcccacggtggagtccttccaggcggccctgcagacgcagtggagctggatgctacagctgtgctgctgtatcgaggcacacctgaaggagaacgctgcctactttcagttcttctcagatgtgcgggaggccgaggggcagttgcagaagctgcaggaggcactgcgtaggaaatacagttgtgatcgctccgccaccgtcacccggctggaggacctgctgcaggatgcccaggacgagaaggaacagctgaacgagtacaagggccacctctcaggcctggccaagcgggccaaggccgtcgtgcagctgaagccccgccacccagcccaccccatgcggggccgcctgcccctgctggccgtgtgcgactataagcaggtggaggtgactgtgcacaagggtgacgagtgccagctggtgggccctgcacagccgtcccactggaaggtgctcagcagctccggcagcgaggccgccgtgccctccgtgtgcttcctggtgcccccgcccaaccaggaggcccaggaggccgtcaccaggctggaggcccagcaccaggccctggtcacgctgtggcaccagttgcacgtggacatgaagagccttctggcctggcagagccttcgccgcgacgtgcagctcatccgctcctggtccctggccacgttccgcaccctgaagccagaggagcagcgccaagccctgcacagcctggagctgcactaccaggccttcctgcgggacagccaggacgcgggcggcttcggacccgaggaccggctgatggctgagcgcgagtacggctcctgcagccaccactaccagcagctgctgcagagcctggaacagggtgcacaggaagagtctcgctgccagcgctgcatctccgagctcaaagacatccggctgcagctggaggcctgtgagacgcgcaccgtgcaccgcctgcggctgccgctggacaaagagccggcacgggagtgtgcccagcgcatcgccgagcagcagaaggcacaggcagaggtggaggggctgggcaagggggtcgcccggctctctgccgaggccgagaaggtcttggccctaccagagccatcgcctgcggcccccacgctgcgctcggagctggagctgacgctgggcaagctggagcaggtccgcagcctgtctgccatctacctggagaagctcaagaccatcagcctggtgatccgcggcacgcagggggccgaggaggtgctcagggcccacgaggagcagctcaaggaggcccaggccgtgccggccaccctcccggagctcgaggccaccaaggcctctctgaagaagctgcgggcccaggccgaggcacagcagcccacgttcgacgccctgcgggatgagctgcggggggcacaggaggtgggggagcgactgcagcagcggcacggggagcgggacgtggaggtggagcgctggcgggagcgggtcgcccagttgcttgagcgctggcaggctgtgctggcccagaccgacgtgcggcagcgcgagctcgagcaactgggccgccagctgcgttactaccgcgagagtgcagaccccttgggcgcctggctgcaggacgccaggcggcggcaggagcagatccaggccatgccgctggccgacagccaggctgtgcgggagcagctgcggcaggagcaggccctgctggaggagatcgagcgccacggcgagaaggtcgaggagtgccagaggtttgcgaaacagtacatcaacgccatcaaggactatgaactccagctggtgacgtacaaggcgcagcttgagccggtggcctccccggccaagaagcccaaggtccagtcgggatcagagagtgtcatccaggagtacgtggacctgcgtacgcactacagcgagctgaccacactgacgagccagtacatcaagttcatcagcgagactctgcggcgcatggaggaggaggagaggctggctgagcagcagcgggcagaggagcgcgagcggctggccgaggtggaggccgcgctggagaagcagcggcagctggccgaggcgcacgcccaggcaaaggcacaggcggagcgggaggcgaaggagctgcagcagcgcatgcaggaggaggtggtgcggcgggaggaggcggcggtggacgcgcagcagcagaagcgcagcattcaggaggagctgcagcagctgcggcagagctcggaggcggagatccaggccaaggcccggcaggcagaggcggctgagcgcagccggctgcgcatcgaggaggagatccgcgtggtgcgcctgcagttggaggccaccgagcgccagcgtggcggggctgagggggagctgcaggcactgcgtgcacgggcggaggaggctgaggcacaaaagcgacaggcgcaggaggaggccgagcgcttgcggaggcaggtgcaggacgagagccagcgtaagcggcaggcggaggtggagctggcctcgcgcgtgaaggccgaggccgaggcggcgcgcgagaagcagcgggccctgcaggccctggaggagctgcggctgcaggcggaggaggcggagcggcgcctgcggcaggccgaggtggagcgagcgcggcaggtacaggtggccctggagacggcgcagcgcagtgcagaggcggagctgcagagcaaacgcgcctccttcgccgagaagacggcacagctggagcgctccctgcaggaggaacacgtggctgtggcacagctgcgggaggaggctgagcggcgggcacagcagcaggccgaggccgagcgggcgcgcgaggaggcagagcgggagctggagcgctggcagctcaaggccaacgaggcgctacggctgcggctgcaggcggaggaggtggcgcagcagaagagcctggcgcaggccgaggctgagaagcagaaggaggaggcggagcgcgaggcgcggcggcgcggcaaggcggaggagcaggccgtccggcagcgggagctggctgaacaagagctggagaagcagcggcagctggcggaaggcaccgcgcagcagcgcctggccgcggagcaggagttgatccggctgcgggccgagacggagcagggggagcagcagcggcagctgctggaggaggagctggcccggctgcagcgtgaggcggctgcagccacgcagaaacggcaggagctggaagccgagctggccaaggtgcgggccgagatggaggtgctgctggccagcaaggcgagggctgaggaggagtcgcgctccaccagcgagaagtccaagcagaggctggaggccgaggccggccggttccgcgagctggccgaggaggccgcccgcctgcgtgccctggcggaagaggccaagcggcagcggcagctggccgaggaagacgcggcgcggcagcgggccgaggcggagcgggtgcttgcggagaagctggccgccatcggcgaggccacgcggctcaagacggaggcggagatcgcgctcaaggagaaggaggcggagaacgagcgcctgcggcggctggcggaggacgaggccttccagcggcggcggctggaggagcaggccgcgcaacacaaggctgacatcgaggagcgcctggcccagctgcgcaaggcatcggacagcgagctggagcggcagaaggggctggtggaggacacgctgaggcagcggcggcaggtggaggaggagatcctggcgctgaaggcgagcttcgagaaggcggccgctggcaaggcggagctggagctggagctgggacgcatccgcagcaacgcggaggacacgctgcgcagcaaggagcaggccgagctggaggctgcgaggcagcggcagctggcggcggaggaggagcggcggcgccgtgaggctgaggagcgcgtgcagaagagcctggcggccgaggaggaggccgcacggcagcggaaggcggcgctggaggaagtcgagcggctgaaagccaaggtggaggaggcgcggcgcctgcgggagcgagcggagcaggagtcggcgcggcagctgcagctggcccaggaggccgcccagaagcggctgcaggcggaagagaaggcacacgccttcgcggtgcagcagaaggagcaggagctacagcagacgctgcagcaggagcagagcgtgctggaccagctgcgcggcgaggcggaggcggcccggcgggcggctgaggaggcggaggaggcccgggtgcaggcg

SEQ ID NO: 684 - DNA, 32765 bp, Homo sapiens
  misc_feature (977)..(977): second gene starts at position 977
atgagcttcaccactcgctccaccttctccaccaactaccggtccctgggctctgtccaggcgcccagctacggcgcccggccggtcagcagcgcggccagcgtctatgcaggcgctgggggctctggttcccggatctccgtgtcccgctccaccagcttcaggggcggcatggggtccgggggcctggccaccgggatagccgggggtctggcaggaatgggaggcatccagaacgagaaggagaccatgcaaagcctgaacgaccgcctggcctcttacctggacagagtgaggagcctggagaccgagaaccggaggctggagagcaaaatccgggagcacttggagaagaagggaccccaggtcagagactggagccattacttcaagatcatcgaggacctgagggctcagatcttcgcaaatactgtggacaatgcccgcatcgttctgcagattgacaatgcccgtcttgctgctgatgactttagagtcaagtatgagacagagctggccatgcgccagtctgtggagaacgacatccatgggctccgcaaggtcattgatgacaccaatatcacacgactgcagctggagacagagatcgaggctctcaaggaggagctgctcttcatgaagaagaaccacgaagaggaagtaaaaggcctacaagcccagattgccagctctgggttgaccgtggaggtagatgcccccaaatctcaggacctcgccaagatcatggcagacatccgggcccaatatgacgagctggctcggaagaaccgagaggagctagacaagtactggtctcagcagattgaggagagcaccacagtggtcaccacacagtctgctgaggttggagctgctgagacgacgctcacagagctgagacgtacagtccagtccttggagatcgacctggactccatgagaaatctgaaggccagcttggagaacagcctgagggtggagaagcagcggcagctggccgaggcgcacgcccaggcaaaggcacaggcggagcgggaggcgaaggagctgcagcagcgcatgcaggaggaggtggtgcggcgggaggaggcggcggtggacgcgcagcagcagaagcgcagcattcaggaggagctgcagcagctgcggcagagctcggaggcggagatccaggccaaggcccggcaggcagaggcggctgagcgcagccggctgcgcatcgaggaggagatccgcgtggtgcgcctgcagttggaggccaccgagcgccagcgtggcggggctgagggggagctgcaggcactgcgtgcacgggcggaggaggctgaggcacaaaagcgacaggcgcaggaggaggccgagcgcttgcggaggcaggtgcaggacgagagccagcgtaagcggcaggcggaggtggagctggcctcgcgcgtgaaggccgaggccgaggcggcgcgcgagaagcagcgggccctgcaggccctggaggagctgcggctgcaggcggaggaggcggagcggcgcctgcggcaggccgaggtggagcgagcgcggcaggtacaggtggccctggagacggcgcagcgcagtgcagaggcggagctgcagagcaaacgcgcctccttcgccgagaagacggcacagctggagcgctccctgcaggaggaacacgtggctgtggcacagctgcgggaggaggctgagcggcgggcacagcagcaggccgaggccgagcgggcgcgcgaggaggcagagcgggagctggagcgctggcagctcaaggccaacgaggcgctacggctgcggctgcaggcggaggaggtggcgcagcagaagagcctggcgcaggccgaggctgagaagcagaaggaggaggcggagcgcgaggcgcggcggcgcggcaaggcggaggagcaggccgtccggcagcgggagctggctgaacaagagctggagaagcagcggcagctggcggaaggcaccgcgcagcagcgcctggccgcggagcaggagttgatccggctgcgggccgagacggagcagggggagcagcagcggcagctgctggaggaggagctggcccggctgcagcgtgaggcggctgcagccacgcagaaacggcaggagctggaagccgagctggccaaggtgcgggccgagatggaggtgctgctggccagcaaggcgagggctgaggaggagtcgcgctccaccagcgagaagtccaagcagaggctggaggccgaggccggccggttccgcgagctggccgaggaggccgcccgcctgcgtgccctggcggaagaggccaagcggcagcggcagctggccgaggaagacgcggcgcggcagcgggccgaggcggagcgggtgcttgcggagaagctggccgccatcggcgaggccacgcggctcaagacggaggcggagatcgcgctcaaggagaaggaggcggagaacgagcgcctgcggcggctggcggaggacgaggccttccagcggcggcggctggaggagcaggccgcgcaacacaaggctgacatcgaggagcgcctggcccagctgcgcaaggcatcggacagcgagctggagcggcagaaggggctggtggaggacacgctgaggcagcggcggcaggtggaggaggagatcctggcgctgaaggcgagcttcgagaaggcggccgctggcaaggcggagctggagctggagctgggacgcatccgcagcaacgcggaggacacgctgcgcagcaaggagcaggccgagctggaggctgcgaggcagcggcagctggcggcggaggaggagcggcggcgccgtgaggctgaggagcgcgtgcagaagagcctggcggccgaggaggaggccgcacggcagcggaaggcggcgctggaggaagtcgagcggctgaaagccaaggtggaggaggcgcggcgcctgcgggagcgagcggagcaggagtcggcgcggcagctgcagctggcccaggaggccgcccagaagcggctgcaggcggaagagaaggcacacgccttcgcggtgcagcagaaggagcaggagctacagcagacgctgcagcaggagcagagcgtgctggaccagctgcgcggcgaggcggaggcggcccggcgggcggctgaggaggcggaggaggcccgggtgcaggcggagcgtgaggcggcgcagtcccggcggcaggtggaagaggccgagcggctgaagcagtcggcagaggagcaggcacaggcccgggctcaggcacaggcggctgcagagaagctgcgcaaggaggccgagcaagaggcggcgcggcgggcacaggcggagcaggcggccctgcggcagaagcaggcagctgacgcggagatggagaagcataagaaattcgccgagcagacgctgcggcagaaggcgcaggtggagcaggagctgacaacactgcggctgcagctggaggagaccgaccaccagaagaacctgctggacgaggagctgcagcggctgaaggcggaggccacggaggccgcacgccagcgcagccaggtggaggaggagctcttctcggtgcgcgtgcagatggaggagctgagcaagctcaaggcacgcatcgaggctgagaaccgcgcactcatcttgcgtgacaaggacaatacgcagcgcttcctgcaggaggaggctgagaagatgaagcaggtggcggaggaggccgcgcggctgagtgtggcggcccaagaggctgcgcgactgcggcagctggcagaggaggacctggcacagcagcgggccttggcagagaagatgctcaaggagaagatgcaggcggtgcaggaggccacgcgactcaaggctgaggcggaactgctgcagcagcagaaggagcttgcgcaggagcaggcgcggcggctgcaggaggacaaggagcagatggcgcagcagctggcggaggagacgcagggcttccagcggacgctggaggccgagcggcagcggcagctggagatgagcgctgaggctgagcgcctcaagctgcgtgtggccgagatgagccgagcccaggcccgcgctgaggaggacgcccagcgcttccggaagcaggcggaggagatcggtgagaagctgcaccgcacggagctcgccacccaggagaaggtgaccctggtgcagacactggagatccagcgacagcagagtgaccatgatgccgagcgcctgcgggaggccatcgctgagctggagcgtgagaaggagaagctccaacaggaggccaaactgctgcagctcaagtctgaggagatgcagacggtgcagcaggagcagctgctgcaggagacgcaggccctgcagcaaagcttcctctctgaaaaggacagcctgctacagcgggagcgcttcatcgagcaggagaaggccaagctggagcagctcttccaggacgaggtggccaaggcacagcagctgcgtgaggagcagcagcggcagcagcagcagatggagcaggaacggcagcggctggtggccagcatggaggaggcgcggcggcggcagcatgaggccgaggagggcgtgcggcgcaagcaggaggagctgcagcagctggagcagcagcggcggcagcaggaggagctgctggctgaggagaaccagaggctgcgtgagcagctgcagctcctggaggagcagcaccgggccgcgctggcgcactcagaggaggtcactgcctcgcaggtggctgccacaaagaccctgcccaatggccgggatgcacttgatggccccgcggcagaggcagagccggagcacagcttcgatggcctgcggcggaaggtgtcagctcagaggctgcaggaggccggcatcctgagtgcggaggagctgcagcggttggcgcagggccacaccacggtggacgagctcgcacggcgggaagacgtgcgccactacctgcagggccgcagcagtatcgcagggctgttgctgaaggccaccaatgagaagctgagtgtttacgccgccctgcagaggcagctgctgagtcccggcacggccctcatcctgctggaggcgcaggcggcctcaggcttcctgctggaccctgtgcggaaccggcggctgaccgtcaacgaggctgtgaaggagggtgtggtgggccccgagctgcaccacaagctgctgtcggccgagcgcgccgtcactggctacaaggacccctacactggccagcagatctctctcttccaagccatgcagaagggcctcatcgtccgggagcacggcatccgcctgctggaggcccagatcgccacgggcggcgttatcgaccccgtgcacagccaccgcgtgcccgtggacgtggcctaccggcgcggctacttcgacgaggagatgaaccgcgtcctggcggaccccagcgacgacaccaagggcttctttgaccccaacacgcacgagaacctcacgtacctgcagctactggagcgctgcgtggaggaccccgagacgggcctgtgccttctgccactcacggataaggctgccaagggcggggagctggtctacactgactccgaggcccgggacgtctttgagaaggccaccgtgtctgcgccgttcggcaagttccagggcaagacggtgaccatttgggagatcatcaactcggaatacttcacggcagagcagcggcgggacctgctgcggcagttccgcacgggccggatcacagtggagaagatcatcaagatcatcatcacggtggtggaggagcaggagcagaagggccggctttgctttgagggcctgcgcagcctggtgccagccgccgagctgctggagagcagggtcatcgaccgcgagctctaccagcagctgcagcgaggtgagcgctctgtgcgagacgtagccgaggtggacactgtgcggcgggctctccggggtgccaacgtcatcgcgggtgtatggctggaggaggcggggcagaagctgagtatctacaatgccctgaagaaagacctgctgccatccgacatggccgtggccctgttggaagcccaggccggcaccgggcacatcatcgaccccgccaccagcgcccggctgaccgtggacgaggcagtgcgtgctggcctggtgggccccgagtttcatgagaagctgctatcagccgagaaggctgtgacagggtacagggacccctacacagggcagagcgtctccctgttccaggccctgaagaagggcctcattccccgggagcagggcctgcgcctgttggacgcccagctgtccacgggcggcatcgtggaccccagcaagagccaccgcgtgcccctggatgtcgcctgcgcccgaggctgcctggatgaggagaccagcagggccctgtcggcaccaagggccgacgccaaggcctacagtgaccccagcacaggggagccggccacctacggcgagctccagcagcggtgccggcccgaccagctgaccgggctgagcctgctgccgctctcagaaaaggctgctcgggcccggcaggaggagctctactcagagctgcaggcccgtgagacctttgaaaagaccccggttgaggtccccgtgggtggcttcaagggcaggacggtgacggtgtgggagctcatcagctctgagtacttcactgcggagcagcggcaggagctgttgcgtcagttccgcacgggcaaggtcaccgtggagaaggtcatcaagattctcattaccatcgtggaggaggtggagaccctgcggcaggagaggctgtccttcagcggcctccgtgcccctgtgccagccagcgagctcctggcttccggggtcctcagcagagcccagtttgagcagctcaaggacggcaagacgacggtcaaggacctttcggagctgggctccgtgcggacgctgctgcagggcagtggctgcctcgccggcatctacctggaggacaccaaggagaaggtgtccatctacgaggccatgcgccggggcctgctgagagccacaacggctgcgctcctgctggaggcgcaggcggccactggcttcctggtggaccccgtgcggaaccagcgcctgtatgtccacgaggccgtgaaggcgggcgtggtgggccccgagcttcacgagcagctgctgtctgccgagaaggccgtcaccggctacagagacccctactcgggcagcaccatctccctcttccaggccatgcagaagggcctggttctccggcagcacggcatccgcctgctggaggcccagatcgccacgggcggcatcatcgaccccgtgcacagccaccgcgtgcctgtggacgtggcctaccagcgcggctacttcagtgaggagatgaaccgcgtcctggcggaccccagcgacgacaccaagggcttctttgaccccaacacgcatgagaacctcacgtacaggcagctgctggagcggtgcgtggaggaccccgagacgggcttgcgccttctgccactgaaaggggcggagaaggctgaggtggtggagaccacgcaggtgtacactgaggaggagacaagaagggcatttgaagagacacagatcgacattcccggcggcggcagccacggcggctccaccatgtccctgtgggaggtgatgcagtcggacctgatccccgaggagcagcgggcccagctgatggctgacttccaggccggccgggtgaccaaggaacgcatgatcatcatcatcatcgagatcattgagaagacagagatcatccgccagcagggtctggcctcctacgactacgtgcgccgccgcctcacggctgaggacctgttcgaggctcggatcatctctctcgagacctacaacctgctccgggagggcaccaggagcctccgtgaggctctcgaggcggagtccgcctggtgctacctctatggcacgggctccgtggctggtgtctacctgcccggttccaggcagacactgagcatctaccaggctctcaagaaagggctgctgagtgccgaggtggcccgcctgctgctggaggcacaggcagccacaggcttcctgctggacccggtgaagggggagcggctgactgtggatgaggctgtgcggaagggcctcgtggggcccgagctgcacgaccgcctgctctcggctgagcgggcggtcaccggctaccgtgacccctacaccgagcagaccatctcgctcttccaggccatgaagaaggagctgatccctactgaggaggccctgcggctgctggatgcccagctggccaccggcggcatcgtggacccccgcctgggcttccaccttcccctggaggtggcttaccagcgtggctacctcaacaaggacacgcacgaccagctgtcagagcccagcgaggtgcgcagctacgtggacccgtccaccgacgagcgcctcagctacacgcagctgctcaggcggtgccgtcgtgacgacggcaccggccagctgctcctgccactgtcggacgcccgcaagctgaccttccgtggcctgcggaagcagatcaccatggaggagctggtgcgctcgcaggtcatggacgaggccacggcgctgcagctgcgggagggcctgacctccatcgaggaggtcaccaagaacttgcagaagttcctggaaggcaccagctgcatcgctggtgtcttcgtggacgccaccaaggaacggctctcggtgtaccaggccatgaagaagggcatcatccgccccggcacagcctttgagctcctggaggcgcaggcggccaccggttacgtcatcgaccccatcaagggactgaagctgacggtggaggaggctgtgcgtatgggcattgtgggccccgagttcaaggacaagctgctgtcggccgagcgcgccgtcactgggtacaaggacccctactctgggaagctcatctccctcttccaggccatgaagaagggcctgatcctgaaggaccatggcatccgcctgctggaggcccagatcgccacgggcggcatcatcgaccctgaggagagccaccggctgcccgtggaggtggcctacaagcgcggcctcttcgatgaggagatgaacgagatcctgaccgacccctcggacgacaccaagggcttctttgaccctaacacggaggagaacctcacctacctgcagctgatggagcgttgtatcactgacccccagacgggcctgtgtctcttgccgctgaaggagaagaagcgggagcggaagacgtcctccaagtcctccgtgcgcaagcgccgagtggtcatcgtggaccccgagacgggcaaggagatgtcagtgtacgaggcctaccgcaagggcctgattgaccaccagacgtacctggagctgtccgagcaggagtgcgagtgggaggagatcaccatctcctcctcggacggcgtggtcaagtccatgatcatcgaccgccgctccgggcgccagtacgacatcgatgatgccatcgccaagaacctcatcgaccgctcggcactggaccagtaccgcgccggcacgctctccatcaccgagttcgccgacatgctctcgggcaacgccggtggtttccgctcccgttcctcctcggtgggatcctcctcctcctaccccatcagccccgccgtctccaggacccagctggcctcctggtcagaccccactgaggagacgggccccgtggctggcatcctggacacggagacgctggagaaggtgtccatcaccgaggccatgcaccggaacctggtggataacatcacggggcagcggctgctggaggcgcaggcctgcaccgggggcatcatcgaccccagcaccggtgagcgcttccctgtcaccgacgccgtcaacaagggcctggtggacaagatcatggtggaccgcatcaacctggcccagaaggccttctgcggcttcgaggacccacgcaccaagaccaagatgtcggccgcccaggccctgaagaagggctggctctactacgaggccggccagcgcttcctggaggtgcagtacctgaccggcggcttgatcgagcccgacacgccgggccgcgtgcccctggacgaggccctgcagcgcggcacggtggacgcccgcaccgcacagaagctgcgtgacgtgggcgcctactccaagtacctcacctgccctaagaccaagctcaagatctcctataaggacgcgctggaccgcagcatggtggaggagggcacggggctgcggctgctggaggctgccgcgcagtccaccaagggctactacagcccctacagcgtcagcggctccggctctaccgctggctcccgcaccggctcgcgcaccggctcccgggccggctcccgccgcggcagctttgacgccaccggctccggcttctccatgaccttctcttcatcctcctactcctcctcgggctacggccgccgctacgcctcggggtcctcggcctccctggggggccctgagtctgccgtggcctgaggctgcctgcgcccaccccgctctgcatgcggcccagcccggctcccaccgaggcgcgggggccgttttcaacgcttaaaggtgtcttcctcccaagtggtgcctaaagtttaaccaaaaagaccagactaatatattaatatatatctgctgtccagacagcctgtatcttgggggacagggctggcccagccctgctggccgcctcaccccctcgggtctcctcactcccttctacctgccactcacacagccaggtgccttggagggtcccaagctgggccccagcccaccctcctgtcttcccagggtagcccgcctgccagtcctagctgcacagggcagctgggcccaaccctgtctgtagagggccctggtgtttctagcactggcctgcacggtgggccttgctggggacggggggccccagtcagcctctctcccagtctacccagagaagccccttccccatgggaagacgaggccctcgggcccagcccccacagtgctgtctgatctgtgctttccagctcaccccccacactcactcctgagacccctggcctccggcgtcagcctccagcctctgttcccctagtaagtgccttccatgtcggcctctaaccccaggccccgaggacccagacccagtggggaggcggacgttccagccggcatggctgggaactgcagacctgtcctcctggtgggtccaggggcccctccagcttgtggagccccacactggggtgccgcctgcccgtctctctcccatggagccccagccccctttgggcccagggacaccagccaggctctgtgctgaccctcctgttgcacccagccctggtctcagcagcgaccacccctgcctccaccctctgagctttgcatgttccactaaccccgggcgggtggcaggtggaggtgtcaggctgctggcgcctctgcaagggcagaacactaacctgaccgtgggcggggccttgcggtatccgcccccaataaaagcaattccaaccttagtctggctgcggcggcagagctgaagtgagcggagccaccaggaggccatgtcgggtgaggacgctgaggtccgggcagtctctgaagatgtctccaatggaagcagtggctcgcccagccctggggacacactgccctggaaccttgggaaaacgcagcggagccggcgcagcgggggtggcgctgggagcaacgggagtgtcctggacccagctgagcgggcggtcattcgcatcgcagatgagcgggatcgtgtgcagaagaaaaccttcaccaagtgggtcaacaagcacctcatcaaggcccagaggcacatcagtgacctgtatgaagacctccgcgatggccacaacctcatctccctgctggaggtcctctcgggggacagcctgccccgggagaaggggaggatgcgtttccacaagctgcagaatgtccagattgccctggactacctccggcaccgccaggtgaagctggtgaacatcaggaatgatgacatcgctgacggcaaccccaagctgacccttggcctcatctggacaatcattctgcacttccagatctcagatatccaggtgagtgggcagtcggaggacatgacggccaaggagaagctgctgctgtggtcgcagcgaatggtggaggggtaccagggcctgcgatgcgacaacttcacctccagctggagagacggccgcctcttcaatgccatcatccaccggcacaagcccctgctcatcgacatgaacaaggtgtaccggcagaccaacctggagaacctggaccaggccttctctgtggcggagcgggacctgggagtgacgcggctcctggaccctgaggacgtggatgtccctcagcccgacgagaagtccatcatcacctacgtctcgtcgctgtatgacgccatgccccgcgtgccggacgtgcaggatggggtgagggccaacgagctgcagctgcgctggcaggagtaccgggagctggtgctgctgctgcttcagtggatgcgacaccacacggccgcctttgaggaacgcaggttcccctccagcttcgaggagattgagatcctgtggtctcagttcctgaagtttaaggagatggagctaccagccaaggaggccgacaagaacaggtccaagggcatctaccaatccctggagggagcggtgcaagcaggccagctcaaggtgccccctggctaccacccgctggatgtggagaaggagtggggcaagctgcacgtggccatcctggagcgggagaagcagctccgcagcgagtttgagaggctggagtgtcttcagcgcatcgtgaccaagctgcagatggaggcggggctgtgtgaggagcagctgaaccaggccgacgccctgctgcagtcggatgtccggctgctggctgcaggcaaagtgccacagcgggcgggggaggtggaacgggacttggacaaggcggatagcatgatccggctgctcttcaacgacgtgcagaccctcaaggatggacggcacccgcagggcgagcagatgtaccgcagggtgtaccgtctgcacgagcgcctggtagccatccgcaccgagtacaacctacggctgaaggcaggcgtggcggcccctgcaacccaggtggcccaggtgactctgcagagtgtgcagaggcgccccgagctggaggactccactctgcgctacctgcaggacctgctggcctgggtggaggagaaccagcaccgtgtggatggcgctgagtggggtgtggacctgcccagcgtggaggcgcagctgggcagccaccgaggcctgcaccagtccatcgaagaattccgggccaagatcgagcgggcacggagtgacgagggccagctctcccccgccacccggggtgcctaccgtgactgcctgggtcggctggacctgcagtacgccaagctgctgaactcctccaaggcccgcctcaggtccctggagagcttgcacagctttgtggcagccgccactaaggagctaatgtggctgaatgagaaggaggaggaggaggtgggcttcgactggagcgaccgcaacaccaacatgaccgccaagaaggagagctactcggcgctgatgcgggagctggagctgaaggagaagaagatcaaggagctccaaaatgctggggaccggctgctgcgggaggaccacccggcccggcccacggtggagtccttccaggcggccctgcagacgcagtggagctggatgctacagctgtgctgctgtatcgaggcacacctgaaggagaacgctgcctactttcagttcttctcagatgtgcgggaggccgaggggcagttgcagaagctgcaggaggcactgcgtaggaaatacagttgtgatcgctccgccaccgtcacccggctggaggacctgctgcaggatgcccaggacgagaaggaacagctgaacgagtacaagggccacctctcaggcctggccaagcgggccaaggccgtcgtgcagctgaagccccgccacccagcccaccccatgcggggccgcctgcccctgctggccgtgtgcgactataagcaggtggaggtgactgtgcacaagggtgacgagtgccagctggtgggccctgcacagccgtcccactggaaggtgctcagcagctccggcagcgaggccgccgtgccctccgtgtgcttcctggtgcccccgcccaaccaggaggcccaggaggccgtcaccaggctggaggcccagcaccaggccctggtcacgctgtggcaccagttgcacgtggacatgaagagccttctggcctggcagagccttcgccgcgacgtgcagctcatccgctcctggtccctggccacgttccgcaccctgaagccagaggagcagcgccaagccctgcacagcctggagctgcactaccaggccttcctgcgggacagccaggacgcgggcggcttcggacccgaggaccggctgatggctgagcgcgagtacggctcctgcagccaccactaccagcagctgctgcagagcctggaacagggtgcacaggaagagtctcgctgccagcgctgcatctccgagctcaaagacatccggctgcagctggaggcctgtgagacgcgcaccgtgcaccgcctgcggctgccgctggacaaagagccggcacgggagtgtgcccagcgcatcgccgagcagcagaaggcacaggcagaggtggaggggctgggcaagggggtcgcccggctctctgccgaggccgagaaggtcttggccctaccagagccatcgcctgcggcccccacgctgcgctcggagctggagctgacgctgggcaagctggagcaggtccgcagcctgtctgccatctacctggagaagctcaagaccatcagcctggtgatccgcggcacgcagggggccgaggaggtgctcagggcccacgaggagcagctcaaggaggcccaggccgtgccggccaccctcccggagctcgaggccaccaaggcctctctgaagaagctgcgggcccaggccgaggcacagcagcccacgttcgacgccctgcgggatgagctgcggggggcacaggaggtgggggagcgactgcagcagcggcacggggagcgggacgtggaggtggagcgctggcgggagcgggtcgcccagttgcttgagcgctggcaggctgtgctggcccagaccgacgtgcggcagcgcgagctcgagcaactgggccgccagctgcgttactaccgcgagagtgcagaccccttgggcgcctggctgcaggacgccaggcggcggcaggagcagatccaggccatgccgctggccgacagccaggctgtgcgggagcagctgcggcaggagcaggccctgctggaggagatcgagcgccacggcgagaaggtcgaggagtgccagaggtttgcgaaacagtacatcaacgccatcaaggactatgaactccagctggtgacgtacaaggcgcagcttgagccggtggcctccccggccaagaagcccaaggtccagtcgggatcagagagtgtcatccaggagtacgtggacctgcgtacgcactacagcgagctgaccacactgacgagccagtacatcaagttcatcagcgagactctgcggcgcatggaggaggaggagaggctggctgagcagcagcgggcagaggagcgcgagcggctggccgaggtggaggccgcgctggagaagcagcggcagctggccgaggcgcacgcccaggcaaaggcacaggcggagcgggaggcgaaggagctgcagcagcgcatgcaggaggaggtggtgcggcgggaggaggcggcggtggacgcgcagcagcagaagcgcagcattcaggaggagctgcagcagctgcggcagagctcggaggcggagatccaggccaaggcccggcaggcagaggcggctgagcgcagccggctgcgcatcgaggaggagatccgcgtggtgcgcctgcagttggaggccaccgagcgccagcgtggcggggctgagggggagctgcaggcactgcgtgcacgggcggaggaggctgaggcacaaaagcgacaggcgcaggaggaggccgagcgcttgcggaggcaggtgcaggacgagagccagcgtaagcggcaggcggaggtggagctggcctcgcgcgtgaaggccgaggccgaggcggcgcgcgagaagcagcgggccctgcaggccctggaggagctgcggctgcaggcggaggaggcggagcggcgcctgcggcaggccgaggtggagcgagcgcggcaggtacaggtggccctggagacggcgcagcgcagtgcagaggcggagctgcagagcaaacgcgcctccttcgccgagaagacggcacagctggagcgctccctgcaggaggaacacgtggctgtggcacagctgcgggaggaggctgagcggcgggcacagcagcaggccgaggccgagcgggcgcgcgaggaggcagagcgggagctggagcgctggcagctcaaggccaacgaggcgctacggctgcggctgcaggcggaggaggtggcgcagcagaagagcctggcgcaggccgaggctgagaagcagaaggaggaggcggagcgcgaggcgcggcggcgcggcaaggcggaggagcaggccgtccggcagcgggagctggctgaacaagagctggagaagcagcggcagctggcggaaggcaccgcgcagcagcgcctggccgcggagcaggagttgatccggctgcgggccgagacggagcagggggagcagcagcggcagctgctggaggaggagctggcccggctgcagcgtgaggcggctgcagccacgcagaaacggcaggagctggaagccgagctggccaaggtgcgggccgagatggaggtgctgctggccagcaaggcgagggctgaggaggagtcgcgctccaccagcgagaagtccaagcagaggctggaggccgaggccggccggttccgcgagctggccgaggaggccgcccgcctgcgtgccctggcggaagaggccaagcggcagcggcagctggccgaggaagacgcggcgcggcagcgggccgaggcggagcgggtgcttgcggagaagctggccgccatcggcgaggccacgcggctcaagacggaggcggagatcgcgctcaaggagaaggaggcggagaacgagcgcctgcggcggctggcggaggacgaggccttccagcggcggcggctggaggagcaggccgcgcaacacaaggctgacatcgaggagcgcctggcccagctgcgcaaggcatcggacagcgagctggagcggcagaaggggctggtggaggacacgctgaggcagcggcggcaggtggaggaggagatcctggcgctgaaggcgagcttcgagaaggcggccgctggcaaggcggagctggagctggagctgggacgcatccgcagcaacgcggaggacacgctgcgcagcaaggagcaggccgagctggaggctgcgaggcagcggcagctggcggcggaggaggagcggcggcgccgtgaggctgaggagcgcgtgcagaagagcctggcggccgaggaggaggccgcacggcagcggaaggcggcgctggaggaagtcgagcggctgaaagccaaggtggaggaggcgcggcgcctgcgggagcgagcggagcaggagtcggcgcggcagctgcagctggcccaggaggccgcccagaagcggctgcaggcggaagagaaggcacacgccttcgcggtgcagcagaaggagcaggagctacagcagacgctgcagcaggagcagagcgtgctggaccagctgcgcggcgaggcggaggcggcccggcgggcggctgaggaggcggaggaggcccgggtgcaggcggagcgtgaggcggcgcagtcccggcggcaggtggaagaggccgagcggctgaagcagtcggcagaggagcaggcacaggcccgggctcaggcacaggcggctgcagagaagctgcgcaaggaggccgagcaagaggcggcgcggcgggcacaggcggagcaggcggccctgcggcagaagcaggcagctgacgcggagatggagaagcataagaaattcgccgagcagacgctgcggcagaaggcgcaggtggagcaggagctgacaacactgcggctgcagctggaggagaccgaccaccagaagaacctgctggacgaggagctgcagcggctgaaggcggaggccacggaggccgcacgccagcgcagccaggtggaggaggagctcttctcggtgcgcgtgcagatggaggagctgagcaagctcaaggcacgcatcgaggctgagaaccgcgcactcatcttgcgtgacaaggacaatacgcagcgcttcctgcaggaggaggctgagaagatgaagcaggtggcggaggaggccgcgcggctgagtgtggcggcccaagaggctgcgcgactgcggcagctggcagaggaggacctggcacagcagcgggccttggcagagaagatgctcaaggagaagatgcaggcggtgcaggaggccacgcgactcaaggctgaggcggaactgctgcagcagcagaaggagcttgcgcaggagcaggcgcggcggctgcaggaggacaaggagcagatggcgcagcagctggcggaggagacgcagggcttccagcggacgctggaggccgagcggcagcggcagctggagatgagcgctgaggctgagcgcctcaagctgcgtgtggccgagatgagccgagcccaggcccgcgctgaggaggacgcccagcgcttccggaagcaggcggaggagatcggtgagaagctgcaccgcacggagctcgccacccaggagaaggtgaccctggtgcagacactggagatccagcgacagcagagtgaccatgatgccgagcgcctgcgggaggccatcgctgagctggagcgtgagaaggagaagctccaacaggaggccaaactgctgcagctcaagtctgaggagatgcagacggtgcagcaggagcagctgctgcaggagacgcaggccctgcagcaaagcttcctctctgaaaaggacagcctgctacagcgggagcgcttcatcgagcaggagaaggccaagctggagcagctcttccaggacgaggtggccaaggcacagcagctgcgtgaggagcagcagcggcagcagcagcagatggagcaggaacggcagcggctggtggccagcatggaggaggcgcggcggcggcagcatgaggccgaggagggcgtgcggcgcaagcaggaggagctgcagcagctggagcagcagcggcggcagcaggaggagctgctggctgaggagaaccagaggctgcgtgagcagctgcagctcctggaggagcagcaccgggccgcgctggcgcactcagaggaggtcactgcctcgcaggtggctgccacaaagaccctgcccaatggccgggatgcacttgatggccccgcggcagaggcagagccggagcacagcttcgatggcctgcggcggaaggtgtcagctcagaggctgcaggaggccggcatcctgagtgcggaggagctgcagcggttggcgcagggccacaccacggtggacgagctcgcacggcgggaagacgtgcgccactacctgcagggccgcagcagtatcgcagggctgttgctgaaggccaccaatgagaagctgagtgtttacgccgccctgcagaggcagctgctgagtcccggcacggccctcatcctgctggaggcgcaggcggcctcaggcttcctgctggaccctgtgcggaaccggcggctgaccgtcaacgaggctgtgaaggagggtgtggtgggccccgagctgcaccacaagctgctgtcggccgagcgcgccgtcactggctacaaggacccctacactggccagcagatctctctcttccaagccatgcagaagggcctcatcgtccgggagcacggcatccgcctgctggaggcccagatcgccacgggcggcgttatcgaccccgtgcacagccaccgcgtgcccgtggacgtggcctaccggcgcggctacttcgacgaggagatgaaccgcgtcctggcggaccccagcgacgacaccaagggcttctttgaccccaacacgcacgagaacctcacgtacctgcagctactggagcgctgcgtggaggaccccgagacgggcctgtgccttctgccactcacggataaggctgccaagggcggggagctggtctacactgactccgaggcccgggacgtctttgagaaggccaccgtgtctgcgccgttcggcaagttccagggcaagacggtgaccatttgggagatcatcaactcggaatacttcacggcagagcagcggcgggacctgctgcggcagttccgcacgggccggatcacagtggagaagatcatcaagatcatcatcacggtggtggaggagcaggagcagaagggccggctttgctttgagggcctgcgcagcctggtgccagccgccgagctgctggagagcagggtcatcgaccgcgagctctaccagcagctgcagcgaggtgagcgctctgtgcgagacgtagccgaggtggacactgtgcggcgggctctccggggtgccaacgtcatcgcgggtgtatggctggaggaggcggggcagaagctgagtatctacaatgccctgaagaaagacctgctgccatccgacatggccgtggccctgttggaagcccaggccggcaccgggcacatcatcgaccccgccaccagcgcccggctgaccgtggacgaggcagtgcgtgctggcctggtgggccccgagtttcatgagaagctgctatcagccgagaaggctgtgacagggtacagggacccctacacagggcagagcgtctccctgttccaggccctgaagaagggcctcattccccgggagcagggcctgcgcctgttggacgcccagctgtccacgggcggcatcgtggaccccagcaagagccaccgcgtgcccctggatgtcgcctgcgcccgaggctgcctggatgaggagaccagcagggccctgtcggcaccaagggccgacgccaaggcctacagtgaccccagcacaggggagccggccacctacggcgagctccagcagcggtgccggcccgaccagctgaccgggctgagcctgctgccgctctcagaaaaggctgctcgggcccggcaggaggagctctactcagagctgcaggcccgtgagacctttgaaaagaccccggttgaggtccccgtgggtggcttcaagggcaggacggtgacggtgtgggagctcatcagctctgagtacttcactgcggagcagcggcaggagctgttgcgtcagttccgcacgggcaaggtcaccgtggagaaggtcatcaagattctcattaccatcgtggaggaggtggagaccctgcggcaggagaggctgtccttcagcggcctccgtgcccctgtgccagccagcgagctcctggcttccggggtcctcagcagagcccagtttgagcagctcaaggacggcaagacgacggtcaaggacctttcggagctgggctccgtgcggacgctgctgcagggcagtggctgcctcgccggcatctacctggaggacaccaaggagaaggtgtccatctacgaggccatgcgccggggcctgctgagagccacaacggctgcgctcctgctggaggcgcaggcggccactggcttcctggtggaccccgtgcggaaccagcgcctgtatgtccacgaggccgtgaaggcgggcgtggtgggccccgagcttcacgagcagctgctgtctgccgagaaggccgtcaccggctacagagacccctactcgggcagcaccatctccctcttccaggccatgcagaagggcctggttctccggcagcacggcatccgcctgctggaggcccagatcgccacgggcggcatcatcgaccccgtgcacagccaccgcgtgcctgtggacgtggcctaccagcgcggctacttcagtgaggagatgaaccgcgtcctggcggaccccagcgacgacaccaagggcttctttgaccccaacacgcatgagaacctcacgtacaggcagctgctggagcggtgcgtggaggaccccgagacgggcttgcgccttctgccactgaaaggggcggagaaggctgaggtggtggagaccacgcaggtgtacactgaggaggagacaagaagggcatttgaagagacacagatcgacattcccggcggcggcagccacggcggctccaccatgtccctgtgggaggtgatgcagtcggacctgatccccgaggagcagcgggcccagctgatggctgacttccaggccggccgggtgaccaaggaacgcatgatcatcatcatcatcgagatcattgagaagacagagatcatccgccagcagggtctggcctcctacgactacgtgcgccgccgcctcacggctgaggacctgttcgaggctcggatcatctctctcgagacctacaacctgctccgggagggcaccaggagcctccgtgaggctctcgaggcggagtccgcctggtgctacctctatggcacgggctccgtggctggtgtctacctgcccggttccaggcagacactgagcatctaccaggctctcaagaaagggctgctgagtgccgaggtggcccgcctgctgctggaggcacaggcagccacaggcttcctgctggacccggtgaagggggagcggctgactgtggatgaggctgtgcggaagggcctcgtggggcccgagctgcacgaccgcctgctctcggctgagcgggcggtcaccggctaccgtgacccctacaccgagcagaccatctcgctcttccaggccatgaagaaggagctgatccctactgaggaggccctgcggctgctggatgcccagctggccaccggcggcatcgtggacccccgcctgggcttccaccttcccctggaggtggcttaccagcgtggctacctcaacaaggacacgcacgaccagctgtcagagcccagcgaggtgcgcagctacgtggacccgtccaccgacgagcgcctcagctacacgcagctgctcaggcggtgccgtcgtgacgacggcaccggccagctgctcctgccactgtcggacgcccgcaagctgaccttccgtggcctgcggaagcagatcaccatggaggagctggtgcgctcgcaggtcatggacgaggccacggcgctgcagctgcgggagggcctgacctccatcgaggaggtcaccaagaacttgcagaagttcctggaaggcaccagctgcatcgctggtgtcttcgtggacgccaccaaggaacggctctcggtgtaccaggccatgaagaagggcatcatccgccccggcacagcctttgagctcctggaggcgcaggcggccaccggttacgtcatcgaccccatcaagggactgaagctgacggtggaggaggctgtgcgtatgggcattgtgggccccgagttcaaggacaagctgctgtcggccgagcgcgccgtcactgggtacaaggacccctactctgggaagctcatctccctcttccaggccatgaagaagggcctgatcctgaaggaccatggcatccgcctgctggaggcccagatcgccacgggcggcatcatcgaccctgaggagagccaccggctgcccgtggaggtggcctacaagcgcggcctcttcgatgaggagatgaacgagatcctgaccgacccctcggacgacaccaagggcttctttgaccctaacacggaggagaacctcacctacctgcagctgatggagcgttgtatcactgacccccagacgggcctgtgtctcttgccgctgaaggagaagaagcgggagcggaagacgtcctccaagtcctccgtgcgcaagcgccgagtggtcatcgtggaccccgagacgggcaaggagatgtcagtgtacgaggcctaccgcaagggcctgattgaccaccagacgtacctggagctgtccgagcaggagtgcgagtgggaggagatcaccatctcctcctcggacggcgtggtcaagtccatgatcatcgaccgccgctccgggcgccagtacgacatcgatgatgccatcgccaagaacctcatcgaccgctcggcactggaccagtaccgcgccggcacgctctccatcaccgagttcgccgacatgctctcgggcaacgccggtggtttccgctcccgttcctcctcggtgggatcctcctcctcctaccccatcagccccgccgtctccaggacccagctggcctcctggtcagaccccactgaggagacgggccccgtggctggcatcctggacacggagacgctggagaaggtgtccatcaccgaggccatgcaccggaacctggtggataacatcacggggcagcggctgctggaggcgcaggcctgcaccgggggcatcatcgaccccagcaccggtgagcgcttccctgtcaccgacgccgtcaacaagggcctggtggacaagatcatggtggaccgcatcaacctggcccagaaggccttctgcggcttcgaggacccacgcaccaagaccaagatgtcggccgcccaggccctgaagaagggctggctctactacgaggccggccagcgcttcctggaggtgcagtacctgaccggcggcttgatcgagcccgacacgccgggccgcgtgcccctggacgaggccctgcagcgcggcacggtggacgcccgcaccgcacagaagctgcgtgacgtgggcgcctactccaagtacctcacctgccctaagaccaagctcaagatctcctataaggacgcgctggaccgcagcatggtggaggagggcacggggctgcggctgctggaggctgccgcgcagtccaccaagggctactacagcccctacagcgtcagcggctccggctctaccgctggctcccgcaccggctcgcgcaccggctcccgggccggctcccgccgcggcagctttgacgccaccggctccggcttctccatgaccttctcttcatcctcctactcctcctcgggctacggccgccgctacgcctcggggtcctcggcctccctggggggccctgagtctgccgtggcctgaggctgcctgcgcccaccccgctctgcatgcggcccagcccggctcccaccgaggcgcgggggccgttttcaacgcttaaaggtgtcttcctcccaagtggtgcctaaagtttaaccaaaaagaccagactaatatattaatatatatctgctgtccagacagcctgtatcttgggggacagggctggcccagccctgctggccgcctcaccccctcgggtctcctcactcccttctacctgccactcacacagccaggtgccttggagggtcccaagctgggccccagcccaccctcctgtcttcccagggtagcccgcctgccagtcctagctgcacagggcagctgggcccaaccctgtctgtagagggccctggtgtttctagcactggcctgcacggtgggccttgctggggacggggggccccagtcagcctctctcccagtctacccagagaagccccttccccatgggaagacgaggccctcgggcccagcccccacagtgctgtctgatctgtgctttccagctcaccccccacactcactcctgagacccctggcctccggcgtcagcctccagcctctgttcccctagtaagtgccttccatgtcggcctctaaccccaggccccgaggacccagacccagtggggaggcggacgttccagccggcatggctgggaactgcagacctgtcctcctggtgggtccaggggcccctccagcttgtggagccccacactggggtgccgcctgcccgtctctctcccatggagccccagccccctttgggcccagggacaccagccaggctctgtgctgaccctcctgttgcacccagccctggtctcagcagcgaccacccctgcctccaccctctgagctttgcatgttccactaaccccgggcgggtggcaggtggaggtgtcaggctgctggcgcctctgcaagggcagaacactaacctgaccgtgggcggggccttgcggtatccgcccccaataaaagcaattccaaccttagtctggctgcggcggcagagctgaagtgagcggagccaccaggaggccatgtcgggtgaggacgctgaggtccgggcagtctctgaagatgtctccaatggaagcagtggctcgcccagccctggggacacactgccctggaaccttgggaaaacgcagcggagccggcgcagcgggggtggcgctgggagcaacgggagtgtcctggacccagctgagcgggcggtcattcgcatcgcagatgagcgggatcgtgtgcagaagaaaaccttcaccaagtgggtcaacaagcacctcatcaaggcccagaggcacatcagtgacctgtatgaagacctccgcgatggccacaacctcatctccctgctggaggtcctctcgggggacagcctgccccgggagaaggggaggatgcgtttccacaagctgcagaatgtccagattgccctggactacctccggcaccgccaggtgaagctggtgaacatcaggaatgatgacatcgctgacggcaaccccaagctgacccttggcctcatctggacaatcattctgcacttccagatctcagatatccaggtgagtgggcagtcggaggacatgacggccaaggagaagctgctgctgtggtcgcagcgaatggtggaggggtaccagggcctgcgatgcgacaacttcacctccagctggagagacggccgcctcttcaatgccatcatccaccggcacaagcccctgctcatcgacatgaacaaggtgtaccggcagaccaacctggagaacctggaccaggccttctctgtggcggagcgggacctgggagtgacgcggctcctggaccctgaggacgtggatgtccctcagcccgacgagaagtccatcatcacctacgtctcgtcgctgtatgacgccatgccccgcgtgccggacgtgcaggatggggtgagggccaacgagctgcagctgcgctggcaggagtaccgggagctggtgctgctgctgcttcagtggatgcgacaccacacggccgcctttgaggaacgcaggttcccctccagcttcgaggagattgagatcctgtggtctcagttcctgaagtttaaggagatggagctaccagccaaggaggccgacaagaacaggtccaagggcatctaccaatccctggagggagcggtgcaagcaggccagctcaaggtgccccctggctaccacccgctggatgtggagaaggagtggggcaagctgcacgtggccatcctggagcgggagaagcagctccgcagcgagtttgagaggctggagtgtcttcagcgcatcgtgaccaagctgcagatggaggcggggctgtgtgaggagcagctgaaccaggccgacgccctgctgcagtcggatgtccggctgctggctgcaggcaaagtgccacagcgggcgggggaggtggaacgggacttggacaaggcggatagcatgatccggctgctcttcaacgacgtgcagaccctcaaggatggacggcacccgcagggcgagcagatgtaccgcagggtgtaccgtctgcacgagcgcctggtagccatccgcaccgagtacaacctacggctgaaggcaggcgtggcggcccctgcaacccaggtggcccaggtgactctgcagagtgtgcagaggcgccccgagctggaggactccactctgcgctacctgcaggacctgctggcctgggtggaggagaaccagcaccgtgtggatggcgctgagtggggtgtggacctgcccagcgtggaggcgcagctgggcagccaccgaggcctgcaccagtccatcgaagaattccgggccaagatcgagcgggcacggagtgacgagggccagctctcccccgccacccggggtgcctaccgtgactgcctgggtcggctggacctgcagtacgccaagctgctgaactcctccaaggcccgcctcaggtccctggagagcttgcacagctttgtggcagccgccactaaggagctaatgtggctgaatgagaaggaggaggaggaggtgggcttcgactggagcgaccgcaacaccaacatgaccgccaagaaggagagctactcggcgctgatgcgggagctggagctgaaggagaagaagatcaaggagctccaaaatgctggggaccggctgctgcgggaggaccacccggcccggcccacggtggagtccttccaggcggccctgcagacgcagtggagctggatgctacagctgtgctgctgtatcgaggcacacctgaaggagaacgctgcctactttcagttcttctcagatgtgcgggaggccgaggggcagttgcagaagctgcaggaggcactgcgtaggaaatacagttgtgatcgctccgccaccgtcacccggctggaggacctgctgcaggatgcccaggacgagaaggaacagctgaacgagtacaagggccacctctcaggcctggccaagcgggccaaggccgtcgtgcagctgaagccccgccacccagcccaccccatgcggggccgcctgcccctgctggccgtgtgcgactataagcaggtggaggtgactgtgcacaagggtgacgagtgccagctggtgggccctgcacagccgtcccactggaaggtgctcagcagctccggcagcgaggccgccgtgccctccgtgtgcttcctggtgcccccgcccaaccaggaggcccaggaggccgtcaccaggctggaggcccagcaccaggccctggtcacgctgtggcaccagttgcacgtggacatgaagagccttctggcctggcagagccttcgccgcgacgtgcagctcatccgctcctggtccctggccacgttccgcaccctgaagccagaggagcagcgccaagccctgcacagcctggagctgcactaccaggccttcctgcgggacagccaggacgcgggcggcttcggacccgaggaccggctgatggctgagcgcgagtacggctcctgcagccaccactaccagcagctgctgcagagcctggaacagggtgcacaggaagagtctcgctgccagcgctgcatctccgagctcaaagacatccggctgcagctggaggcctgtgagacgcgcaccgtgcaccgcctgcggctgccgctggacaaagagccggcacgggagtgtgcccagcgcatcgccgagcagcagaaggcacaggcagaggtggaggggctgggcaagggggtcgcccggctctctgccgaggccgagaaggtcttggccctaccagagccatcgcctgcggcccccacgctgcgctcggagctggagctgacgctgggcaagctggagcaggtccgcagcctgtctgccatctacctggagaagctcaagaccatcagcctggtgatccgcggcacgcagggggccgaggaggtgctcagggcccacgaggagcagctcaaggaggcccaggccgtgccggccaccctcccggagctcgaggccaccaaggcctctctgaagaagctgcgggcccaggccgaggcacagcagcccacgttcgacgccctgcgggatgagctgcggggggcacaggaggtgggggagcgactgcagcagcggcacggggagcgggacgtggaggtggagcgctggcgggagcgggtcgcccagttgcttgagcgctggcaggctgtgctggcccagaccgacgtgcggcagcgcgagctcgagcaactgggccgccagctgcgttactaccgcgagagtgcagaccccttgggcgcctggctgcaggacgccaggcggcggcaggagcagatccaggccatgccgctggccgacagccaggctgtgcgggagcagctgcggcaggagcaggccctgctggaggagatcgagcgccacggcgagaaggtcgaggagtgccagaggtttgcgaaacagtacatcaacgccatcaaggactatgaactccagctggtgacgtacaaggcgcagcttgagccggtggcctccccggccaagaagcccaaggtccagtcgggatcagagagtgtcatccaggagtacgtggacctgcgtacgcactacagcgagctgaccacactgacgagccagtacatcaagttcatcagcgagactctgcggcgcatggaggaggaggagaggctggctgagcagcagcgggcagaggagcgcgagcggctggccgaggtggaggccgcgctggagaagcagcggcagctggccgaggcgcacgcccaggcaaaggcacaggcggagcgggaggcgaaggagctgcagcagcgcatgcaggaggaggtggtgcggcgggaggaggcggcggtggacgcgcagcagcagaagcgcagcattcaggaggagctgcagcagctgcggcagagctcggaggcggagatccaggccaaggcccggcaggcagaggcggctgagcgcagccggctgcgcatcgaggaggagatccgcgtggtgcgcctgcagttggaggccaccgagcgccagcgtggcggggctgagggggagctgcaggcactgcgtgcacgggcggaggaggctgaggcacaaaagcgacaggcgcaggaggaggccgagcgcttgcggaggcaggtgcaggacgagagccagcgtaagcggcaggcggaggtggagctggcctcgcgcgtgaaggccgaggccgaggcggcgcgcgagaagcagcgggccctgcaggccctggaggagctgcggctgcaggcggaggaggcggagcggcgcctgcggcaggccgaggtggagcgagcgcggcaggtacaggtggccctggagacggcgcagcgcagtgcagaggcggagctgcagagcaaacgcgcctccttcgccgagaagacggcacagctggagcgctccctgcaggaggaacacgtggctgtggcacagctgcgggaggaggctgagcggcgggcacagcagcaggccgaggccgagcgggcgcgcgaggaggcagagcgggagctggagcgctggcagctcaaggccaacgaggcgctacggctgcggctgcaggcggaggaggtggcgcagcagaagagcctggcgcaggccgaggctgagaagcagaaggaggaggcggagcgcgaggcgcggcggcgcggcaaggcggaggagcaggccgtccggcagcgggagctggctgaacaagagctggagaagcagcggcagctggcggaaggcaccgcgcagcagcgcctggccgcggagcaggagttgatccggctgcgggccgagacggagcagggggagcagcagcggcagctgctggaggaggagctggcccggctgcagcgtgaggcggctgcagccacgcagaaacggcaggagctggaagccgagctggccaaggtgcgggccgagatggaggtgctgctggccagcaaggcgagggctgaggaggagtcgcgctccaccagcgagaagtccaagcagaggctggaggccgaggccggccggttccgcgagctggccgaggaggccgcccgcctgcgtgccctggcggaagaggccaagcggcagcggcagctggccgaggaagacgcggcgcggcagcgggccgaggcggagcgggtgcttgcggagaagctggccgccatcggcgaggccacgcggctcaagacggaggcggagatcgcgctcaaggagaaggaggcggagaacgagcgcctgcggcggctggcggaggacgaggccttccagcggcggcggctggaggagcaggccgcgcaacacaaggctgacatcgaggagcgcctggcccagctgcgcaaggcatcggacagcgagctggagcggcagaaggggctggtggaggacacgctgaggcagcggcggcaggtggaggaggagatcctggcgctgaaggcgagcttcgagaaggcggccgctggcaaggcggagctggagctggagctgggacgcatccgcagcaacgcggaggacacgctgcgcagcaaggagcaggccgagctggaggctgcgaggcagcggcagctggcggcggaggaggagcggcggcgccgtgaggctgaggagcgcgtgcagaagagcctggcggccgaggaggaggccgcacggcagcggaaggcggcgctggaggaagtcgagcggctgaaagccaaggtggaggaggcgcggcgcctgcgggagcgagcggagcaggagtcggcgcggcagctgcagctggcccaggaggccgcccagaagcggctgcaggcggaagagaaggcacacgccttcgcggtgcagcagaaggagcaggagctacagcagacgctgcagcaggagcagagcgtgctggaccagctgcgcggcgaggcggaggcggcccggcgggcggctgaggaggcggaggaggcccgggtgcagg

SEQ ID NO: 685 - DNA, 32765 bp, Homo sapiens; identical to SEQ ID NO: 677
  misc_feature (977)..(977): second gene starts at position 977

SEQ ID NO: 686 - DNA, 32765 bp, Homo sapiens; identical to SEQ ID NO: 678
  misc_feature (977)..(977): second gene starts at position 977

SEQ ID NO: 687 - DNA, 32765 bp, Homo sapiens; identical to SEQ ID NO: 679
  misc_feature (977)..(977): second gene starts at position 977

SEQ ID NO: 688 - DNA, 32765 bp, Homo sapiens; identical to SEQ ID NO: 680
  misc_feature (977)..(977): second gene starts at position 977

SEQ ID NO: 689 - DNA, 32765 bp, Homo sapiens; identical to SEQ ID NO: 681
  misc_feature (977)..(977): second gene starts at position 977

SEQ ID NO: 690 - DNA, 32765 bp, Homo sapiens; identical to SEQ ID NO: 682
  misc_feature (977)..(977): second gene starts at position 977

SEQ ID NO: 691 - DNA, 32765 bp, Homo sapiens; identical to SEQ ID NO: 683
  misc_feature (977)..(977): second gene starts at position 977

SEQ ID NO: 692 - DNA, 32765 bp, Homo sapiens; identical to SEQ ID NO: 684
  misc_feature (977)..(977): second gene starts at position 977

SEQ ID NO: 693 - DNA, 17790 bp, Homo sapiens
  misc_feature (499)..(499): second gene starts at position 499
atgggcctcctgtcggacccggttcgccggcgcgcgctcgcccgcctagtgctgcgcctcaacgcgccgttgtgcgtgctgagctacgtggcgggcatcgcctggttcttggcgctggttttcccgccgctgacccagcgcacttacatgtcggagaacgccatgggctccaccatggtggaggagcagtttgcgggcggagaccgtgcccgggcttttgcccgggacttcgccgcccaccgcaagaagtcgggggctctgccagtggcctggcttgaacggacgatgcggtcagtagggctggaggtctacacgcagagtttctcccggaaactgcccttcccagatgagacccacgagcgctatatggtgtcgggcaccaacgtgtacggcatcctgcgggccccgcgtgctgccagcaccgagtcgcttgtgctcaccgtgccctgtggctctgactctaccaacagccaggctgtggggctgctgctggcactggctgctgctggcactgctcctacccacgcagatttattccagtgaaacaacaactggaacttcaagtaactcctcccagagtacttccaacactgggttggccccaaatccaactaatgccaccaccaaggcggctggtggtgccctgcagtcaacagccagtctcttcgtggtctcactctctcttctgcatctctactcttaagagactcaggccaagaaacgtcttctaaacttccccatcttctaaacccaatccaaatggcgtctggaagtccaatgtggcaaggaaaaacaggtcttcatcgaatctactaattccacaccttttattgacacagaaaatgttgagaatcccaaatttgattgatttgaagaacatgtgagaggtttgactagatgatggatgccaatattaaatctgctggagtttcatgtacaagatgaaggagaggcaacatccaaaatagttaagacatgatttccttgaatgtggcttgagaaatatggacacttaatactaccttgaaaataagaatagaaataaaggatgtgattgtggaatggagattcagttttcatttggttcattaattctataaggccataaaacaggtaatataaaaagcttccatgattctatttatatgtacatgagaaggaacttccaggtgttactgtaattcctcaacgtattgtttcggcagcacttatttaatgccgatatactctagatgaagttttacattgttgagctattgctgttctcttgggaactgaactcactttcctcctgaggctttggatttgacattgcgtttgaccttttatgtagtaattgacatgtgccagggcaatgatgaatgagaatctacccccagatccaagcagcctgagcaactcttgattatccatattgagtcaaatggtaggcatttcctatcacctatttccattcaacaagagcactacattcatttagctaaacggattccaaagagtagaattgcattgaccgcgactaatttcaaaatgctttttattattattattttttagacagtctcactttgtcgcccaggctggagtgcagtggtgtgatctcagatcagtgtaccatttgcctcccgggctcaagcgattctcctgcctcagcctcccaagtagctgggattacaggcacctgccaccatgcccggctaatttttgtaattttagtagagacagggtttcaccatgttgcccaggctggtttcgaactcctgacctcaggtgatccacctgcctcggcctcccaaagtgctgggattacaggcttgagcccccgcgcccagccatcaaaatgctttttatttctgcatatgttgaatactttttacaattaaaaaaaaagatctgttttgaaggcaaaattgcaaatcttgaaattaagaaggcaaaaatgtaaaggagtcaaaactacaaatcaagtatttgggaagtgaagactggaagctaatttgcattaaattcacaaacttttatactctttctgtatatacttttttttctttaaaaaacaactatggatcagaatagccacatttggaatactttttgttatcagtcaatatttttagatagttagaacctggtcctaagcctaaaagtgggcttgattctgcagtaaatcttttacaactgcctcgaaacacagaaacctttttaaaaatagacactccccgaagtcttttgttcgcatggtcacacactgatgcttagatgttccagtaatctaatatggccacagtagtcttgatgaccaaagtcctttttttccatctttacaaaactacatgagaacaaacagatcgaaccgttttgaagctactgtgtgtgtgaatgaacactcttttgctttattccagaatgctgtacatctattttggattgtatattgtgtttgtgtatttacgctttgattcatagtaacttcttatggaattgatttgcattgaacacaaactgtaaataaaaagaaatggctgaaagagggtctcgccggctcgccgcgctccccaccttgcctgcgcccgcccggagccagcggttctccaagcacccagcatcctgctagacgcgccgcgcaccgacgtaggggacatgggcagagcaatggtggccaggcttgggctggggctgctgctgctggcactgctcctacccacgcagatttattccagtgaaacaacaactggaacttcaagtaactcctcccagagtacttccaacactgggttggccccaaatccaactaatgccaccaccaaggcggctggtggtgccctgcagtcaacagccagtctcttcgtggtctcactctctcttctgcatctctactcttaagagactcaggccaagaaacgtcttctaaacttccccatcttctaaacccaatccaaatggcgtctggaagtccaatgtggcaaggaaaaacaggtcttcatcgaatctactaattccacaccttttattgacacagaaaatgttgagaatcccaaatttgattgatttgaagaacatgtgagaggtttgactagatgatggatgccaatattaaatctgctggagtttcatgtacaagatgaaggagaggcaacatccaaaatagttaagacatgatttccttgaatgtggcttgagaaatatggacacttaatactaccttgaaaataagaatagaaataaaggatgtgattgtggaatggagattcagttttcatttggttcattaattctataaggccataaaacaggtaatataaaaagcttccatgattctatttatatgtacatgagaaggaacttccaggtgttactgtaattcctcaacgtattgtttcggcagcacttatttaatgccgatatactctagatgaagttttacattgttgagctattgctgttctcttgggaactgaactcactttcctcctgaggctttggatttgacattgcgtttgaccttttatgtagtaattgacatgtgccagggcaatgatgaatgagaatctacccccagatccaagcagcctgagcaactcttgattatccatattgagtcaaatggtaggcatttcctatcacctatttccattcaacaagagcactacattcatttagctaaacggattccaaagagtagaattgcattgaccgcgactaatttcaaaatgctttttattattattattttttagacagtctcactttgtcgcccaggctggagtgcagtggtgtgatctcagatcagtgtaccatttgcctcccgggctcaagcgattctcctgcctcagcctcccaagtagctgggattacaggcacctgccaccatgcccggctaatttttgtaattttagtagagacagggtttcaccatgttgcccaggctggtttcgaactcctgacctcaggtgatccacctgcctcggcctcccaaagtgctgggattacaggcttgagcccccgcgcccagccatcaaaatgctttttatttctgcatatgttgaatactttttacaattaaaaaaaaagatctgttttgaaggcaaaattgcaaatcttgaaattaagaaggcaaaaatgtaaaggagtcaaaactacaaatcaagtatttgggaagtgaagactggaagctaatttgcattaaattcacaaacttttatactctttctgtatatacttttttttctttaaaaaacaactatggatcagaatagccacatttggaatactttttgttatcagtcaatatttttagatagttagaacctggtcctaagcctaaaagtgggcttgattctgcagtaaatcttttacaactgcctcgaaacacagaaacctttttaaaaatagacactccccgaagtcttttgttcgcatggtcacacactgatgcttagatgttccagtaatctaatatggccacagtagtcttgatgaccaaagtcctttttttccatctttacaaaactacatgagaacaaacagatcgaaccgttttgaagctactgtgtgtgtgaatgaacactcttttgctttattccagaatgctgtacatctattttggattgtatattgtgtttgtgtatttacgctttgattcatagtaacttcttatggaattgatttgcattgaacacaaactgtaaataaaaagaaatggctgaaagagggtctcgccggctcgccgcgctccccaccttgcctgcgcccgcccggagccagcggttctccaagcacccagcatcctgctagacgcgccgcgcaccgacgtaggggacatgggcagagcaatggtggccaggcttgggctggggctgctgctgctggcactgctcctacccacgcagatttattccagtgaaacaacaactggaacttcaagtaactcctcccagagtacttccaacactgggttggccccaaatccaactaatgccaccaccaaggcggctggtggtgccctgcagtcaacagccagtctcttcgtggtctcactctctcttctgcatctctactcttaagagactcaggccaagaaacgtcttctaaacttccccatcttctaaacccaatccaaatggcgtctggaagtccaatgtggcaaggaaaaacaggtcttcatcgaatctactaattccacaccttttattgacacagaaaatgttgagaatcccaaatttgattgatttgaagaacatgtgagaggtttgactagatgatggatgccaatattaaatctgctggagtttcatgtacaagatgaaggagaggcaacatccaaaatagttaagacatgatttccttgaatgtggcttgagaaatatggacacttaatactaccttgaaaataagaatagaaataaaggatgtgattgtggaatggagattcagttttcatttggttcattaattctataaggccataaaacaggtaatataaaaagcttccatgattctatttatatgtacatgagaaggaacttccaggtgttactgtaattcctcaacgtattgtttcggcagcacttatttaatgccgatatactctagatgaagttttacattgttgagctattgctgttctcttgggaactgaactcactttcctcctgaggctttggatttgacattgcgtttgaccttttatgtagtaattgacatgtgccagggcaatgatgaatgagaatctacccccagatccaagcagcctgagcaactcttgattatccatattgagtcaaatggtaggcatttcctatcacctatttccattcaacaagagcactacattcatttagctaaacggattccaaagagtagaattgcattgaccgcgactaatttcaaaatgctttttattattattattttttagacagtctcactttgtcgcccaggctggagtgcagtggtgtgatctcagatcagtgtaccatttgcctcccgggctcaagcgattctcctgcctcagcctcccaagtagctgggattacaggcacctgccaccatgcccggctaatttttgtaattttagtagagacagggtttcaccatgttgcccaggctggtttcgaactcctgacctcaggtgatccacctgcctcggcctcccaaagtgctgggattacaggcttgagcccccgcgcccagccatcaaaatgctttttatttctgcatatgttgaatactttttacaattaaaaaaaaagatctgttttgaaggcaaaattgcaaatcttgaaattaagaaggcaaaaatgtaaaggagtcaaaactacaaatcaagtatttgggaagtgaagactggaagctaatttgcattaaattcacaaacttttatactctttctgtatatacttttttttctttaaaaaacaactatggatcagaatagccacatttggaatactttttgttatcagtcaatatttttagatagttagaacctggtcctaagcctaaaagtgggcttgattctgcagtaaatcttttacaactgcctcgaaacacagaaacctttttaaaaatagacactccccgaagtcttttgttcgcatggtcacacactgatgcttagatgttccagtaatctaatatggccacagtagtcttgatgaccaaagtcctttttttccatctttacaaaactacatgagaacaaacagatcgaaccgttttgaagctactgtgtgtgtgaatgaacactcttttgctttattccagaatgctgtacatctattttggattgtatattgtgtttgtgtatttacgctttgattcatagtaacttcttatggaattgatttgcattgaacacaaactgtaaataaaaagaaatggctgaaagagggtctcgccggctcgccgcgctccccaccttgcctgcgcccgcccggagccagcggttctccaagcacccagcatcctgctagacgcgccgcgcaccgacgtaggggacatgggcagagcaatggtggccaggcttgggctggggctgctgctgctggcactgctcctacccacgcagatttattccagtgaaacaacaactggaacttcaagtaactcctcccagagtacttccaacactgggttggccccaaatccaactaatgccaccaccaaggcggctggtggtgccctgcagtcaacagccagtctcttcgtggtctcactctctcttctgcatctctactcttaagagactcaggccaagaaacgtcttctaaacttccccatcttctaaacccaatccaaatggcgtctggaagtccaatgtggcaaggaaaaacaggtcttcatcgaatctactaattccacaccttttattgacacagaaaatgttgagaatcccaaatttgattgatttgaagaacatgtgagaggtttgactagatgatggatgccaatattaaatctgctggagtttcatgtacaagatgaaggagaggcaacatccaaaatagttaagacatgatttccttgaatgtggcttgagaaatatggacacttaatactaccttgaaaataagaatagaaataaaggatgtgattgtggaatggagattcagttttcatttggttcattaattctataaggccataaaacaggtaatataaaaagcttccatgattctatttatatgtacatgagaaggaacttccaggtgttactgtaattcctcaacgtattgtttcggcagcacttatttaatgccgatatactctagatgaagttttacattgttgagctattgctgttctcttgggaactgaactcactttcctcctgaggctttggatttgacattgcgtttgaccttttatgtagtaattgacatgtgccagggcaatgatgaatgagaatctacccccagatccaagcagcctgagcaactcttgattatccatattgagtcaaatggtaggcatttcctatcacctatttccattcaacaagagcactacattcatttagctaaacggattccaaagagtagaattgcattgaccgcgactaatttcaaaatgctttttattattattattttttagacagtctcactttgtcgcccaggctggagtgcagtggtgtgatctcagatcagtgtaccatttgcctcccgggctcaagcgattctcctgcctcagcctcccaagtagctgggattacaggcacctgccaccatgcccggctaatttttgtaattttagtagagacagggtttcaccatgttgcccaggctggtttcgaactcctgacctcaggtgatccacctgcctcggcctcccaaagtgctgggattacaggcttgagcccccgcgcccagccatcaaaatgctttttatttctgcatatgttgaatactttttacaattaaaaaaaaagatctgttttgaaggcaaaattgcaaatcttgaaattaagaaggcaaaaatgtaaaggagtcaaaactacaaatcaagtatttgggaagtgaagactggaagctaatttgcattaaattcacaaacttttatactctttctgtatatacttttttttctttaaaaaacaactatggatcagaatagccacatttggaatactttttgttatcagtcaatatttttagatagttagaacctggtcctaagcctaaaagtgggcttgattctgcagtaaatcttttacaactgcctcgaaacacagaaacctttttaaaaatagacactccccgaagtcttttgttcgcatggtcacacactgatgcttagatgttccagtaatctaatatggccacagtagtcttgatgaccaaagtcctttttttccatctttacaaaactacatgagaacaaacagatcgaaccgttttgaagctactgtgtgtgtgaatgaacactcttttgctttattccagaatgctgtacatctattttggattgtatattgtgtttgtgtatttacgctttgattcatagtaacttcttatggaattgatttgcattgaacacaaactgtaaataaaaagaaatggctgaaagagggtctcgccggctcgccgcgctccccaccttgcctgcgcccgcccggagccagcggttctccaagcacccagcatcctgctagacgcgccgcgcaccgacgtaggggacatgggcagagcaatggtggccaggcttgggctggggctgctgctgctggcactgctcctacccacgcagatttattccagtgaaacaacaactggaacttcaagtaactcctcccagagtacttccaacactgggttggccccaaatccaactaatgccaccaccaaggcggctggtggtgccctgcagtcaacagccagtctcttcgtggtctcactctctcttctgcatctctactcttaagagactcaggccaagaaacgtcttctaaacttccccatcttctaaacccaatccaaatggcgtctggaagtccaatgtggcaaggaaaaacaggtcttcatcgaatctactaattccacaccttttattgacacagaaaatgttgagaatcccaaatttgattgatttgaagaacatgtgagaggtttgactagatgatggatgccaatattaaatctgctggagtttcatgtacaagatgaaggagaggcaacatccaaaatagttaagacatgatttccttgaatgtggcttgagaaatatggacacttaatactaccttgaaaataagaatagaaataaaggatgtgattgtggaatggagattcagttttcatttggttcattaattctataaggccataaaacaggtaatataaaaagcttccatgattctatttatatgtacatgagaaggaacttccaggtgttactgtaattcctcaacgtattgtttcggcagcacttatttaatgccgatatactctagatgaagttttacattgttgagctattgctgttctcttgggaactgaactcactttcctcctgaggctttggatttgacattgcgtttgaccttttatgtagtaattgacatgtgccagggcaatgatgaatgagaatctacccccagatccaagcagcctgagcaactcttgattatccatattgagtcaaatggtaggcatttcctatcacctatttccattcaacaagagcactacattcatttagctaaacggattccaaagagtagaattgcattgaccgcgactaatttcaaaatgctttttattattattattttttagacagtctcactttgtcgcccaggctggagtgcagtggtgtgatctcagatcagtgtaccatttgcctcccgggctcaagcgattctcctgcctcagcctcccaagtagctgggattacaggcacctgccaccatgcccggctaatttttgtaattttagtagagacagggtttcaccatgttgcccaggctggtttcgaactcctgacctcaggtgatccacctgcctcggcctcccaaagtgctgggattacaggcttgagcccccgcgcccagccatcaaaatgctttttatttctgcatatgttgaatactttttacaattaaaaaaaaagatctgttttgaaggcaaaattgcaaatcttgaaattaagaaggcaaaaatgtaaaggagtcaaaactacaaatcaagtatttgggaagtgaagactggaagctaatttgcattaaattcacaaacttttatactctttctgtatatacttttttttctttaaaaaacaactatggatcagaatagccacatttggaatactttttgttatcagtcaatatttttagatagttagaacctggtcctaagcctaaaagtgggcttgattctgcagtaaatcttttacaactgcctcgaaacacagaaacctttttaaaaatagacactccccgaagtcttttgttcgcatggtcacacactgatgcttagatgttccagtaatctaatatggccacagtagtcttgatgaccaaagtcctttttttccatctttacaaaactacatgagaacaaacagatcgaaccgttttgaagctactgtgtgtgtgaatgaacactcttttgctttattccagaatgctgtacatctattttggattgtatattgtgtttgtgtatttacgctttgattcatagtaacttcttatggaattgatttgcattgaacacaaactgtaaataaaaagaaatggctgaaagagggtctcgccggctcgccgcgctccccaccttgcctgcgcccgcccggagccagcggttctccaagcacccagcatcctgctagacgcgccgcgcaccgacgtaggggacatgggcagagcaatggtggccaggcttgggctggggctgctgctgctggcactgctcctacccacgcagatttattccagtgaaacaacaactggaacttcaagtaactcctcccagagtacttccaacactgggttggccccaaatccaactaatgccaccaccaaggcggctggtggtgccctgcagtcaacagccagtctcttcgtggtctcactctctcttctgcatctctactcttaagagactcaggccaagaaacgtcttctaaacttccccatcttctaaacccaatccaaatggcgtctggaagtccaatgtggcaaggaaaaacaggtcttcatcgaatctactaattccacaccttttattgacacagaaaatgttgagaatcccaaatttgattgatttgaagaacatgtgagaggtttgactagatgatggatgccaatattaaatctgctggagtttcatgtacaagatgaaggagaggcaacatccaaaatagttaagacatgatttccttgaatgtggcttgagaaatatggacacttaatactaccttgaaaataagaatagaaataaaggatgtgattgtggaatggagattcagttttcatttggttcattaattctataaggccataaaacaggtaatataaaaagcttccatgattctatttatatgtacatgagaaggaacttccaggtgttactgtaattcctcaacgtattgtttcggcagcacttatttaatgccgatatactctagatgaagttttacattgttgagctattgctgttctcttgggaactgaactcactttcctcctgaggctttggatttgacattgcgtttgaccttttatgtagtaattgacatgtgccagggcaatgatgaatgagaatctacccccagatccaagcagcctgagcaactcttgattatccatattgagtcaaatggtaggcatttcctatcacctatttccattcaacaagagcactacattcatttagctaaacggattccaaagagtagaattgcattgaccgcgactaatttcaaaatgctttttattattattattttttagacagtctcactttgtcgcccaggctggagtgcagtggtgtgatctcagatcagtgtaccatttgcctcccgggctcaagcgattctcctgcctcagcctcccaagtagctgggattacaggcacctgccaccatgcccggctaatttttgtaattttagtagagacagggtttcaccatgttgcccaggctggtttcgaactcctgacctcaggtgatccacctgcctcggcctcccaaagtgctgggattacaggcttgagcccccgcgcccagccatcaaaatgctttttatttctgcatatgttgaatactttttacaattaaaaaaaaagatctgttttgaaggcaaaattgcaaatcttgaaattaagaaggcaaaaatgtaaaggagtcaaaactacaaatcaagtatttgggaagtgaagactggaagctaatttgcattaaattcacaaacttttatactctttctgtatatacttttttttctttaaaaaacaactatggatcagaatagccacatttggaatactttttgttatcagtcaatatttttagatagttagaacctggtcctaagcctaaaagtgggcttgattctgcagtaaatcttttacaactgcctcgaaacacagaaacctttttaaaaatagacactccccgaagtcttttgttcgcatggtcacacactgatgcttagatgttccagtaatctaatatggccacagtagtcttgatgaccaaagtcctttttttccatctttacaaaactacatgagaacaaacagatcgaaccgttttgaagctactgtgtgtgtgaatgaacactcttttgctttattccagaatgctgtacatctattttggattgtatattgtgtttgtgtatttacgctttgattcatagtaacttcttatggaattgatttgcattgaacacaaactgtaaataaaaagaaatggctgaaagagggtctcgccggctcgccgcgctccccaccttgcctgcgcccgcccggagccagcggttctccaagcacccagcatcctgctagacgcgccgcgcaccgacgtaggggacatgggcagagcaatggtggccaggcttgggctggggctgctgctgctggcactgctcctacccacgcagatttattccagtgaaacaacaactggaacttcaagtaactcctcccagagtacttccaacactgggttggccccaaatccaactaatgccaccaccaaggcggctggtggtgccctgcagtcaacagccagtctcttcgtggtctcactctctcttctgcatctctactcttaagagactcaggccaagaaacgtcttctaaacttccccatcttctaaacccaatccaaatggcgtctggaagtccaatgtggcaaggaaaaacaggtcttcatcgaatctactaattccacaccttttattgacacagaaaatgttgagaatcccaaatttgattgatttgaagaacatgtgagaggtttgactagatgatggatgccaatattaaatctgctggagtttcatgtacaagatgaaggagaggcaacatccaaaatagttaagacatgatttccttgaatgtggcttgagaaatatggacacttaatactaccttgaaaataagaatagaaataaaggatgtgattgtggaatggagattcagttttcatttggttcattaattctataaggccataaaacaggtaatataaaaagcttccatgattctatttatatgtacatgagaaggaacttccaggtgttactgtaattcctcaacgtattgtttcggcagcacttatttaatgccgatatactctagatgaagttttacattgttgagctattgctgttctcttgggaactgaactcactttcctcctgaggctttggatttgacattgcgtttgaccttttatgtagtaattgacatgtgccagggcaatgatgaatgagaatctacccccagatccaagcagcctgagcaactcttgattatccatattgagtcaaatggtaggcatttcctatcacctatttccattcaacaagagcactacattcatttagctaaacggattccaaagagtagaattgcattgaccgcgactaatttcaaaatgctttttattattattattttttagacagtctcactttgtcgcccaggctggagtgcagtggtgtgatctcagatcagtgtaccatttgcctcccgggctcaagcgattctcctgcctcagcctcccaagtagctgggattacaggcacctgccaccatgcccggctaatttttgtaattttagtagagacagggtttcaccatgttgcccaggctggtttcgaactcctgacctcaggtgatccacctgcctcggcctcccaaagtgctgggattacaggcttgagcccccgcgcccagccatcaaaatgctttttatttctgcatatgttgaatactttttacaattaaaaaaaaagatctgttttgaaggcaaaattgcaaatcttgaaattaagaaggcaaaaatgtaaaggagtcaaaactacaaatcaagtatttgggaagtgaagactggaagctaatttgcattaaattcacaaacttttatactctttctgtatatacttttttttctttaaaaaacaactatggatcagaatagccacatttggaatactttttgttatcagtcaatatttttagatagttagaacctggtcctaagcctaaaagtgggcttgattctgcagtaaatcttttacaactgcctcgaaacacagaaacctttttaaaaatagacactccccgaagtcttttgttcgcatggtcacacactgatgcttagatgttccagtaatctaatatggccacagtagtcttgatgaccaaagtcctttttttccatctttacaaaactacatgagaacaaacagatcgaaccgttttgaagctactgtgtgtgtgaatgaacactcttttgctttattccagaatgctgtacatctattttggattgtatattgtgtttgtgtatttacgctttgattcatagtaacttcttatggaattgatttgcattgaacacaaactgtaaataaaaagaaatggctgaaagagggtctcgccggctcgccgcgctccccaccttgcctgcgcccgcccggagccagcggttctccaagcacccagcatcctgctagacgcgccgcgcaccgacgtaggggacatgggcagagcaatggtggccaggcttgggctggggctgctgctgctggcactgctcctacccacgcagatttattccagtgaaacaacaactggaacttcaagtaactcctcccagagtacttccaacactgggttggccccaaatccaactaatgccaccaccaaggcggctggtggtgccctgcagtcaacagccagtctcttcgtggtctcactctctcttctgcatctctactcttaagagactcaggccaagaaacgtcttctaaacttccccatcttctaaacccaatccaaatggcgtctggaagtccaatgtggcaaggaaaaacaggtcttcatcgaatctactaattccacaccttttattgacacagaaaatgttgagaatcccaaatttgattgatttgaagaacatgtgagaggtttgactagatgatggatgccaatattaaatctgctggagtttcatgtacaagatgaaggagaggcaacatccaaaatagttaagacatgatttccttgaatgtggcttgagaaatatggacacttaatactaccttgaaaataagaatagaaataaaggatgtgattgtggaatggagattcagttttcatttggttcattaattctataaggccataaaacaggtaatataaaaagcttccatgattctatttatatgtacatgagaaggaacttccaggtgttactgtaattcctcaacgtattgtttcggcagcacttatttaatgccgatatactctagatgaagttttacattgttgagctattgctgttctcttgggaactgaactcactttcctcctgaggctttggatttgacattgcgtttgaccttttatgtagtaattgacatgtgccagggcaatgatgaatgagaatctacccccagatccaagcagcctgagcaactcttgattatccatattgagtcaaatggtaggcatttcctatcacctatttccattcaacaagagcactacattcatttagctaaacggattccaaagagtagaattgcattgaccgcgactaatttcaaaatgctttttattattattattttttagacagtctcactttgtcgcccaggctggagtgcagtggtgtgatctcagatcagtgtaccatttgcctcccgggctcaagcgattctcctgcctcagcctcccaagtagctgggattacaggcacctgccaccatgcccggctaatttttgtaattttagtagagacagggtttcaccatgttgcccaggctggtttcgaactcctgacctcaggtgatccacctgcctcggcctcccaaagtgctgggattacaggcttgagcccccgcgcccagccatcaaaatgctttttatttctgcatatgttgaatactttttacaattaaaaaaaaagatctgttttgaaggcaaaattgcaaatcttgaaattaagaaggcaaaaatgtaaaggagtcaaaactacaaatcaagtatttgggaagtgaagactggaagctaatttgcattaaattcacaaacttttatactctttctgtatatacttttttttctttaaaaaacaactatggatcagaatagccacatttggaatactttttgttatcagtcaatatttttagatagttagaacctggtcctaagcctaaaagtgggcttgattctgcagtaaatcttttacaactgcctcgaaacacagaaacctttttaaaaatagacactccccgaagtcttttgttcgcatggtcacacactgatgcttagatgttccagtaatctaatatggccacagtagtcttgatgaccaaagtcctttttttccatctttacaaaactacatgagaacaaacagatcgaaccgttttgaagctactgtgtgtgtgaatgaacactcttttgctttattccagaatgctgtacatctattttggattgtatattgtgtttgtgtatttacgctttgattcatagtaacttcttatggaattgatttgcattgaacacaaactgtaaataaaaagaaatggctgaaaga

SEQ ID NO: 694 - DNA, 17765 bp, Homo sapiens
  misc_feature (480)..(480): second gene starts at position 480
atgggcctcctgtcggacccggttcgccggcgcgcgctcgcccgcctagtgctgcgcctcaacgcgccgttgtgcgtgctgagctacgtggcgggcatcgcctggttcttggcgctggttttcccgccgctgacccagcgcacttacatgtcggagaacgccatgggctccaccatggtggaggagcagtttgcgggcggagaccgtgcccgggcttttgcccgggacttcgccgcccaccgcaagaagtcgggggctctgccagtggcctggcttgaacggacgatgcggtcagtagggctggaggtctacacgcagagtttctcccggaaactgcccttcccagatgagacccacgagcgctatatggtgtcgggcaccaacgtgtacggcatcctgcgggccccgcgtgctgccagcaccgagtcgcttgtgctcaccgtgccctgtggctctgactctaccaacagccaggctgtgctggcactgctcctacccacgcagatttattccagtgaaacaacaactggaacttcaagtaactcctcccagagtacttccaacactgggttggccccaaatccaactaatgccaccaccaaggcggctggtggtgccctgcagtcaacagccagtctcttcgtggtctcactctctcttctgcatctctactcttaagagactcaggccaagaaacgtcttctaaacttccccatcttctaaacccaatccaaatggcgtctggaagtccaatgtggcaaggaaaaacaggtcttcatcgaatctactaattccacaccttttattgacacagaaaatgttgagaatcccaaatttgattgatttgaagaacatgtgagaggtttgactagatgatggatgccaatattaaatctgctggagtttcatgtacaagatgaaggagaggcaacatccaaaatagttaagacatgatttccttgaatgtggcttgagaaatatggacacttaatactaccttgaaaataagaatagaaataaaggatgtgattgtggaatggagattcagttttcatttggttcattaattctataaggccataaaacaggtaatataaaaagcttccatgattctatttatatgtacatgagaaggaacttccaggtgttactgtaattcctcaacgtattgtttcggcagcacttatttaatgccgatatactctagatgaagttttacattgttgagctattgctgttctcttgggaactgaactcactttcctcctgaggctttggatttgacattgcgtttgaccttttatgtagtaattgacatgtgccagggcaatgatgaatgagaatctacccccagatccaagcagcctgagcaactcttgattatccatattgagtcaaatggtaggcatttcctatcacctatttccattcaacaagagcactacattcatttagctaaacggattccaaagagtagaattgcattgaccgcgactaatttcaaaatgctttttattattattattttttagacagtctcactttgtcgcccaggctggagtgcagtggtgtgatctcagatcagtgtaccatttgcctcccgggctcaagcgattctcctgcctcagcctcccaagtagctgggattacaggcacctgccaccatgcccggctaatttttgtaattttagtagagacagggtttcaccatgttgcccaggctggtttcgaactcctgacctcaggtgatccacctgcctcggcctcccaaagtgctgggattacaggcttgagcccccgcgcccagccatcaaaatgctttttatttctgcatatgttgaatactttttacaattaaaaaaaaagatctgttttgaaggcaaaattgcaaatcttgaaattaagaaggcaaaaatgtaaaggagtcaaaactacaaatcaagtatttgggaagtgaagactggaagctaatttgcattaaattcacaaacttttatactctttctgtatatacttttttttctttaaaaaacaactatggatcagaatagccacatttggaatactttttgttatcagtcaatatttttagatagttagaacctggtcctaagcctaaaagtgggcttgattctgcagtaaatcttttacaactgcctcgaaacacagaaacctttttaaaaatagacactccccgaagtcttttgttcgcatggtcacacactgatgcttagatgttccagtaatctaatatggccacagtagtcttgatgaccaaagtcctttttttccatctttacaaaactacatgagaacaaacagatcgaaccgttttgaagctactgtgtgtgtgaatgaacactcttttgctttattccagaatgctgtacatctattttggattgtatattgtgtttgtgtatttacgctttgattcatagtaacttcttatggaattgatttgcattgaacacaaactgtaaataaaaagaaatggctgaaagagggtctcgccggctcgccgcgctccccaccttgcctgcgcccgcccggagccagcggttctccaagcacccagcatcctgctagacgcgccgcgcaccgacgtaggggacatgggcagagcaatggtggccaggcttgggctggggctgctgctgctggcactgctcctacccacgcagatttattccagtgaaacaacaactggaacttcaagtaactcctcccagagtacttccaacactgggttggccccaaatccaactaatgccaccaccaaggcggctggtggtgccctgcagtcaacagccagtctcttcgtggtctcactctctcttctgcatctctactcttaagagactcaggccaagaaacgtcttctaaacttccccatcttctaaacccaatccaaatggcgtctggaagtccaatgtggcaaggaaaaacaggtcttcatcgaatctactaattccacaccttttattgacacagaaaatgttgagaatcccaaatttgattgatttgaagaacatgtgagaggtttgactagatgatggatgccaatattaaatctgctggagtttcatgtacaagatgaaggagaggcaacatccaaaatagttaagacatgatttccttgaatgtggcttgagaaatatggacacttaatactaccttgaaaataagaatagaaataaaggatgtgattgtggaatggagattcagttttcatttggttcattaattctataaggccataaaacaggtaatataaaaagcttccatgattctatttatatgtacatgagaaggaacttccaggtgttactgtaattcctcaacgtattgtttcggcagcacttatttaatgccgatatactctagatgaagttttacattgttgagctattgctgttctcttgggaactgaactcactttcctcctgaggctttggatttgacattgcgtttgaccttttatgtagtaattgacatgtgccagggcaatgatgaatgagaatctacccccagatccaagcagcctgagcaactcttgattatccatattgagtcaaatggtaggcatttcctatcacctatttccattcaacaagagcactacattcatttagctaaacggattccaaagagtagaattgcattgaccgcgactaatttcaaaatgctttttattattattattttttagacagtctcactttgtcgcccaggctggagtgcagtggtgtgatctcagatcagtgtaccatttgcctcccgggctcaagcgattctcctgcctcagcctcccaagtagctgggattacaggcacctgccaccatgcccggctaatttttgtaattttagtagagacagggtttcaccatgttgcccaggctggtttcgaactcctgacctcaggtgatccacctgcctcggcctcccaaagtgctgggattacaggcttgagcccccgcgcccagccatcaaaatgctttttatttctgcatatgttgaatactttttacaattaaaaaaaaagatctgttttgaaggcaaaattgcaaatcttgaaattaagaaggcaaaaatgtaaaggagtcaaaactacaaatcaagtatttgggaagtgaagactggaagctaatttgcattaaattcacaaacttttatactctttctgtatatacttttttttctttaaaaaacaactatggatcagaatagccacatttggaatactttttgttatcagtcaatatttttagatagttagaacctggtcctaagcctaaaagtgggcttgattctgcagtaaatcttttacaactgcctcgaaacacagaaacctttttaaaaatagacactccccgaagtcttttgttcgcatggtcacacactgatgcttagatgttccagtaatctaatatggccacagtagtcttgatgaccaaagtcctttttttccatctttacaaaactacatgagaacaaacagatcgaaccgttttgaagctactgtgtgtgtgaatgaacactcttttgctttattccagaatgctgtacatctattttggattgtatattgtgtttgtgtatttacgctttgattcatagtaacttcttatggaattgatttgcattgaacacaaactgtaaataaaaagaaatggctgaaagagggtctcgccggctcgccgcgctccccaccttgcctgcgcccgcccggagccagcggttctccaagcacccagcatcctgctagacgcgccgcgcaccgacgtaggggacatgggcagagcaatggtggccaggcttgggctggggctgctgctgctggcactgctcctacccacgcagatttattccagtgaaacaacaactggaacttcaagtaactcctcccagagtacttccaacactgggttggccccaaatccaactaatgccaccaccaaggcggctggtggtgccctgcagtcaacagccagtctcttcgtggtctcactctctcttctgcatctctactcttaagagactcaggccaagaaacgtcttctaaacttccccatcttctaaacccaatccaaatggcgtctggaagtccaatgtggcaaggaaaaacaggtcttcatcgaatctactaattccacaccttttattgacacagaaaatgttgagaatcccaaatttgattgatttgaagaacatgtgagaggtttgactagatgatggatgccaatattaaatctgctggagtttcatgtacaagatgaaggagaggcaacatccaaaatagttaagacatgatttccttgaatgtggcttgagaaatatggacacttaatactaccttgaaaataagaatagaaataaaggatgtgattgtggaatggagattcagttttcatttggttcattaattctataaggccataaaacaggtaatataaaaagcttccatgattctatttatatgtacatgagaaggaacttccaggtgttactgtaattcctcaacgtattgtttcggcagcacttatttaatgccgatatactctagatgaagttttacattgttgagctattgctgttctcttgggaactgaactcactttcctcctgaggctttggatttgacattgcgtttgaccttttatgtagtaattgacatgtgccagggcaatgatgaatgagaatctacccccagatccaagcagcctgagcaactcttgattatccatattgagtcaaatggtaggcatttcctatcacctatttccattcaacaagagcactacattcatttagctaaacggattccaaagagtagaattgcattgaccgcgactaatttcaaaatgctttttattattattattttttagacagtctcactttgtcgcccaggctggagtgcagtggtgtgatctcagatcagtgtaccatttgcctcccgggctcaagcgattctcctgcctcagcctcccaagtagctgggattacaggcacctgccaccatgcccggctaatttttgtaattttagtagagacagggtttcaccatgttgcccaggctggtttcgaactcctgacctcaggtgatccacctgcctcggcctcccaaagtgctgggattacaggcttgagcccccgcgcccagccatcaaaatgctttttatttctgcatatgttgaatactttttacaattaaaaaaaaagatctgttttgaaggcaaaattgcaaatcttgaaattaagaaggcaaaaatgtaaaggagtcaaaactacaaatcaagtatttgggaagtgaagactggaagctaatttgcattaaattcacaaacttttatactctttctgtatatacttttttttctttaaaaaacaactatggatcagaatagccacatttggaatactttttgttatcagtcaatatttttagatagttagaacctggtcctaagcctaaaagtgggcttgattctgcagtaaatcttttacaactgcctcgaaacacagaaacctttttaaaaatagacactccccgaagtcttttgttcgcatggtcacacactgatgcttagatgttccagtaatctaatatggccacagtagtcttgatgaccaaagtcctttttttccatctttacaaaactacatgagaacaaacagatcgaaccgttttgaagctactgtgtgtgtgaatgaacactcttttgctttattccagaatgctgtacatctattttggattgtatattgtgtttgtgtatttacgctttgattcatagtaacttcttatggaattgatttgcattgaacacaaactgtaaataaaaagaaatggctgaaagagggtctcgccggctcgccgcgctccccaccttgcctgcgcccgcccggagccagcggttctccaagcacccagcatcctgctagacgcgccgcgcaccgacgtaggggacatgggcagagcaatggtggccaggcttgggctggggctgctgctgctggcactgctcctacccacgcagatttattccagtgaaacaacaactggaacttcaagtaactcctcccagagtacttccaacactgggttggccccaaatccaactaatgccaccaccaaggcggctggtggtgccctgcagtcaacagccagtctcttcgtggtctcactctctcttctgcatctctactcttaagagactcaggccaagaaacgtcttctaaacttccccatcttctaaacccaatccaaatggcgtctggaagtccaatgtggcaaggaaaaacaggtcttcatcgaatctactaattccacaccttttattgacacagaaaatgttgagaatcccaaatttgattgatttgaagaacatgtgagaggtttgactagatgatggatgccaatattaaatctgctggagtttcatgtacaagatgaaggagaggcaacatccaaaatagttaagacatgatttccttgaatgtggcttgagaaatatggacacttaatactaccttgaaaataagaatagaaataaaggatgtgattgtggaatggagattcagttttcatttggttcattaattctataaggccataaaacaggtaatataaaaagcttccatgattctatttatatgtacatgagaaggaacttccaggtgttactgtaattcctcaacgtattgtttcggcagcacttatttaatgccgatatactctagatgaagttttacattgttgagctattgctgttctcttgggaactgaactcactttcctcctgaggctttggatttgacattgcgtttgaccttttatgtagtaattgacatgtgccagggcaatgatgaatgagaatctacccccagatccaagcagcctgagcaactcttgattatccatattgagtcaaatggtaggcatttcctatcacctatttccattcaacaagagcactacattcatttagctaaacggattccaaagagtagaattgcattgaccgcgactaatttcaaaatgctttttattattattattttttagacagtctcactttgtcgcccaggctggagtgcagtggtgtgatctcagatcagtgtaccatttgcctcccgggctcaagcgattctcctgcctcagcctcccaagtagctgggattacaggcacctgccaccatgcccggctaatttttgtaattttagtagagacagggtttcaccatgttgcccaggctggtttcgaactcctgacctcaggtgatccacctgcctcggcctcccaaagtgctgggattacaggcttgagcccccgcgcccagccatcaaaatgctttttatttctgcatatgttgaatactttttacaattaaaaaaaaagatctgttttgaaggcaaaattgcaaatcttgaaattaagaaggcaaaaatgtaaaggagtcaaaactacaaatcaagtatttgggaagtgaagactggaagctaatttgcattaaattcacaaacttttatactctttctgtatatacttttttttctttaaaaaacaactatggatcagaatagccacatttggaatactttttgttatcagtcaatatttttagatagttagaacctggtcctaagcctaaaagtgggcttgattctgcagtaaatcttttacaactgcctcgaaacacagaaacctttttaaaaatagacactccccgaagtcttttgttcgcatggtcacacactgatgcttagatgttccagtaatctaatatggccacagtagtcttgatgaccaaagtcctttttttccatctttacaaaactacatgagaacaaacagatcgaaccgttttgaagctactgtgtgtgtgaatgaacactcttttgctttattccagaatgctgtacatctattttggattgtatattgtgtttgtgtatttacgctttgattcatagtaacttcttatggaattgatttgcattgaacacaaactgtaaataaaaagaaatggctgaaagagggtctcgccggctcgccgcgctccccaccttgcctgcgcccgcccggagccagcggttctccaagcacccagcatcctgctagacgcgccgcgcaccgacgtaggggacatgggcagagcaatggtggccaggcttgggctggggctgctgctgctggcactgctcctacccacgcagatttattccagtgaaacaacaactggaacttcaagtaactcctcccagagtacttccaacactgggttggccccaaatccaactaatgccaccaccaaggcggctggtggtgccctgcagtcaacagccagtctcttcgtggtctcactctctcttctgcatctctactcttaagagactcaggccaagaaacgtcttctaaacttccccatcttctaaacccaatccaaatggcgtctggaagtccaatgtggcaaggaaaaacaggtcttcatcgaatctactaattccacaccttttattgacacagaaaatgttgagaatcccaaatttgattgatttgaagaacatgtgagaggtttgactagatgatggatgccaatattaaatctgctggagtttcatgtacaagatgaaggagaggcaacatccaaaatagttaagacatgatttccttgaatgtggcttgagaaatatggacacttaatactaccttgaaaataagaatagaaataaaggatgtgattgtggaatggagattcagttttcatttggttcattaattctataaggccataaaacaggtaatataaaaagcttccatgattctatttatatgtacatgagaaggaacttccaggtgttactgtaattcctcaacgtattgtttcggcagcacttatttaatgccgatatactctagatgaagttttacattgttgagctattgctgttctcttgggaactgaactcactttcctcctgaggctttggatttgacattgcgtttgaccttttatgtagtaattgacatgtgccagggcaatgatgaatgagaatctacccccagatccaagcagcctgagcaactcttgattatccatattgagtcaaatggtaggcatttcctatcacctatttccattcaacaagagcactacattcatttagctaaacggattccaaagagtagaattgcattgaccgcgactaatttcaaaatgctttttattattattattttttagacagtctcactttgtcgcccaggctggagtgcagtggtgtgatctcagatcagtgtaccatttgcctcccgggctcaagcgattctcctgcctcagcctcccaagtagctgggattacaggcacctgccaccatgcccggctaatttttgtaattttagtagagacagggtttcaccatgttgcccaggctggtttcgaactcctgacctcaggtgatccacctgcctcggcctcccaaagtgctgggattacaggcttgagcccccgcgcccagccatcaaaatgctttttatttctgcatatgttgaatactttttacaattaaaaaaaaagatctgttttgaaggcaaaattgcaaatcttgaaattaagaaggcaaaaatgtaaaggagtcaaaactacaaatcaagtatttgggaagtgaagactggaagctaatttgcattaaattcacaaacttttatactctttctgtatatacttttttttctttaaaaaacaactatggatcagaatagccacatttggaatactttttgttatcagtcaatatttttagatagttagaacctggtcctaagcctaaaagtgggcttgattctgcagtaaatcttttacaactgcctcgaaacacagaaacctttttaaaaatagacactccccgaagtcttttgttcgcatggtcacacactgatgcttagatgttccagtaatctaatatggccacagtagtcttgatgaccaaagtcctttttttccatctttacaaaactacatgagaacaaacagatcgaaccgttttgaagctactgtgtgtgtgaatgaacactcttttgctttattccagaatgctgtacatctattttggattgtatattgtgtttgtgtatttacgctttgattcatagtaacttcttatggaattgatttgcattgaacacaaactgtaaataaaaagaaatggctgaaagagggtctcgccggctcgccgcgctccccaccttgcctgcgcccgcccggagccagcggttctccaagcacccagcatcctgctagacgcgccgcgcaccgacgtaggggacatgggcagagcaatggtggccaggcttgggctggggctgctgctgctggcactgctcctacccacgcagatttattccagtgaaacaacaactggaacttcaagtaactcctcccagagtacttccaacactgggttggccccaaatccaactaatgccaccaccaaggcggctggtggtgccctgcagtcaacagccagtctcttcgtggtctcactctctcttctgcatctctactcttaagagactcaggccaagaaacgtcttctaaacttccccatcttctaaacccaatccaaatggcgtctggaagtccaatgtggcaaggaaaaacaggtcttcatcgaatctactaattccacaccttttattgacacagaaaatgttgagaatcccaaatttgattgatttgaagaacatgtgagaggtttgactagatgatggatgccaatattaaatctgctggagtttcatgtacaagatgaaggagaggcaacatccaaaatagttaagacatgatttccttgaatgtggcttgagaaatatggacacttaatactaccttgaaaataagaatagaaataaaggatgtgattgtggaatggagattcagttttcatttggttcattaattctataaggccataaaacaggtaatataaaaagcttccatgattctatttatatgtacatgagaaggaacttccaggtgttactgtaattcctcaacgtattgtttcggcagcacttatttaatgccgatatactctagatgaagttttacattgttgagctattgctgttctcttgggaactgaactcactttcctcctgaggctttggatttgacattgcgtttgaccttttatgtagtaattgacatgtgccagggcaatgatgaatgagaatctacccccagatccaagcagcctgagcaactcttgattatccatattgagtcaaatggtaggcatttcctatcacctatttccattcaacaagagcactacattcatttagctaaacggattccaaagagtagaattgcattgaccgcgactaatttcaaaatgctttttattattattattttttagacagtctcactttgtcgcccaggctggagtgcagtggtgtgatctcagatcagtgtaccatttgcctcccgggctcaagcgattctcctgcctcagcctcccaagtagctgggattacaggcacctgccaccatgcccggctaatttttgtaattttagtagagacagggtttcaccatgttgcccaggctggtttcgaactcctgacctcaggtgatccacctgcctcggcctcccaaagtgctgggattacaggcttgagcccccgcgcccagccatcaaaatgctttttatttctgcatatgttgaatactttttacaattaaaaaaaaagatctgttttgaaggcaaaattgcaaatcttgaaattaagaaggcaaaaatgtaaaggagtcaaaactacaaatcaagtatttgggaagtgaagactggaagctaatttgcattaaattcacaaacttttatactctttctgtatatacttttttttctttaaaaaacaactatggatcagaatagccacatttggaatactttttgttatcagtcaatatttttagatagttagaacctggtcctaagcctaaaagtgggcttgattctgcagtaaatcttttacaactgcctcgaaacacagaaacctttttaaaaatagacactccccgaagtcttttgttcgcatggtcacacactgatgcttagatgttccagtaatctaatatggccacagtagtcttgatgaccaaagtcctttttttccatctttacaaaactacatgagaacaaacagatcgaaccgttttgaagctactgtgtgtgtgaatgaacactcttttgctttattccagaatgctgtacatctattttggattgtatattgtgtttgtgtatttacgctttgattcatagtaacttcttatggaattgatttgcattgaacacaaactgtaaataaaaagaaatggctgaaagagggtctcgccggctcgccgcgctccccaccttgcctgcgcccgcccggagccagcggttctccaagcacccagcatcctgctagacgcgccgcgcaccgacgtaggggacatgggcagagcaatggtggccaggcttgggctggggctgctgctgctggcactgctcctacccacgcagatttattccagtgaaacaacaactggaacttcaagtaactcctcccagagtacttccaacactgggttggccccaaatccaactaatgccaccaccaaggcggctggtggtgccctgcagtcaacagccagtctcttcgtggtctcactctctcttctgcatctctactcttaagagactcaggccaagaaacgtcttctaaacttccccatcttctaaacccaatccaaatggcgtctggaagtccaatgtggcaaggaaaaacaggtcttcatcgaatctactaattccacaccttttattgacacagaaaatgttgagaatcccaaatttgattgatttgaagaacatgtgagaggtttgactagatgatggatgccaatattaaatctgctggagtttcatgtacaagatgaaggagaggcaacatccaaaatagttaagacatgatttccttgaatgtggcttgagaaatatggacacttaatactaccttgaaaataagaatagaaataaaggatgtgattgtggaatggagattcagttttcatttggttcattaattctataaggccataaaacaggtaatataaaaagcttccatgattctatttatatgtacatgagaaggaacttccaggtgttactgtaattcctcaacgtattgtttcggcagcacttatttaatgccgatatactctagatgaagttttacattgttgagctattgctgttctcttgggaactgaactcactttcctcctgaggctttggatttgacattgcgtttgaccttttatgtagtaattgacatgtgccagggcaatgatgaatgagaatctacccccagatccaagcagcctgagcaactcttgattatccatattgagtcaaatggtaggcatttcctatcacctatttccattcaacaagagcactacattcatttagctaaacggattccaaagagtagaattgcattgaccgcgactaatttcaaaatgctttttattattattattttttagacagtctcactttgtcgcccaggctggagtgcagtggtgtgatctcagatcagtgtaccatttgcctcccgggctcaagcgattctcctgcctcagcctcccaagtagctgggattacaggcacctgccaccatgcccggctaatttttgtaattttagtagagacagggtttcaccatgttgcccaggctggtttcgaactcctgacctcaggtgatccacctgcctcggcctcccaaagtgctgggattacaggcttgagcccccgcgcccagccatcaaaatgctttttatttctgcatatgttgaatactttttacaattaaaaaaaaagatctgttttgaaggcaaaattgcaaatcttgaaattaagaaggcaaaaatgtaaaggagtcaaaactacaaatcaagtatttgggaagtgaagactggaagctaatttgcattaaattcacaaacttttatactctttctgtatatacttttttttctttaaaaaacaactatggatcagaatagccacatttggaatactttttgttatcagtcaatatttttagatagttagaacctggtcctaagcctaaaagtgggcttgattctgcagtaaatcttttacaactgcctcgaaacacagaaacctttttaaaaatagacactccccgaagtcttttgttcgcatggtcacacactgatgcttagatgttccagtaatctaatatggccacagtagtcttgatgaccaaagtcctttttttccatctttacaaaactacatgagaacaaacagatcgaaccgttttgaagctactgtgtgtgtgaatgaacactcttttgctttattccagaatgctgtacatctattttggattgtatattgtgtttgtgtatttacgctttgattcatagtaacttcttatggaattgatttgcattgaacacaaactgtaaataaaaagaaatggctgaaagagggtctcgccggctcgccgcgctccccaccttgcctgcgcccgcccggagccagcggttctccaagcacccagcatcctgctagacgcgccgcgcaccgacgtaggggacatgggcagagcaatggtggccaggcttgggctggggctgctgctgctggcactgctcctacccacgcagatttattccagtgaaacaacaactggaacttcaagtaactcctcccagagtacttccaacactgggttggccccaaatccaactaatgccaccaccaaggcggctggtggtgccctgcagtcaacagccagtctcttcgtggtctcactctctcttctgcatctctactcttaagagactcaggccaagaaacgtcttctaaacttccccatcttctaaacccaatccaaatggcgtctggaagtccaatgtggcaaggaaaaacaggtcttcatcgaatctactaattccacaccttttattgacacagaaaatgttgagaatcccaaatttgattgatttgaagaacatgtgagaggtttgactagatgatggatgccaatattaaatctgctggagtttcatgtacaagatgaaggagaggcaacatccaaaatagttaagacatgatttccttgaatgtggcttgagaaatatggacacttaatactaccttgaaaataagaatagaaataaaggatgtgattgtggaatggagattcagttttcatttggttcattaattctataaggccataaaacaggtaatataaaaagcttccatgattctatttatatgtacatgagaaggaacttccaggtgttactgtaattcctcaacgtattgtttcggcagcacttatttaatgccgatatactctagatgaagttttacattgttgagctattgctgttctcttgggaactgaactcactttcctcctgaggctttggatttgacattgcgtttgaccttttatgtagtaattgacatgtgccagggcaatgatgaatgagaatctacccccagatccaagcagcctgagcaactcttgattatccatattgagtcaaatggtaggcatttcctatcacctatttccattcaacaagagcactacattcatttagctaaacggattccaaagagtagaattgcattgaccgcgactaatttcaaaatgctttttattattattattttttagacagtctcactttgtcgcccaggctggagtgcagtggtgtgatctcagatcagtgtaccatttgcctcccgggctcaagcgattctcctgcctcagcctcccaagtagctgggattacaggcacctgccaccatgcccggctaatttttgtaattttagtagagacagggtttcaccatgttgcccaggctggtttcgaactcctgacctcaggtgatccacctgcctcggcctcccaaagtgctgggattacaggcttgagcccccgcgcccagccatcaaaatgctttttatttctgcatatgttgaatactttttacaattaaaaaaaaagatctgttttgaaggcaaaattgcaaatcttgaaattaagaaggcaaaaatgtaaaggagtcaaaactacaaatcaagtatttgggaagtgaagactggaagctaatttgcattaaattcacaaacttttatactctttctgtatatacttttttttctttaaaaaacaactatggatcagaatagccacatttggaatactttttgttatcagtcaatatttttagatagttagaacctggtcctaagcctaaaagtgggcttgattctgcagtaaatcttttacaactgcctcgaaacacagaaacctttttaaaaatagacactccccgaagtcttttgttcgcatggtcacacactgatgcttagatgttccagtaatctaatatggccacagtagtcttgatgaccaaagtcctttttttccatctttacaaaactacatgagaacaaacagatcgaaccgttttgaagctactgtgtgtgtgaatgaacactcttttgctttattccagaatgctgtacatctattttggattgtatattgtgtttgtgtatttacgctttgattcatagtaacttcttatggaattgatttgcattgaacacaaactgtaaataaaaagaaatggctgaaaga

SEQ ID NO: 695 - DNA, 2339 bp, Homo sapiens
  misc_feature (1423)..(1423): second gene starts at position 1423
atgggcaaccgcgggatggaagagctgatcccgctggtcaacaaactgcaggacgccttcagctccatcggccagagctgccacctggacctgccgcagatcgctgtagtgggcggccagagcgccggcaagagctcggtgctggagaacttcgtgggccgggacttccttccccgcggttcaggaatcgtcacccggcggcctctcattctgcagctcatcttctcaaaaacagaacatgccgagtttttgcactgcaagtccaaaaagtttacagactttgatgaagtccggcaggagattgaagcagagaccgacagggtcacggggaccaacaaaggcatctccccagtgcccatcaaccttcgagtctactcgccacacgtgttgaacttgaccctcatcgacctcccgggtatcaccaaggtgcctgtgggcgaccagcctccagacatcgagtaccagatcaaggacatgatcctgcagttcatcagccgggagagcagcctcattctggctgtcacgcccgccaacatggacctggccaactccgacgccctcaagctggccaaggaagtcgatccccaaggcctacggaccatcggtgtcatcaccaagcttgacctgatggacgagggcaccgacgccagggacgtcttggagaacaagttgctcccgttgagaagaggctacattggcgtggtgaaccgcagccagaaggatattgagggcaagaaggacatccgtgcagcactggcagctgagaggaagttcttcctctcccacccggcctaccggcacatggccgaccgcatgggcacgccacatctgcagaagacgctgaatcagcaactgaccaaccacatccgggagtcgctgccggccctacgtagcaaactacagagccagctgctgtccctggagaaggaggtggaggagtacaagaactttcggcccgacgaccccacccgcaaaaccaaagccctgctgcagatggtccagcagtttggggtggattttgagaagaggatcgagggctcaggagatcaggtggacactctggagctctccgggggcgcccgaatcaatcgcatcttccacgagcggttcccatttgagctggtgaagatggagtttgacgagaaggacttacgacgggagatcagctatgccattaagaacatccatggagtcaggaccgggcttttcaccccggacttggcattcgaggccattgtgaaaaagcaggtcgtcaagctgaaagagccctgtctgaaatgtgtcgacctggttatccaggagctaatcaatacagttaggcagtgtaccagtaagctcagttcctacccccggttgcgagaggagacagagcgaatcgtcaccacttacatccgggaacgggaggggagaacgaaggaccaggccgagtgtactacttcaaccacatcactaacgccagccagtgggagcggcccagcggcaacagcagcagtggtggcaaaaacgggcagggggagcctgccagggtccgctgctcgcacctgctggtgaagcacagccagtcacggcggccctcgtcctggcggcaggagaagatcacccggaccaaggaggaggccctggagctgatcaacggctacatccagaagatcaagtcgggagaggaggactttgagtctctggcctcacagttcagcgactgcagctcagccaaggccaggggagacctgggtgccttcagcagaggtcagatgcagaagccatttgaagacgcctcgtttgcgctgcggacgggggagatgagcgggcccgtgttcacggattccggcatccacatcatcctccgcactgagtgagggtggggagcccaggcctggcctcggggcagggcagggcggctaggccggccagctcccccttgcccgccagccagtggccgaaccccccactccctgccaccgtcacacagtatttattgttcccacaatggctgggagggggcccttccagattgggggccctggggtccccactccctgtccatccccagttggggctgcgaccgccagattctcccttaaggaattgacttcagcaggggtgggaggctcccagacccagggcagtgtggtgggaggggtgttccaaagagaaggcctggtcagcagagccgccccgtgtccccccaggtgctggaggcagactcgagggccgaattgtttctagttaggccacgctcctctgttcagtcgcaaaggtgaacactcatgcggcccagccatgggccctctgagcaactgtgcagcaccctttcacccccaattaaacccagaaccact

SEQ ID NO: 696 - DNA, 2339 bp, Homo sapiens; identical to SEQ ID NO: 695
  misc_feature (1423)..(1423): second gene starts at position 1423

SEQ ID NO: 697 - DNA, 2339 bp, Homo sapiens; identical to SEQ ID NO: 695
  misc_feature (1423)..(1423): second gene starts at position 1423

SEQ ID NO: 698 - DNA, 2339 bp, Homo sapiens
  misc_feature (1423)..(1423): second gene starts at position 1423
atgggcaaccgcgggatggaagagctgatcccgctggtcaacaaactgcaggacgccttcagctccatcggccagagctgccacctggacctgccgcagatcgctgtagtgggcggccagagcgccggcaagagctcggtgctggagaacttcgtgggccgggacttccttccccgcggttcaggaatcgtcacccggcggcctctcattctgcagctcatcttctcaaaaacagaacatgccgagtttttgcactgcaagtccaaaaagtttacagactttgatgaagtccggcaggagattgaagcagagaccgacagggtcacggggaccaacaaaggcatctccccagtgcccatcaaccttcgagtctactcgccacacgtgttgaacttgaccctcatcgacctcccgggtatcaccaaggtgcctgtgggcgaccagcctccagacatcgagtaccagatcaaggacatgatcctgcagttcatcagccgggagagcagcctcattctggctgtcacgcccgccaacatggacctggccaactccgacgccctcaagctggccaaggaagtcgatccccaaggcctacggaccatcggtgtcatcaccaagcttgacctgatggacgagggcaccgacgccagggacgtcttggagaacaagttgctcccgttgagaagaggctacattggcgtggtgaaccgcagccagaaggatattgagggcaagaaggacatccgtgcagcactggcagctgagaggaagttcttcctctcccacccggcctaccggcacatggccgaccgcatgggcacgccacatctgcagaagacgctgaatcagcaactgaccaaccacatccgggagtcgctgccggccctacgtagcaaactacagagccagctgctgtccctggagaaggaggtggaggagtacaagaactttcggcccgacgaccccacccgcaaaaccaaagccctgctgcagatggtccagcagtttggggtggattttgagaagaggatcgagggctcaggagatcaggtggacactctggagctctccgggggcgcccgaatcaatcgcatcttccacgagcggttcccatttgagctggtgaagatggagtttgacgagaaggacttacgacgggagatcagctatgccattaagaacatccatggagtcaggacggggctcttcacccccgacatggcctttgaagccattgtgaaaaaacagattgtaaaactcaaagagccgagtttgaagtgtgttgatctcgtggtctcagagctggccacggtcataaaaaagtgtgccgagaagctcagttcctacccccggttgcgagaggagacagagcgaatcgtcaccacttacatccgggaacgggaggggagaacgaaggaccaggccgagtgtactacttcaaccacatcactaacgccagccagtgggagcggcccagcggcaacagcagcagtggtggcaaaaacgggcagggggagcctgccagggtccgctgctcgcacctgctggtgaagcacagccagtcacggcggccctcgtcctggcggcaggagaagatcacccggaccaaggaggaggccctggagctgatcaacggctacatccagaagatcaagtcgggagaggaggactttgagtctctggcctcacagttcagcgactgcagctcagccaaggccaggggagacctgggtgccttcagcagaggtcagatgcagaagccatttgaagacgcctcgtttgcgctgcggacgggggagatgagcgggcccgtgttcacggattccggcatccacatcatcctccgcactgagtgagggtggggagcccaggcctggcctcggggcagggcagggcggctaggccggccagctcccccttgcccgccagccagtggccgaaccccccactccctgccaccgtcacacagtatttattgttcccacaatggctgggagggggcccttccagattgggggccctggggtccccactccctgtccatccccagttggggctgcgaccgccagattctcccttaaggaattgacttcagcaggggtgggaggctcccagacccagggcagtgtggtgggaggggtgttccaaagagaaggcctggtcagcagagccgccccgtgtccccccaggtgctggaggcagactcgagggccgaattgtttctagttaggccacgctcctctgttcagtcgcaaaggtgaacactcatgcggcccagccatgggccctctgagcaactgtgcagcaccctttcacccccaattaaacccagaaccact

SEQ ID NO: 699 - DNA, 2339 bp, Homo sapiens; identical to SEQ ID NO: 698
  misc_feature (1423)..(1423): second gene starts at position 1423

SEQ ID NO: 700 - DNA, 14343 bp, Homo sapiens
  misc_feature (534)..(534): second gene starts at position 534
atgtctcgccagtcaagtgtgtccttccggagcgggggcagtcgtagcttcagcaccgcctctgccatcaccccgtctgtctcccgcaccagcttcacctccgtgtcccggtccgggggtggcggtggtggtggcttcggcagggtcagccttgcgggtgcttgtggagtgggtggctatggcagccggagcctctacaacctggggggctccaagaggatatccatcagcactagtggtggcagcttcaggaaccggtttggtgctggtgctggaggcggctatggctttggaggtggtgccggtagtggatttggtttcggcggtggagctggtggtggctttgggctcggtggcggagctggctttggaggtggcttcggtggccctggctttcctgtctgccctcctggaggtatccaagaggtcactgtcaaccagagtctcctgactcccctcaacctgcaaatcgaccccagcatccagagggtgaggaccgaggagcgcgagcagatcaagaccctcaacaataagtttgcctccttcatcgacaaggtgcggttcctggagcagcagaacaaggttctggacaccaagtggaccctgctgcaggagcagggcaccaagactgtgaggcagaacctggagccgttgttcgagcagtacatcaacaacctcaggaggcagctggacagcatcgtgggggaacggggccgcctggactcagagctgagaaacatgcaggacctggtggaagacttcaagaacaagtatgaggatgaaatcaacaagcgtaccactgctgagaatgagtttgtgatgctgaagaaggatgtagatgctgcctacatgaacaaggtggagctggaggccaaggttgatgcactgatggatgagattaacttcatgaagatgttctttgatgcggagctgtcccagatgcagacgcatgtctctgacacctcagtggtcctctccatggacaacaaccgcaacctggacctggatagcatcatcgctgaggtcaaggcccagtatgaggagattgccaaccgcagccggacagaagccgagtcctggtatcagaccaagtatgaggagctgcagcagacagctggccggcatggcgatgacctccgcaacaccaagcatgagatctctgagatgaaccggatgatccagaggctgagagccgagattgacaatgtcaagaaacagtgcgccaatctgcagaacgccattgcggatgccgagcagcgtggggagctggccctcaaggatgccaggaacaagctggccgagctggaggaggccctgcagaaggccaagcaggacatggcccggctgctgcgtgagtaccaggagctcatgaacaccaagctggccctggacgtggagatcgccacttaccgcaagctgctggagggcgaggaatgcagactcagtggagaaggagttggaccagtcaacatctctgttgtcacaagcagtgtttcctctggatatggcagtggcagtggctatggcggtggcggctatggcggtggcttcagcagcagcagcagcagctttggtagtggctttgggggaggatatggtggtggccttggtgctggcttgggtggtggctttggtggtggctttgctggtggtgatgggcttctggtgggcagtgagaaggtgaccatgcagaacctcaatgaccgcctggcctcctacctggacaaggtgcgtgctctggaggaggccaacgccgacctggaagtgaagatccgtgactggtaccagaggcagcggcctgctgagatcaaagactacagtccctacttcaagaccattgaggacctgaggaacaagattctcacagccacagtggacaatgccaatgtccttctgcagattgacaatgcccgtctggccgcggatgacttccgcaccaagtatgagacagagttgaacctgcgcatgagtgtggaagccgacatcaatggcctgcgcagggtgctggacgaactgaccctggccagagctgacctggagatgcagattgagagcctgaaggaggagctggcctacctgaagaagaaccacgaggaggagatgaatgccctgagaggccaggtgggtggagatgtcaatgtggagatggacgctgcacctggcgtggacctgagccgcattctgaacgagatgcgtgaccagtatgagaagatggcagagaagaaccgcaaggatgccgaggaatggttcttcaccaagacagaggagctgaaccgcgaggtggccaccaacagcgagctggtgcagagcggcaagagcgagatctcggagctccggcgcaccatgcagaacctggagattgagctgcagtcccagctcagcatgaaagcatccctggagaacagcctggaggagaccaaaggtcgctactgcatgcagctggcccagatccaggagatgattggcagcgtggaggagcagctggcccagctccgctgcgagatggagcagcagaaccaggagtacaagatcctgctggacgtgaagacgcggctggagcaggagatcgccacctaccgccgcctgctggagggcgaggacgcccacctctcctcctcccagttctcctctggatcgcagtcatccagagatgtgacctcctccagccgccaaatccgcaccaaggtcatggatgtgcacgatggcaaggtggtgtccacccacgagcaggtccttcgcaccaagaactgaggctgcccagccccgctcaggcctaggaggccccccgtgtggacacagatcccactggaagatcccctctcctgcccaagcacttcacagctggaccctgcttcaccctcaccccctcctggcaatcaatacagcttcattatctgagttgcatacccgagcaccttctcttcactcagccaactgctcgctcgctcacctccctcctctgcaccatgaccacctgcagccgccagttcacctcctccagctccatgaagggctcctgcggcatcgggggcggcatcgggggcggctccagccgcatctcctccgtcctggccggagggtcctgccgcgcccccagcacctacgggggcggcctgtctgtctcatcctcccgcttctcctctgggggagcctgcgggctggggggcggctatggcggtggcttcagcagcagcagcagcagctttggtagtggctttgggggaggatatggtggtggccttggtgctggcttgggtggtggctttggtggtggctttgctggtggtgatgggcttctggtgggcagtgagaaggtgaccatgcagaacctcaatgaccgcctggcctcctacctggacaaggtgcgtgctctggaggaggccaacgccgacctggaagtgaagatccgtgactggtaccagaggcagcggcctgctgagatcaaagactacagtccctacttcaagaccattgaggacctgaggaacaagattctcacagccacagtggacaatgccaatgtccttctgcagattgacaatgcccgtctggccgcggatgacttccgcaccaagtatgagacagagttgaacctgcgcatgagtgtggaagccgacatcaatggcctgcgcagggtgctggacgaactgaccctggccagagctgacctggagatgcagattgagagcctgaaggaggagctggcctacctgaagaagaaccacgaggaggagatgaatgccctgagaggccaggtgggtggagatgtcaatgtggagatggacgctgcacctggcgtggacctgagccgcattctgaacgagatgcgtgaccagtatgagaagatggcagagaagaaccgcaaggatgccgaggaatggttcttcaccaagacagaggagctgaaccgcgaggtggccaccaacagcgagctggtgcagagcggcaagagcgagatctcggagctccggcgcaccatgcagaacctggagattgagctgcagtcccagctcagcatgaaagcatccctggagaacagcctggaggagaccaaaggtcgctactgcatgcagctggcccagatccaggagatgattggcagcgtggaggagcagctggcccagctccgctgcgagatggagcagcagaaccaggagtacaagatcctgctggacgtgaagacgcggctggagcaggagatcgccacctaccgccgcctgctggagggcgaggacgcccacctctcctcctcccagttctcctctggatcgcagtcatccagagatgtgacctcctccagccgccaaatccgcaccaaggtcatggatgtgcacgatggcaaggtggtgtccacccacgagcaggtccttcgcaccaagaactgaggctgcccagccccgctcaggcctaggaggccccccgtgtggacacagatcccactggaagatcccctctcctgcccaagcacttcacagctggaccctgcttcaccctcaccccctcctggcaatcaatacagcttcattatctgagttgcatacccgagcaccttctcttcactcagccaactgctcgctcgctcacctccctcctctgcaccatgaccacctgcagccgccagttcacctcctccagctccatgaagggctcctgcggcatcgggggcggcatcgggggcggctccagccgcatctcctccgtcctggccggagggtcctgccgcgcccccagcacctacgggggcggcctgtctgtctcatcctcccgcttctcctctgggggagcctgcgggctggggggcggctatggcggtggcttcagcagcagcagcagcagctttggtagtggctttgggggaggatatggtggtggccttggtgctggcttgggtggtggctttggtggtggctttgctggtggtgatgggcttctggtgggcagtgagaaggtgaccatgcagaacctcaatgaccgcctggcctcctacctggacaaggtgcgtgctctggaggaggccaacgccgacctggaagtgaagatccgtgactggtaccagaggcagcggcctgctgagatcaaagactacagtccctacttcaagaccattgaggacctgaggaacaagattctcacagccacagtggacaatgccaatgtccttctgcagattgacaatgcccgtctggccgcggatgacttccgcaccaagtatgagacagagttgaacctgcgcatgagtgtggaagccgacatcaatggcctgcgcagggtgctggacgaactgaccctggccagagctgacctggagatgcagattgagagcctgaaggaggagctggcctacctgaagaagaaccacgaggaggagatgaatgccctgagaggccaggtgggtggagatgtcaatgtggagatggacgctgcacctggcgtggacctgagccgcattctgaacgagatgcgtgaccagtatgagaagatggcagagaagaaccgcaaggatgccgaggaatggttcttcaccaagacagaggagctgaaccgcgaggtggccaccaacagcgagctggtgcagagcggcaagagcgagatctcggagctccggcgcaccatgcagaacctggagattgagctgcagtcccagctcagcatgaaagcatccctggagaacagcctggaggagaccaaaggtcgctactgcatgcagctggcccagatccaggagatgattggcagcgtggaggagcagctggcccagctccgctgcgagatggagcagcagaaccaggagtacaagatcctgctggacgtgaagacgcggctggagcaggagatcgccacctaccgccgcctgctggagggcgaggacgcccacctctcctcctcccagttctcctctggatcgcagtcatccagagatgtgacctcctccagccgccaaatccgcaccaaggtcatggatgtgcacgatggcaaggtggtgtccacccacgagcaggtccttcgcaccaagaactgaggctgcccagccccgctcaggcctaggaggccccccgtgtggacacagatcccactggaagatcccctctcctgcccaagcacttcacagctggaccctgcttcaccctcaccccctcctggcaatcaatacagcttcattatctgagttgcatacccgagcaccttctcttcactcagccaactgctcgctcgctcacctccctcctctgcaccatgaccacctgcagccgccagttcacctcctccagctccatgaagggctcctgcggcatcgggggcggcatcgggggcggctccagccgcatctcctccgtcctggccggagggtcctgccgcgcccccagcacctacgggggcggcctgtctgtctcatcctcccgcttctcctctgggggagcctgcgggctggggggcggctatggcggtggcttcagcagcagcagcagcagctttggtagtggctttgggggaggatatggtggtggccttggtgctggcttgggtggtggctttggtggtggctttgctggtggtgatgggcttctggtgggcagtgagaaggtgaccatgcagaacctcaatgaccgcctggcctcctacctggacaaggtgcgtgctctggaggaggccaacgccgacctggaagtgaagatccgtgactggtaccagaggcagcggcctgctgagatcaaagactacagtccctacttcaagaccattgaggacctgaggaacaagattctcacagccacagtggacaatgccaatgtccttctgcagattgacaatgcccgtctggccgcggatgacttccgcaccaagtatgagacagagttgaacctgcgcatgagtgtggaagccgacatcaatggcctgcgcagggtgctggacgaactgaccctggccagagctgacctggagatgcagattgagagcctgaaggaggagctggcctacctgaagaagaaccacgaggaggagatgaatgccctgagaggccaggtgggtggagatgtcaatgtggagatggacgctgcacctggcgtggacctgagccgcattctgaacgagatgcgtgaccagtatgagaagatggcagagaagaaccgcaaggatgccgaggaatggttcttcaccaagacagaggagctgaaccgcgaggtggccaccaacagcgagctggtgcagagcggcaagagcgagatctcggagctccggcgcaccatgcagaacctggagattgagctgcagtcccagctcagcatgaaagcatccctggagaacagcctggaggagaccaaaggtcgctactgcatgcagctggcccagatccaggagatgattggcagcgtggaggagcagctggcccagctccgctgcgagatggagcagcagaaccaggagtacaagatcctgctggacgtgaagacgcggctggagcaggagatcgccacctaccgccgcctgctggagggcgaggacgcccacctctcctcctcccagttctcctctggatcgcagtcatccagagatgtgacctcctccagccgccaaatccgcaccaaggtcatggatgtgcacgatggcaaggtggtgtccacccacgagcaggtccttcgcaccaagaactgaggctgcccagccccgctcaggcctaggaggccccccgtgtggacacagatcccactggaagatcccctctcctgcccaagcacttcacagctggaccctgcttcaccctcaccccctcctggcaatcaatacagcttcattatctgagttgcatacccgagcaccttctcttcactcagccaactgctcgctcgctcacctccctcctctgcaccatgaccacctgcagccgccagttcacctcctccagctccatgaagggctcctgcggcatcgggggcggcatcgggggcggctccagccgcatctcctccgtcctggccggagggtcctgccgcgcccccagcacctacgggggcggcctgtctgtctcatcctcccgcttctcctctgggggagcctgcgggctggggggcggctatggcggtggcttcagcagcagcagcagcagctttggtagtggctttgggggaggatatggtggtggccttggtgctggcttgggtggtggctttggtggtggctttgctggtggtgatgggcttctggtgggcagtgagaaggtgaccatgcagaacctcaatgaccgcctggcctcctacctggacaaggtgcgtgctctggaggaggccaacgccgacctggaagtgaagatccgtgactggtaccagaggcagcggcctgctgagatcaaagactacagtccctacttcaagaccattgaggacctgaggaacaagattctcacagccacagtggacaatgccaatgtccttctgcagattgacaatgcccgtctggccgcggatgacttccgcaccaagtatgagacagagttgaacctgcgcatgagtgtggaagccgacatcaatggcctgcgcagggtgctggacgaactgaccctggccagagctgacctggagatgcagattgagagcctgaaggaggagctggcctacctgaagaagaaccacgaggaggagatgaatgccctgagaggccaggtgggtggagatgtcaatgtggagatggacgctgcacctggcgtggacctgagccgcattctgaacgagatgcgtgaccagtatgagaagatggcagagaagaaccgcaaggatgccgaggaatggttcttcaccaagacagaggagctgaaccgcgaggtggccaccaacagcgagctggtgcagagcggcaagagcgagatctcggagctccggcgcaccatgcagaacctggagattgagctgcagtcccagctcagcatgaaagcatccctggagaacagcctggaggagaccaaaggtcgctactgcatgcagctggcccagatccaggagatgattggcagcgtggaggagcagctggcccagctccgctgcgagatggagcagcagaaccaggagtacaagatcctgctggacgtgaagacgcggctggagcaggagatcgccacctaccgccgcctgctggagggcgaggacgcccacctctcctcctcccagttctcctctggatcgcagtcatccagagatgtgacctcctccagccgccaaatccgcaccaaggtcatggatgtgcacgatggcaaggtggtgtccacccacgagcaggtccttcgcaccaagaactgaggctgcccagccccgctcaggcctaggaggccccccgtgtggacacagatcccactggaagatcccctctcctgcccaagcacttcacagctggaccctgcttcaccctcaccccctcctggcaatcaatacagcttcattatctgagttgcatacccgagcaccttctcttcactcagccaactgctcgctcgctcacctccctcctctgcaccatgaccacctgcagccgccagttcacctcctccagctccatgaagggctcctgcggcatcgggggcggcatcgggggcggctccagccgcatctcctccgtcctggccggagggtcctgccgcgcccccagcacctacgggggcggcctgtctgtctcatcctcccgcttctcctctgggggagcctgcgggctggggggcggctatggcggtggcttcagcagcagcagcagcagctttggtagtggctttgggggaggatatggtggtggccttggtgctggcttgggtggtggctttggtggtggctttgctggtggtgatgggcttctggtgggcagtgagaaggtgaccatgcagaacctcaatgaccgcctggcctcctacctggacaaggtgcgtgctctggaggaggccaacgccgacctggaagtgaagatccgtgactggtaccagaggcagcggcctgctgagatcaaagactacagtccctacttcaagaccattgaggacctgaggaacaagattctcacagccacagtggacaatgccaatgtccttctgcagattgacaatgcccgtctggccgcggatgacttccgcaccaagtatgagacagagttgaacctgcgcatgagtgtggaagccgacatcaatggcctgcgcagggtgctggacgaactgaccctggccagagctgacctggagatgcagattgagagcctgaaggaggagctggcctacctgaagaagaaccacgaggaggagatgaatgccctgagaggccaggtgggtggagatgtcaatgtggagatggacgctgcacctggcgtggacctgagccgcattctgaacgagatgcgtgaccagtatgagaagatggcagagaagaaccgcaaggatgccgaggaatggttcttcaccaagacagaggagctgaaccgcgaggtggccaccaacagcgagctggtgcagagcggcaagagcgagatctcggagctccggcgcaccatgcagaacctggagattgagctgcagtcccagctcagcatgaaagcatccctggagaacagcctggaggagaccaaaggtcgctactgcatgcagctggcccagatccaggagatgattggcagcgtggaggagcagctggcccagctccgctgcgagatggagcagcagaaccaggagtacaagatcctgctggacgtgaagacgcggctggagcaggagatcgccacctaccgccgcctgctggagggcgaggacgcccacctctcctcctcccagttctcctctggatcgcagtcatccagagatgtgacctcctccagccgccaaatccgcaccaaggtcatggatgtgcacgatggcaaggtggtgtccacccacgagcaggtccttcgcaccaagaactgaggctgcccagccccgctcaggcctaggaggccccccgtgtggacacagatcccactggaagatcccctctcctgcccaagcacttcacagctggaccctgcttcaccctcaccccctcctggcaatcaatacagcttcattatctgagttgcatacccgagcaccttctcttcactcagccaactgctcgctcgctcacctccctcctctgcaccatgaccacctgcagccgccagttcacctcctccagctccatgaagggctcctgcggcatcgggggcggcatcgggggcggctccagccgcatctcctccgtcctggccggagggtcctgccgcgcccccagcacctacgggggcggcctgtctgtctcatcctcccgcttctcctctgggggagcctgcgggctggggggcggctatggcggtggcttcagcagcagcagcagcagctttggtagtggctttgggggaggatatggtggtggccttggtgctggcttgggtggtggctttggtggtggctttgctggtggtgatgggcttctggtgggcagtgagaaggtgaccatgcagaacctcaatgaccgcctggcctcctacctggacaaggtgcgtgctctggaggaggccaacgccgacctggaagtgaagatccgtgactggtaccagaggcagcggcctgctgagatcaaagactacagtccctacttcaagaccattgaggacctgaggaacaagattctcacagccacagtggacaatgccaatgtccttctgcagattgacaatgcccgtctggccgcggatgacttccgcaccaagtatgagacagagttgaacctgcgcatgagtgtggaagccgacatcaatggcctgcgcagggtgctggacgaactgaccctggccagagctgacctggagatgcagattgagagcctgaaggaggagctggcctacctgaagaagaaccacgaggaggagatgaatgccctgagaggccaggtgggtggagatgtcaatgtggagatggacgctgcacctggcgtggacctgagccgcattctgaacgagatgcgtgaccagtatgagaagatggcagagaagaaccgcaaggatgccgaggaatggttcttcaccaagacagaggagctgaaccgcgaggtggccaccaacagcgagctggtgcagagcggcaagagcgagatctcggagctccggcgcaccatgcagaacctggagattgagctgcagtcccagctcagcatgaaagcatccctggagaacagcctggaggagaccaaaggtcgctactgcatgcagctggcccagatccaggagatgattggcagcgtggaggagcagctggcccagctccgctgcgagatggagcagcagaaccaggagtacaagatcctgctggacgtgaagacgcggctggagcaggagatcgccacctaccgccgcctgctggagggcgaggacgcccacctctcctcctcccagttctcctctggatcgcagtcatccagagatgtgacctcctccagccgccaaatccgcaccaaggtcatggatgtgcacgatggcaaggtggtgtccacccacgagcaggtccttcgcaccaagaactgaggctgcccagccccgctcaggcctaggaggccccccgtgtggacacagatcccactggaagatcccctctcctgcccaagcacttcacagctggaccctgcttcaccctcaccccctcctggcaatcaatacagcttcattatctgagttgcatacccgagcaccttctcttcactcagccaactgctcgctcgctcacctccctcctctgcaccatgaccacctgcagccgccagttcacctcctccagctccatgaagggctcctgcggcatcgggggcggcatcgggggcggctccagccgcatctcctccgtcctggccggagggtcctgccgcgcccccagcacctacgggggcggcctgtctgtctcatcctcccgcttctcctctgggggagcctgcgggctggggggcggctatggcggtggcttcagcagcagcagcagcagctttggtagtggctttgggggaggatatggtggtggccttggtgctggcttgggtggtggctttggtggtggctttgctggtggtgatgggcttctggtgggcagtgagaaggtgaccatgcagaacctcaatgaccgcctggcctcctacctggacaaggtgcgtgctctggaggaggccaacgccgacctggaagtgaagatccgtgactggtaccagaggcagcggcctgctgagatcaaagactacagtccctacttcaagaccattgaggacctgaggaacaagattctcacagccacagtggacaatgccaatgtccttctgcagattgacaatgcccgtctggccgcggatgacttccgcaccaagtatgagacagagttgaacctgcgcatgagtgtggaagccgacatcaatggcctgcgcagggtgctggacgaactgaccctggccagagctgacctggagatgcagattgagagcctgaaggaggagctggcctacctgaagaagaaccacgaggaggagatgaatgccctgagaggccaggtgggtggagatgtcaatgtggagatggacgctgcacctggcgtggacctgagccgcattctgaacgagatgcgtgaccagtatgagaagatggcagagaagaaccgcaaggatgccgaggaatggttcttcaccaagacagaggagctgaaccgcgaggtggccaccaacagcgagctggtgcagagcggcaagagcgagatctcggagctccggcgcaccatgcagaacctggagattgagctgcagtcccagctcagcatgaaagcatccctggagaacagcctggaggagaccaaaggtcgctactgcatgcagctggcccagatccaggagatgattggcagcgtggaggagcagctggcccagctccgctgcgagatggagcagcagaaccaggagtacaagatcctgctggacgtgaagacgcggctggagcaggagatcgccacctaccgccgcctgctggagggcgaggacgcccacctctcctcctcccagttctcctctggatcgcagtcatccagagatgtgacctcctccagccgccaaatccgcaccaaggtcatggatgtgcacgatggcaaggtggtgtccacccacgagcaggtccttcgcaccaagaactgaggctgcccagccccgctcaggcctaggaggccccccgtgtggacacagatcccactggaagatcccctctcctgcccaagcacttcacagctggaccctgcttcaccctcaccccctcctggcaatcaatacagcttcattatctgagttgcat

SEQ ID NO: 701 - DNA, 32765 bp, Homo sapiens
  misc_feature (567)..(567): second gene starts at position 567
atgatgagctttgtgcaaaaggggagctggctacttctcgctctgcttcatcccactattattttggcacaacaggaagctgttgaaggaggatgttcccatcttggtcagtcctatgcggatagagatgtctggaagccagaaccatgccaaatatgtgtctgtgactcaggatccgttctctgcgatgacataatatgtgacgatcaagaattagactgccccaacccagaaattccatttggagaatgttgtgcagtttgcccacagcctccaactgctcctactcgccctcctaatggtcaaggacctcaaggccccaagggagatccaggccctcctggtattcctgggagaaatggtgaccctggtattccaggacaaccagggtcccctggttctcctggcccccctggaatctgtgaatcatgccctactggtcctcagaactattctccccagtatgattcatatgatgtcaagtctggagtagcagtaggaggactcgcaggctatcctggaccagctggccccccaggccctcccggtccccctggtacatctggtcatcctggttcccctggatctccaggataccaaggaccccctggtgaacctgggcaagctggtccttcaggccctccaggacctcctggtgctataggtccatctggtcctgctggaaaagatggagaatcaggtagacccggacgacctggagagcgaggattgcctggacctccaggtatcaaaggtccagctgggatacctggattccctggtatgaaaggacacagaggcttcgatggacgaaatggagaaaagggtgaaacaggtgctcctggattaaagggtgaaaatggtcttccaggcgaaaatggagctcctggacccatgggtccaagaggggctcctggtgagcgaggacggccaggacttcctggggctgcaggtgctcggggtaatgacggtgctcgaggcagtgatggtcaaccaggccctcctggtcctcctggaactgccggattccctggatcccctggtgctaagggtgaagttggacctgcagggtctcctggttcaaatggtgcccctggacaaagaggagaacctggacctcagggacacgctggtgctcaaggtcctcctggccctcctgggattaatggtagtcctggtggtaaaggcgaaatgggtcccgctggcattcctggagctcctggactgatgggagcccggggtcctccaggaccagccggtgctaatggtgctcctggactgcgaggtggtgcaggtgagcctggtaagaatggtgccaaaggagagcccggaccacgtggtgaacgcggtgaggctggtattccaggtgttccaggagctaaaggcgaagatggcaaggatggatcacctggagaacctggtgcaaatgggcttccaggagctgcaggagaaaggggtgcccctgggttccgaggacctgctggaccaaatggcatcccaggagaaaagggtcctgctggagagcgtggtgctccaggccctgcagggcccagaggagctgctggagaacctggcagagatggcgtccctggaggtccaggaatgaggggcatgcccggaagtccaggaggaccaggaagtgatgggaaaccagggcctcccggaagtcaaggagaaagtggtcgaccaggtcctcctgggccatctggtccccgaggtcagcctggtgtcatgggcttccccggtcctaaaggaaatgatggtgctcctggtaagaatggagaacgaggtggccctggaggacctggccctcagggtcctcctggaaagaatggtgaaactggacctcagggacccccagggcctactgggcctggtggtgacaaaggagacacaggaccccctggtccacaaggattacaaggcttgcctggtacaggtggtcctccaggagaaaatggaaaacctggggaaccaggtccaaagggtgatgccggtgcacctggagctccaggaggcaagggtgatgctggtgcccctggtgaacgtggacctcctggattggcaggggccccaggacttagaggtggagctggtccccctggtcccgaaggaggaaagggtgctgctggtcctcctgggccacctggtgctgctggtactcctggtctgcaaggaatgcctggagaaagaggaggtcttggaagtcctggtccaaagggtgacaagggtgaaccaggcggtccaggtgctgatggtgtcccagggaaagatggcccaaggggtcctactggtcctattggtcctcctggcccagctggccagcctggagataagggtgaaggtggtgcccccggacttccaggtatagctggacctcgtggtagccctggtgagagaggtgaaactggccctccaggacctgctggtttccctggtgctcctggacagaatggtgaacctggtggtaaaggagaaagaggggctccgggtgagaaaggtgaaggaggccctcctggagttgcaggaccccctggaggttctggacctgctggtcctcctggtccccaaggtgtcaaaggtgaacgtggcagtcctggtggacctggtgctgctggcttccctggtgctcgtggtcttcctggtcctcctggtagtaatggtaacccaggacccccaggtcccagcggttctccaggcaaggatgggcccccaggtcctgcgggtaacactggtgctcctggcagccctggagtgtctggaccaaaaggtgatgctggccaaccaggagagaagggatcgcctggtgcccagggcccaccaggagctccaggcccacttgggattgctgggatcactggagcacggggtcttgcaggaccaccaggcatgccaggtcctaggggaagccctggccctcagggtgtcaagggtgaaagtgggaaaccaggagctaacggtctcagtggagaacgtggtccccctggaccccagggtcttcctggtctggctggtacagctggtgaacctggaagagatggaaaccctggatcagatggtcttccaggccgagatggatctcctggtggcaagggtgatcgtggtgaaaatggctctcctggtgcccctggcgctcctggtcatccaggcccacctggtcctgtcggtccagctggaaagagtggtgacagaggagaaagtggccctgctggccctgctggtgctcccggtcctgctggttcccgaggtgctcctggtcctcaaggcccacgtggtgacaaaggtgaaacaggtgaacgtggagctgctggcatcaaaggacatcgaggattccctggtaatccaggtgccccaggttctccaggccctgctggtcagcagggtgcaatcggcagtccaggacctgcaggccccagaggacctgttggacccagtggacctcctggcaaagatggaaccagtggacatccaggtcccattggaccaccagggcctcgaggtaacagaggtgaaagaggatctgagggctccccaggccacccagggcaaccaggccctcctggaccccccccggaccccccggacctcccggaccccctggcctcggaggaaactttgctccccagctgtcttatggctatgatgagaaatcaaccggaggaatttccgtgcctggccccatgggtccctctggtcctcgtggtctccctggcccccctggtgcacctggtccccaaggcttccaaggtccccctggtgagcctggcgagcctggagcttcaggtcccatgggtccccgaggtcccccaggtccccctggaaagaatggagatgatggggaagctggaaaacctggtcgtcctggtgagcgtgggcctcctgggcctcagggtgctcgaggattgcccggaacagctggcctccctggaatgaagggacacagaggtttcagtggtttggatggtgccaagggagatgctggtcctgctggtcctaagggtgagcctggcagccctggtgaaaatggagctcctggtcagatgggcccccgtggcctgcctggtgagagaggtcgccctggagcccctggccctgctggtgctcgtggaaatgatggtgctactggtgctgccgggccccctggtcccaccggccccgctggtcctcctggcttccctggtgctgttggtgctaagggtgaagctggtccccaagggccccgaggctctgaaggtccccagggtgtgcgtggtgagcctggcccccctggccctgctggtgctgctggccctgctggaaaccctggtgctgatggacagcctggtgctaaaggtgccaatggtgctcctggtattgctggtgctcctggcttccctggtgcccgaggcccctctggaccccagggccccggcggccctcctggtcccaagggtaacagcggtgaacctggtgctcctggcagcaaaggagacactggtgctaagggagagcctggccctgttggtgttcaaggaccccctggccctgctggagaggaaggaaagcgaggagctcgaggtgaacccggacccactggcctgcccggaccccctggcgagcgtggtggacctggtagccgtggtttccctggcgcagatggtgttgctggtcccaagggtcccgctggtgaacgtggttctcctggccctgctggccccaaaggatctcctggtgaagctggtcgtcccggtgaagctggtctgcctggtgccaagggtctgactggaagccctggcagccctggtcctgatggcaaaactggcccccctggtcccgccggtcaagatggtcgccccggacccccaggcccacctggtgcccgtggtcaggctggtgtgatgggattccctggacctaaaggtgctgctggagagcccggcaaggctggagagcgaggtgttcccggaccccctggcgctgtcggtcctgctggcaaagatggagaggctggagctcagggaccccctggccctgctggtcccgctggcgagagaggtgaacaaggccctgctggctcccccggattccagggtctccctggtcctgctggtcctccaggtgaagcaggcaaacctggtgaacagggtgttcctggagaccttggcgcccctggcccctctggagcaagaggcgagagaggtttccctggcgagcgtggtgtgcaaggtccccctggtcctgctggtccccgaggggccaacggtgctcccggcaacgatggtgctaagggtgatgctggtgcccctggagctcccggtagccagggcgcccctggccttcagggaatgcctggtgaacgtggtgcagctggtcttccagggcctaagggtgacagaggtgatgctggtcccaaaggtgctgatggctctcctggcaaagatggcgtccgtggtctgactggccccattggtcctcctggccctgctggtgcccctggtgacaagggtgaaagtggtcccagcggccctgctggtcccactggagctcgtggtgcccccggagaccgtggtgagcctggtccccccggccctgctggctttgctggcccccctggtgctgacggccaacctggtgctaaaggcgaacctggtgatgctggtgctaaaggcgatgctggtccccctggccctgccggacccgctggaccccctggccccattggtaatgttggtgctcctggagccaaaggtgctcgcggcagcgctggtccccctggtgctactggtttccctggtgctgctggccgagtcggtcctcctggcccctctggaaatgctggaccccctggccctcctggtcctgctggcaaagaaggcggcaaaggtccccgtggtgagactggccctgctggacgtcctggtgaagttggtccccctggtccccctggccctgctggcgagaaaggatcccctggtgctgatggtcctgctggtgctcctggtactcccgggcctcaaggtattgctggacagcgtggtgtggtcggcctgcctggtcagagaggagagagaggcttccctggtcttcctggcccctctggtgaacctggcaaacaaggtccctctggagcaagtggtgaacgtggtccccctggtcccatgggcccccctggattggctggaccccctggtgaatctggacgtgagggggctcctggtgccgaaggttcccctggacgagacggttctcctggcgccaagggtgaccgtggtgagaccggccccgctggaccccctggtgctcctggtgctcctggtgcccctggccccgttggccctgctggcaagagtggtgatcgtggtgagactggtcctgctggtcccaccggtcctgtcggccctgttggcgcccgtggccccgccggaccccaaggcccccgtggtgacaagggtgagacaggcgaacagggcgacagaggcataaagggtcaccgtggcttctctggcctccagggtccccctggccctcctggctctcctggtgaacaaggtccctctggagcctctggtcctgctggtccccgaggtccccctggctctgctggtgctcctggcaaagatggactcaacggtctccctggccccattgggccccctggtcctcgcggtcgcactggtgatgctggtcctgttggtccccccggccctcctggacctcctggtccccctggtcctcccagcgctggtttcgacttcagcttcctgccccagccacctcaagagaaggctcacgatggtggccgctactaccgggctgatgatgccaatgtggttcgtgaccgtgacctcgaggtggacaccaccctcaagagcctgagccagcagatcgagaacatccggagcccagagggcagccgcaagaaccccgcccgcacctgccgtgacctcaagatgtgccactctgactggaagagtggagagtactggattgaccccaaccaaggctgcaacctggatgccatcaaagtcttctgcaacatggagactggtgagacctgcgtgtaccccactcagcccagtgtggcccagaagaactggtacatcagcaagaaccccaaggacaagaggcatgtctggttcggcgagagcatgaccgatggattccagttcgagtatggcggccagggctccgaccctgccgatgtggccatccagctgaccttcctgcgcctgatgtccaccgaggcctcccagaacatcacctaccactgcaagaacagcgtggcctacatggaccagcagactggcaacctcaagaaggccctgctcctccagggctccaacgagatcgagatccgcgccgagggcaacagccgcttcacctacagcgtcactgtcgatggctgcacgagtcacaccggagcctggggcaagacagtgattgaatacaaaaccaccaagacctcccgcctgcccatcatcgatgtggcccccttggacgttggtgccccagaccaggaattcggcttcgacgttggccctgtctgcttcctgtaaactccctccatcccaacctggctccctcccacccaaccaactttccccccaacccggaaacagacaagcaacccaaactgaaccccctcaaaagccaaaaaatgggagacaatttcacatggactttggaaaatatttttttcctttgcattcatctctcaaacttagtttttatctttgaccaaccgaacatgaccaaaaaccaaaagtgcattcaaccttaccaaaaaaaaaaaaaaaaaaagaataaataaataactttttaaaaaaggaagcttggtccacttgcttgaagacccatgcgggggtaagtccctttctgcccgttgggcttatgaaaccccaatgctgccctttctgctcctttctccacaccccccttggggcctcccctccactccttcccaaatctgtctccccagaagacacaggaaacaatgtattgtctgcccagcaatcaaaggcaatgctcaaacacccaagtggcccccaccctcagcccgctcctgcccgcccagcacccccaggccctgggggacctggggttctcagactgccaaagaagccttgccatctggcgctcccatggctcttgcaacatctccccttcgtttttgagggggtcatgccgggggagccaccagcccctcactgggttcggaggagagtcaggaagggccacgacaaagcagaaacatcggatttggggaacgcgtgtcaatcccttgtgccgcagggctgggcgggagagactgttctgttccttgtgtaactgtgttgctgaaagactacctcgttcttgtcttgatgtgtcaccggggcaactgcctgggggcggggatgggggcagggtggaagcggctccccattttataccaaaggtgctacatctatgtgatgggtggggtggggagggaatcactggtgctatagaaattgagatgcccccccaggccagcaaatgttcctttttgttcaaagtctatttttattccttgatatttttctttttttttttttttttttgtggatggggacttgtgaatttttctaaaggtgctatttaacatgggaggagagcgtgtgcggctccagcccagcccgctgctcactttccaccctctctccacctgcctctggcttctcaggcctctgctctccgacctctctcctctgaaaccctcctccacagctgcagcccatcctcccggctccctcctagtctgtcctgcgtcctctgtccccgggtttcagagacaacttcccaaagcacaaagcagtttttccccctaggggtgggaggaagcaaaagactctgtacctattttgtatgtgtataataatttgagatgtttttaattattttgattgctggaataaagcatgtggaaatgacccaaacataatcgtcggagcagacgggagtttctcctcggggtcggagcaggaggcacgcggagtgtgaggccacgcatgagcggacgctaaccccctccccagccacaaagagtctacatgtctagggtctagacatgttcagctttgtggacctccggctcctgctcctcttagcggccaccgccctcctgacgcacggccaagaggaaggccaagtcgagggccaagacgaagacatcccaccaatcacctgcgtacagaacggcctcaggtaccatgaccgagacgtgtggaaacccgagccctgccggatctgcgtctgcgacaacggcaaggtgttgtgcgatgacgtgatctgtgacgagaccaagaactgccccggcgccgaagtccccgagggcgagtgctgtcccgtctgccccgacggctcagagtcacccaccgaccaagaaaccaccggcgtcgagggacccaagggagacactggcccccgaggcccaaggggacccgcaggcccccctggccgagatggcatccctggacagcctggacttcccggaccccccggaccccccggacctcccggaccccctggcctcggaggaaactttgctccccagctgtcttatggctatgatgagaaatcaaccggaggaatttccgtgcctggccccatgggtccctctggtcctcgtggtctccctggcccccctggtgcacctggtccccaaggcttccaaggtccccctggtgagcctggcgagcctggagcttcaggtcccatgggtccccgaggtcccccaggtccccctggaaagaatggagatgatggggaagctggaaaacctggtcgtcctggtgagcgtgggcctcctgggcctcagggtgctcgaggattgcccggaacagctggcctccctggaatgaagggacacagaggtttcagtggtttggatggtgccaagggagatgctggtcctgctggtcctaagggtgagcctggcagccctggtgaaaatggagctcctggtcagatgggcccccgtggcctgcctggtgagagaggtcgccctggagcccctggccctgctggtgctcgtggaaatgatggtgctactggtgctgccgggccccctggtcccaccggccccgctggtcctcctggcttccctggtgctgttggtgctaagggtgaagctggtccccaagggccccgaggctctgaaggtccccagggtgtgcgtggtgagcctggcccccctggccctgctggtgctgctggccctgctggaaaccctggtgctgatggacagcctggtgctaaaggtgccaatggtgctcctggtattgctggtgctcctggcttccctggtgcccgaggcccctctggaccccagggccccggcggccctcctggtcccaagggtaacagcggtgaacctggtgctcctggcagcaaaggagacactggtgctaagggagagcctggccctgttggtgttcaaggaccccctggccctgctggagaggaaggaaagcgaggagctcgaggtgaacccggacccactggcctgcccggaccccctggcgagcgtggtggacctggtagccgtggtttccctggcgcagatggtgttgctggtcccaagggtcccgctggtgaacgtggttctcctggccctgctggccccaaaggatctcctggtgaagctggtcgtcccggtgaagctggtctgcctggtgccaagggtctgactggaagccctggcagccctggtcctgatggcaaaactggcccccctggtcccgccggtcaagatggtcgccccggacccccaggcccacctggtgcccgtggtcaggctggtgtgatgggattccctggacctaaaggtgctgctggagagcccggcaaggctggagagcgaggtgttcccggaccccctggcgctgtcggtcctgctggcaaagatggagaggctggagctcagggaccccctggccctgctggtcccgctggcgagagaggtgaacaaggccctgctggctcccccggattccagggtctccctggtcctgctggtcctccaggtgaagcaggcaaacctggtgaacagggtgttcctggagaccttggcgcccctggcccctctggagcaagaggcgagagaggtttccctggcgagcgtggtgtgcaaggtccccctggtcctgctggtccccgaggggccaacggtgctcccggcaacgatggtgctaagggtgatgctggtgcccctggagctcccggtagccagggcgcccctggccttcagggaatgcctggtgaacgtggtgcagctggtcttccagggcctaagggtgacagaggtgatgctggtcccaaaggtgctgatggctctcctggcaaagatggcgtccgtggtctgactggccccattggtcctcctggccctgctggtgcccctggtgacaagggtgaaagtggtcccagcggccctgctggtcccactggagctcgtggtgcccccggagaccgtggtgagcctggtccccccggccctgctggctttgctggcccccctggtgctgacggccaacctggtgctaaaggcgaacctggtgatgctggtgctaaaggcgatgctggtccccctggccctgccggacccgctggaccccctggccccattggtaatgttggtgctcctggagccaaaggtgctcgcggcagcgctggtccccctggtgctactggtttccctggtgctgctggccgagtcggtcctcctggcccctctggaaatgctggaccccctggccctcctggtcctgctggcaaagaaggcggcaaaggtccccgtggtgagactggccctgctggacgtcctggtgaagttggtccccctggtccccctggccctgctggcgagaaaggatcccctggtgctgatggtcctgctggtgctcctggtactcccgggcctcaaggtattgctggacagcgtggtgtggtcggcctgcctggtcagagaggagagagaggcttccctggtcttcctggcccctctggtgaacctggcaaacaaggtccctctggagcaagtggtgaacgtggtccccctggtcccatgggcccccctggattggctggaccccctggtgaatctggacgtgagggggctcctggtgccgaaggttcccctggacgagacggttctcctggcgccaagggtgaccgtggtgagaccggccccgctggaccccctggtgctcctggtgctcctggtgcccctggccccgttggccctgctggcaagagtggtgatcgtggtgagactggtcctgctggtcccaccggtcctgtcggccctgttggcgcccgtggccccgccggaccccaaggcccccgtggtgacaagggtgagacaggcgaacagggcgacagaggcataaagggtcaccgtggcttctctggcctccagggtccccctggccctcctggctctcctggtgaacaaggtccctctggagcctctggtcctgctggtccccgaggtccccctggctctgctggtgctcctggcaaagatggactcaacggtctccctggccccattgggccccctggtcctcgcggtcgcactggtgatgctggtcctgttggtccccccggccctcctggacctcctggtccccctggtcctcccagcgctggtttcgacttcagcttcctgccccagccacctcaagagaaggctcacgatggtggccgctactaccgggctgatgatgccaatgtggttcgtgaccgtgacctcgaggtggacaccaccctcaagagcctgagccagcagatcgagaacatccggagcccagagggcagccgcaagaaccccgcccgcacctgccgtgacctcaagatgtgccactctgactggaagagtggagagtactggattgaccccaaccaaggctgcaacctggatgccatcaaagtcttctgcaacatggagactggtgagacctgcgtgtaccccactcagcccagtgtggcccagaagaactggtacatcagcaagaaccccaaggacaagaggcatgtctggttcggcgagagcatgaccgatggattccagttcgagtatggcggccagggctccgaccctgccgatgtggccatccagctgaccttcctgcgcctgatgtccaccgaggcctcccagaacatcacctaccactgcaagaacagcgtggcctacatggaccagcagactggcaacctcaagaaggccctgctcctccagggctccaacgagatcgagatccgcgccgagggcaacagccgcttcacctacagcgtcactgtcgatggctgcacgagtcacaccggagcctggggcaagacagtgattgaatacaaaaccaccaagacctcccgcctgcccatcatcgatgtggcccccttggacgttggtgccccagaccaggaattcggcttcgacgttggccctgtctgcttcctgtaaactccctccatcccaacctggctccctcccacccaaccaactttccccccaacccggaaacagacaagcaacccaaactgaaccccctcaaaagccaaaaaatgggagacaatttcacatggactttggaaaatatttttttcctttgcattcatctctcaaacttagtttttatctttgaccaaccgaacatgaccaaaaaccaaaagtgcattcaaccttaccaaaaaaaaaaaaaaaaaaagaataaataaataactttttaaaaaaggaagcttggtccacttgcttgaagacccatgcgggggtaagtccctttctgcccgttgggcttatgaaaccccaatgctgccctttctgctcctttctccacaccccccttggggcctcccctccactccttcccaaatctgtctccccagaagacacaggaaacaatgtattgtctgcccagcaatcaaaggcaatgctcaaacacccaagtggcccccaccctcagcccgctcctgcccgcccagcacccccaggccctgggggacctggggttctcagactgccaaagaagccttgccatctggcgctcccatggctcttgcaacatctccccttcgtttttgagggggtcatgccgggggagccaccagcccctcactgggttcggaggagagtcaggaagggccacgacaaagcagaaacatcggatttggggaacgcgtgtcaatcccttgtgccgcagggctgggcgggagagactgttctgttccttgtgtaactgtgttgctgaaagactacctcgttcttgtcttgatgtgtcaccggggcaactgcctgggggcggggatgggggcagggtggaagcggctccccattttataccaaaggtgctacatctatgtgatgggtggggtggggagggaatcactggtgctatagaaattgagatgcccccccaggccagcaaatgttcctttttgttcaaagtctatttttattccttgatatttttctttttttttttttttttttgtggatggggacttgtgaatttttctaaaggtgctatttaacatgggaggagagcgtgtgcggctccagcccagcccgctgctcactttccaccctctctccacctgcctctggcttctcaggcctctgctctccgacctctctcctctgaaaccctcctccacagctgcagcccatcctcccggctccctcctagtctgtcctgcgtcctctgtccccgggtttcagagacaacttcccaaagcacaaagcagtttttccccctaggggtgggaggaagcaaaagactctgtacctattttgtatgtgtataataatttgagatgtttttaattattttgattgctggaataaagcatgtggaaatgacccaaacataatcgtcggagcagacgggagtttctcctcggggtcggagcaggaggcacgcggagtgtgaggccacgcatgagcggacgctaaccccctccccagccacaaagagtctacatgtctagggtctagacatgttcagctttgtggacctccggctcctgctcctcttagcggccaccgccctcctgacgcacggccaagaggaaggccaagtcgagggccaagacgaagacatcccaccaatcacctgcgtacagaacggcctcaggtaccatgaccgagacgtgtggaaacccgagccctgccggatctgcgtctgcgacaacggcaaggtgttgtgcgatgacgtgatctgtgacgagaccaagaactgccccggcgccgaagtccccgagggcgagtgctgtcccgtctgccccgacggctcagagtcacccaccgaccaagaaaccaccggcgtcgagggacccaagggagacactggcccccgaggcccaaggggacccgcaggcccccctggccgagatggcatccctggacagcctggacttcccggaccccccggaccccccggacctcccggaccccctggcctcggaggaaactttgctccccagctgtcttatggctatgatgagaaatcaaccggaggaatttccgtgcctggccccatgggtccctctggtcctcgtggtctccctggcccccctggtgcacctggtccccaaggcttccaaggtccccctggtgagcctggcgagcctggagcttcaggtcccatgggtccccgaggtcccccaggtccccctggaaagaatggagatgatggggaagctggaaaacctggtcgtcctggtgagcgtgggcctcctgggcctcagggtgctcgaggattgcccggaacagctggcctccctggaatgaagggacacagaggtttcagtggtttggatggtgccaagggagatgctggtcctgctggtcctaagggtgagcctggcagccctggtgaaaatggagctcctggtcagatgggcccccgtggcctgcctggtgagagaggtcgccctggagcccctggccctgctggtgctcgtggaaatgatggtgctactggtgctgccgggccccctggtcccaccggccccgctggtcctcctggcttccctggtgctgttggtgctaagggtgaagctggtccccaagggccccgaggctctgaaggtccccagggtgtgcgtggtgagcctggcccccctggccctgctggtgctgctggccctgctggaaaccctggtgctgatggacagcctggtgctaaaggtgccaatggtgctcctggtattgctggtgctcctggcttccctggtgcccgaggcccctctggaccccagggccccggcggccctcctggtcccaagggtaacagcggtgaacctggtgctcctggcagcaaaggagacactggtgctaagggagagcctggccctgttggtgttcaaggaccccctggccctgctggagaggaaggaaagcgaggagctcgaggtgaacccggacccactggcctgcccggaccccctggcgagcgtggtggacctggtagccgtggtttccctggcgcagatggtgttgctggtcccaagggtcccgctggtgaacgtggttctcctggccctgctggccccaaaggatctcctggtgaagctggtcgtcccggtgaagctggtctgcctggtgccaagggtctgactggaagccctggcagccctggtcctgatggcaaaactggcccccctggtcccgccggtcaagatggtcgccccggacccccaggcccacctggtgcccgtggtcaggctggtgtgatgggattccctggacctaaaggtgctgctggagagcccggcaaggctggagagcgaggtgttcccggaccccctggcgctgtcggtcctgctggcaaagatggagaggctggagctcagggaccccctggccctgctggtcccgctggcgagagaggtgaacaaggccctgctggctcccccggattccagggtctccctggtcctgctggtcctccaggtgaagcaggcaaacctggtgaacagggtgttcctggagaccttggcgcccctggcccctctggagcaagaggcgagagaggtttccctggcgagcgtggtgtgcaaggtccccctggtcctgctggtccccgaggggccaacggtgctcccggcaacgatggtgctaagggtgatgctggtgcccctggagctcccggtagccagggcgcccctggccttcagggaatgcctggtgaacgtggtgcagctggtcttccagggcctaagggtgacagaggtgatgctggtcccaaaggtgctgatggctctcctggcaaagatggcgtccgtggtctgactggccccattggtcctcctggccctgctggtgcccctggtgacaagggtgaaagtggtcccagcggccctgctggtcccactggagctcgtggtgcccccggagaccgtggtgagcctggtccccccggccctgctggctttgctggcccccctggtgctgacggccaacctggtgctaaaggcgaacctggtgatgctggtgctaaaggcgatgctggtccccctggccctgccggacccgctggaccccctggccccattggtaatgttggtgctcctggagccaaaggtgctcgcggcagcgctggtccccctggtgctactggtttccctggtgctgctggccgagtcggtcctcctggcccctctggaaatgctggaccccctggccctcctggtcctgctggcaaagaaggcggcaaaggtccccgtggtgagactggccctgctggacgtcctggtgaagttggtccccctggtccccctggccctgctggcgagaaaggatcccctggtgctgatggtcctgctggtgctcctggtactcccgggcctcaaggtattgctggacagcgtggtgtggtcggcctgcctggtcagagaggagagagaggcttccctggtcttcctggcccctctggtgaacctggcaaacaaggtccctctggagcaagtggtgaacgtggtccccctggtcccatgggcccccctggattggctggaccccctggtgaatctggacgtgagggggctcctggtgccgaaggttcccctggacgagacggttctcctggcgccaagggtgaccgtggtgagaccggccccgctggaccccctggtgctcctggtgctcctggtgcccctggccccgttggccctgctggcaagagtggtgatcgtggtgagactggtcctgctggtcccaccggtcctgtcggccctgttggcgcccgtggccccgccggaccccaaggcccccgtggtgacaagggtgagacaggcgaacagggcgacagaggcataaagggtcaccgtggcttctctggcctccagggtccccctggccctcctggctctcctggtgaacaaggtccctctggagcctctggtcctgctggtccccgaggtccccctggctctgctggtgctcctggcaaagatggactcaacggtctccctggccccattgggccccctggtcctcgcggtcgcactggtgatgctggtcctgttggtccccccggccctcctggacctcctggtccccctggtcctcccagcgctggtttcgacttcagcttcctgccccagccacctcaagagaaggctcacgatggtggccgctactaccgggctgatgatgccaatgtggttcgtgaccgtgacctcgaggtggacaccaccctcaagagcctgagccagcagatcgagaacatccggagcccagagggcagccgcaagaaccccgcccgcacctgccgtgacctcaagatgtgccactctgactggaagagtggagagtactggattgaccccaaccaaggctgcaacctggatgccatcaaagtcttctgcaacatggagactggtgagacctgcgtgtaccccactcagcccagtgtggcccagaagaactggtacatcagcaagaaccccaaggacaagaggcatgtctggttcggcgagagcatgaccgatggattccagttcgagtatggcggccagggctccgaccctgccgatgtggccatccagctgaccttcctgcgcctgatgtccaccgaggcctcccagaacatcacctaccactgcaagaacagcgtggcctacatggaccagcagactggcaacctcaagaaggccctgctcctccagggctccaacgagatcgagatccgcgccgagggcaacagccgcttcacctacagcgtcactgtcgatggctgcacgagtcacaccggagcctggggcaagacagtgattgaatacaaaaccaccaagacctcccgcctgcccatcatcgatgtggcccccttggacgttggtgccccagaccaggaattcggcttcgacgttggccctgtctgcttcctgtaaactccctccatcccaacctggctccctcccacccaaccaactttccccccaacccggaaacagacaagcaacccaaactgaaccccctcaaaagccaaaaaatgggagacaatttcacatggactttggaaaatatttttttcctttgcattcatctctcaaacttagtttttatctttgaccaaccgaacatgaccaaaaaccaaaagtgcattcaaccttaccaaaaaaaaaaaaaaaaaaagaataaataaataactttttaaaaaaggaagcttggtccacttgcttgaagacccatgcgggggtaagtccctttctgcccgttgggcttatgaaaccccaatgctgccctttctgctcctttctccacaccccccttggggcctcccctccactccttcccaaatctgtctccccagaagacacaggaaacaatgtattgtctgcccagcaatcaaaggcaatgctcaaacacccaagtggcccccaccctcagcccgctcctgcccgcccagcacccccaggccctgggggacctggggttctcagactgccaaagaagccttgccatctggcgctcccatggctcttgcaacatctccccttcgtttttgagggggtcatgccgggggagccaccagcccctcactgggttcggaggagagtcaggaagggccacgacaaagcagaaacatcggatttggggaacgcgtgtcaatcccttgtgccgcagggctgggcgggagagactgttctgttccttgtgtaactgtgttgctgaaagactacctcgttcttgtcttgatgtgtcaccggggcaactgcctgggggcggggatgggggcagggtggaagcggctccccattttataccaaaggtgctacatctatgtgatgggtggggtggggagggaatcactggtgctatagaaattgagatgcccccccaggccagcaaatgttcctttttgttcaaagtctatttttattccttgatatttttctttttttttttttttttttgtggatggggacttgtgaatttttctaaaggtgctatttaacatgggaggagagcgtgtgcggctccagcccagcccgctgctcactttccaccctctctccacctgcctctggcttctcaggcctctgctctccgacctctctcctctgaaaccctcctccacagctgcagcccatcctcccggctccctcctagtctgtcctgcgtcctctgtccccgggtttcagagacaacttcccaaagcacaaagcagtttttccccctaggggtgggaggaagcaaaagactctgtacctattttgtatgtgtataataatttgagatgtttttaattattttgattgctggaataaagcatgtggaaatgacccaaacataatcgtcggagcagacgggagtttctcctcggggtcggagcaggaggcacgcggagtgtgaggccacgcatgagcggacgctaaccccctccccagccacaaagagtctacatgtctagggtctagacatgttcagctttgtggacctccggctcctgctcctcttagcggccaccgccctcctgacgcacggccaagaggaaggccaagtcgagggccaagacgaagacatcccaccaatcacctgcgtacagaacggcctcaggtaccatgaccgagacgtgtggaaacccgagccctgccggatctgcgtctgcgacaacggcaaggtgttgtgcgatgacgtgatctgtgacgagaccaagaactgccccggcgccgaagtccccgagggcgagtgctgtcccgtctgccccgacggctcagagtcacccaccgaccaagaaaccaccggcgtcgagggacccaagggagacactggcccccgaggcccaaggggacccgcaggcccccctggccgagatggcatccctggacagcctggacttcccggaccccccggaccccccggacctcccggaccccctggcctcggaggaaactttgctccccagctgtcttatggctatgatgagaaatcaaccggaggaatttccgtgcctggccccatgggtccctctggtcctcgtggtctccctggcccccctggtgcacctggtccccaaggcttccaaggtccccctggtgagcctggcgagcctggagcttcaggtcccatgggtccccgaggtcccccaggtccccctggaaagaatggagatgatggggaagctggaaaacctggtcgtcctggtgagcgtgggcctcctgggcctcagggtgctcgaggattgcccggaacagctggcctccctggaatgaagggacacagaggtttcagtggtttggatggtgccaagggagatgctggtcctgctggtcctaagggtgagcctggcagccctggtgaaaatggagctcctggtcagatgggcccccgtggcctgcctggtgagagaggtcgccctggagcccctggccctgctggtgctcgtggaaatgatggtgctactggtgctgccgggccccctggtcccaccggccccgctggtcctcctggcttccctggtgctgttggtgctaagggtgaagctggtccccaagggccccgaggctctgaaggtccccagggtgtgcgtggtgagcctggcccccctggccctgctggtgctgctggccctgctggaaaccctggtgctgatggacagcctggtgctaaaggtgccaatggtgctcctggtattgctggtgctcctggcttccctggtgcccgaggcccctctggaccccagggccccggcggccctcctggtcccaagggtaacagcggtgaacctggtgctcctggcagcaaaggagacactggtgctaagggagagcctggccctgttggtgttcaaggaccccctggccctgctggagaggaaggaaagcgaggagctcgaggtgaacccggacccactggcctgcccggaccccctggcgagcgtggtggacctggtagccgtggtttccctggcgcagatggtgttgctggtcccaagggtcccgctggtgaacgtggttctcctggccctgctggccccaaaggatctcctggtgaagctggtcgtcccggtgaagctggtctgcctggtgccaagggtctgactggaagccctggcagccctggtcctgatggcaaaactggcccccctggtcccgccggtcaagatggtcgccccggacccccaggcccacctggtgcccgtggtcaggctggtgtgatgggattccctggacctaaaggtgctgctggagagcccggcaaggctggagagcgaggtgttcccggaccccctggcgctgtcggtcctgctggcaaagatggagaggctggagctcagggaccccctggccctgctggtcccgctggcgagagaggtgaacaaggccctgctggctcccccggattccagggtctccctggtcctgctggtcctccaggtgaagcaggcaaacctggtgaacagggtgttcctggagaccttggcgcccctggcccctctggagcaagaggcgagagaggtttccctggcgagcgtggtgtgcaaggtccccctggtcctgctggtccccgaggggccaacggtgctcccggcaacgatggtgctaagggtgatgctggtgcccctggagctcccggtagccagggcgcccctggccttcagggaatgcctggtgaacgtggtgcagctggtcttccagggcctaagggtgacagaggtgatgctggtcccaaaggtgctgatggctctcctggcaaagatggcgtccgtggtctgactggccccattggtcctcctggccctgctggtgcccctggtgacaagggtgaaagtggtcccagcggccctgctggtcccactggagctcgtggtgcccccggagaccgtggtgagcctggtccccccggccctgctggctttgctggcccccctggtgctgacggccaacctggtgctaaaggcgaacctggtgatgctggtgctaaaggcgatgctggtccccctggccctgccggacccgctggaccccctggccccattggtaatgttggtgctcctggagccaaaggtgctcgcggcagcgctggtccccctggtgctactggtttccctggtgctgctggccgagtcggtcctcctggcccctctggaaatgctggaccccctggccctcctggtcctgctggcaaagaaggcggcaaaggtccccgtggtgagactggccctgctggacgtcctggtgaagttggtccccctggtccccctggccctgctggcgagaaaggatcccctggtgctgatggtcctgctggtgctcctggtactcccgggcctcaaggtattgctggacagcgtggtgtggtcggcctgcctggtcagagaggagagagaggcttccctggtcttcctggcccctctggtgaacctggcaaacaaggtccctctggagcaagtggtgaacgtggtccccctggtcccatgggcccccctggattggctggaccccctggtgaatctggacgtgagggggctcctggtgccgaaggttcccctggacgagacggttctcctggcgccaagggtgaccgtggtgagaccggccccgctggaccccctggtgctcctggtgctcctggtgcccctggccccgttggccctgctggcaagagtggtgatcgtggtgagactggtcctgctggtcccaccggtcctgtcggccctgttggcgcccgtggccccgccggaccccaaggcccccgtggtgacaagggtgagacaggcgaacagggcgacagaggcataaagggtcaccgtggcttctctggcctccagggtccccctggccctcctggctctcctggtgaacaaggtccctctggagcctctggtcctgctggtccccgaggtccccctggctctgctggtgctcctggcaaagatggactcaacggtctccctggccccattgggccccctggtcctcgcggtcgcactggtgatgctggtcctgttggtccccccggccctcctggacctcctggtccccctggtcctcccagcgctggtttcgacttcagcttcctgccccagccacctcaagagaaggctcacgatggtggccgctactaccgggctgatgatgccaatgtggttcgtgaccgtgacctcgaggtggacaccaccctcaagagcctgagccagcagatcgagaacatccggagcccagagggcagccgcaagaaccccgcccgcacctgccgtgacctcaagatgtgccactctgactggaagagtggagagtactggattgaccccaaccaaggctgcaacctggatgccatcaaagtcttctgcaacatggagactggtgagacctgcgtgtaccccactcagcccagtgtggcccagaagaactggtacatcagcaagaaccccaaggacaagaggcatgtctggttcggcgagagcatgaccgatggattccagttcgagtatggcggccagggctccgaccctgccgatgtggccatccagctgaccttcctgcgcctgatgtccaccgaggcctcccagaacatcacctaccactgcaagaacagcgtggcctacatggaccagcagactggcaacctcaagaaggccctgctcctccagggctccaacgagatcgagatccgcgccgagggcaacagccgcttcacctacagcgtcactgtcgatggctgcacgagtcacaccggagcctggggcaagacagtgattgaatacaaaaccaccaagacctcccgcctgcccatcatcgatgtggcccccttggacgttggtgccccagaccaggaattcggcttcgacgttggccctgtctgcttcctgtaaactccctccatcccaacctggctccctcccacccaaccaactttccccccaacccggaaacagacaagcaacccaaactgaaccccctcaaaagccaaaaaatgggagacaatttcacatggactttggaaaatatttttttcctttgcattcatctctcaaacttagtttttatctttgaccaaccgaacatgaccaaaaaccaaaagtgcattcaaccttaccaaaaaaaaaaaaaaaaaaagaataaataaataactttttaaaaaaggaagcttggtccacttgcttgaagacccatgcgggggtaagtccctttctgcccgttgggcttatgaaaccccaatgctgccctttctgctcctttctccacaccccccttggggcctcccctccactccttcccaaatctgtctccccagaagacacaggaaacaatgtattgtctgcccagcaatcaaaggcaatgctcaaacacccaagtggcccccaccctcagcccgctcctgcccgcccagcacccccaggccctgggggacctggggttctcagactgccaaagaagccttgccatctggcgctcccatggctcttgcaacatctccccttcgtttttgagggggtcatgccgggggagccaccagcccctcactgggttcggaggagagtcaggaagggccacgacaaagcagaaacatcggatttggggaacgcgtgtcaatcccttgtgccgcagggctgggcgggagagactgttctgttccttgtgtaactgtgttgctgaaagactacctcgttcttgtcttgatgtgtcaccggggcaactgcctgggggcggggatgggggcagggtggaagcggctccccattttataccaaaggtgctacatctatgtgatgggtggggtggggagggaatcactggtgctatagaaattgagatgcccccccaggccagcaaatgttcctttttgttcaaagtctatttttattccttgatatttttctttttttttttttttttttgtggatggggacttgtgaatttttctaaaggtgctatttaacatgggaggagagcgtgtgcggctccagcccagcccgctgctcactttccaccctctctccacctgcctctggcttctcaggcctctgctctccgacctctctcctctgaaaccctcctccacagctgcagcccatcctcccggctccctcctagtctgtcctgcgtcctctgtccccgggtttcagagacaacttcccaaagcacaaagcagtttttccccctaggggtgggaggaagcaaaagactctgtacctattttgtatgtgtataataatttgagatgtttttaattattttgattgctggaataaagcatgtggaaatgacccaaacataatcgtcggagcagacgggagtttctcctcggggtcggagcaggaggcacgcggagtgtgaggccacgcatgagcggacgctaaccccctccccagccacaaagagtctacatgtctagggtctagacatgttcagctttgtggacctccggctcctgctcctcttagcggccaccgccctcctgacgcacggccaagaggaaggccaagtcgagggccaagacgaagacatcccaccaatcacctgcgtacagaacggcctcaggtaccatgaccgagacgtgtggaaacccgagccctgccggatctgcgtctgcgacaacggcaaggtgttgtgcgatgacgtgatctgtgacgagaccaagaactgccccggcgccgaagtccccgagggcgagtgctgtcccgtctgccccgacggctcagagtcacccaccgaccaagaaaccaccggcgtcgagggacccaagggagacactggcccccgaggcccaaggggacccgcaggcccccctggccgagatggcatccctggacagcctggacttcccggaccccccggaccccccggacctcccggaccccctggcctcggaggaaactttgctccccagctgtcttatggctatgatgagaaatcaaccggaggaatttccgtgcctggccccatgggtccctctggtcctcgtggtctccctggcccccctggtgcacctggtccccaaggcttccaaggtccccctggtgagcctggcgagcctggagcttcaggtcccatgggtccccgaggtcccccaggtccccctggaaagaatggagatgatggggaagctggaaaacctggtcgtcctggtgagcgtgggcctcctgggcctcagggtgctcgaggattgcccggaacagctggcctccctggaatgaagggacacagaggtttcagtggtttggatggtgccaagggagatgctggtcctgctggtcctaagggtgagcctggcagccctggtgaaaatggagctcctggtcagatgggcccccgtggcctgcctggtgagagaggtcgccctggagcccctggccctgctggtgctcgtggaaatgatggtgctactggtgctgccgggccccctggtcccaccggccccgctggtcctcctggcttccctggtgctgttggtgctaagggtgaagctggtccccaagggccccgaggctctgaaggtccccagggtgtgcgtggtgagcctggcccccctggccctgctggtgctgctggccctgctggaaaccctggtgctgatggacagcctggtgctaaaggtgccaatggtgctcctggtattgctggtgctcctggcttccctggtgcccgaggcccctctggaccccagggccccggcggccctcctggtcccaagggtaacagcggtgaacctggtgctcctggcagcaaaggagacactggtgctaagggagagcctggccctgttggtgttcaaggaccccctggccctgctggagaggaaggaaagcgaggagctcgaggtgaacccggacccactggcctgcccggaccccctggcgagcgtggtggacctggtagccgtggtttccctggcgcagatggtgttgctggtcccaagggtcccgctggtgaacgtggttctcctggccctgctggccccaaaggatctcctggtgaagctggtcgtcccggtgaagctggtctgcctggtgccaagggtctgactggaagccctggcagccctggtcctgatggcaaaactggcccccctggtcccgccggtcaagatggtcgccccggacccccaggcccacctggtgcccgtggtcaggctggtgtgatgggattccctggacctaaaggtgctgctggagagcccggcaaggctggagagcgaggtgttcccggaccccctggcgctgtcggtcctgctggcaaagatggagaggctggagctcagggaccccctggccctgctggtcccgctggcgagagaggtgaacaaggccctgctggctcccccggattccagggtctccctggtcctgctggtcctccaggtgaagcaggcaaacctggtgaacagggtgttcctggagaccttggcgcccctggcccctctggagcaagaggcgagagaggtttccctggcgagcgtggtgtgcaaggtccccctggtcctgctggtccccgaggggccaacggtgctcccggcaacgatggtgctaagggtgatgctggtgcccctggagctcccggtagccagggcgcccctggccttcagggaatgcctggtgaacgtggtgcagctggtcttccagggcctaagggtgacagaggtgatgctggtcccaaaggtgctgatggctctcctggcaaagatggcgtccgtggtctgactggccccattggtcctcctggccctgctggtgcccctggtgacaagggtgaaagtggtcccagcggccctgctggtcccactggagctcgtggtgcccccggagaccgtggtgagcctggtccccccggccctgctggctttgctggcccccctggtgctgacggccaacctggtgctaaaggcgaacctggtgatgctggtgctaaaggcgatgctggtccccctggccctgccggacccgctggaccccctggccccattggtaatgttggtgctcctggagccaaaggtgctcgcggcagcgctggtccccctggtgctactggtttccctggtgctgctggccgagtcggtcctcctggcccctctggaaatgctggaccccctggccctcctggtcctgctggcaaagaaggcggcaaaggtccccgtggtgagactggccctgctggacgtcctggtgaagttggtccccctggtccccctggccctgctggcgagaaaggatcccctggtgctgatggtcctgctggtgctcctggtactcccgggcctcaaggtattgctggacagcgtggtgtggtcggcctgcctggtcagagaggagagagaggcttccctggtcttcctggcccctctggtgaacctggcaaacaaggtccctctggagcaagtggtgaacgtggtccccctggtcccatgggcccccctggattggctggaccccctggtgaatctggacgtgagggggctcctggtgccgaaggttcccctggacgagacggttctcctggcgccaagggtgaccgtggtgagaccggccccgctggaccccctggtgctcctggtgctcctggtgcccctggccccgttggccctgctggcaagagtggtgatcgtggtgagactggtcctgctggtcccaccggtcctgtcggccctgttggcgcccgtggccccgccggaccccaaggcccccgtggtgacaagggtgagacaggcgaacagggcgacagaggcataaagggtcaccgtggcttctctggcctccagggtccccctggccctcctggctctcctggtgaacaaggtccctctggagcctctggtcctgctggtccccgaggtccccctggctctgctggtgctcctggcaaagatggactcaacggtctccctggccccattgggccccctggtcctcgcggtcgcactggtgatgctggtcctgttggtccccccggccctcctggacctcctggtccccctggtcctcccagcgctggtttcgacttcagcttcctgccccagccacctcaagagaaggctcacgatggtggccgctactaccgggctgatgatgccaatgtggttcgtgaccgtgacctcgaggtggacaccaccctcaagagcctgagccagcagatcgagaacatccggagcccagagggcagccgcaagaaccccgcccgcacctgccgtgacctcaagatgtgccactctgactggaagagtggagagtactggattgaccccaaccaaggctgcaacctggatgccatcaaagtcttctgcaacatggagactggtgagacctgcgtgtaccccactcagcccagtgtggcccagaagaactggtacatcagcaagaaccccaaggacaagaggcatgtctggttcggcgagagcatgaccgatggattccagttcgagtatggcggccagggctccgaccctgccgatgtggccatccagctgaccttcctgcgcctgatgtccaccgaggcctcccagaacatcacctaccactgcaagaacagcgtggcctacatggaccagcagactggcaacctcaagaaggccctgctcctccagggctccaacgagatcgagatccgcgccgagggcaacagccgcttcacctacagcgtcactgtcgatggctgcacgagtcacaccggagcctggggcaagacagtgattgaatacaaaaccaccaagacctcccgcctgcccatcatcgatgtggcccccttggacgttggtgccccagaccaggaattcggcttcgacgttggccctgtctgcttcctgtaaactccctccatcccaacctggctccctcccacccaaccaactttccccccaacccggaaacagacaagcaacccaaactgaaccccctcaaaagccaaaaaatgggagacaatttcacatggactttggaaaatatttttttcctttgcattcatctctcaaacttagtttttatctttgaccaaccgaacatgaccaaaaaccaaaagtgcattcaaccttaccaaaaaaaaaaaaaaaaaaagaataaataaataactttttaaaaaaggaagcttggtccacttgcttgaagacccatgcgggggtaagtccctttctgcccgttgggcttatgaaaccccaatgctgccctttctgctcctttctccacaccccccttggggcctcccctccactccttcccaaatctgtctccccagaagacacaggaaacaatgtattgtctgcccagcaatcaaaggcaatgctcaaacacccaagtggcccccaccctcagcccgctcctgcccgcccagcacccccaggccctgggggacctggggttctcagactgccaaagaagccttgccatctggcgctcccatggctcttgcaacatctccccttcgtttttgagggggtcatgccgggggagccaccagcccctcactgggttcggaggagagtcaggaagggccacgacaaagcagaaacatcggatttggggaacgcgtgtcaatcccttgtgccgcagggctgggcgggagagactgttctgttccttgtgtaactgtgttgctgaaagactacctcgttcttgtcttgatgtgtcaccggggcaactgcctgggggcggggatgggggcagggtggaagcggctccccattttataccaaaggtgctacatctatgtgatgggtggggtggggagggaatcactggtgctatagaaattgagatgcccccccaggccagcaaatgttcctttttgttcaaagtctatttttattccttgatatttttctttttttttttttttttttgtggatggggacttgtgaatttttctaaaggtgctatttaacatgggaggagagcgtgtgcggctccagcccagcccgctgctcactttccaccctctctccacctgcctctggcttctcaggcctctgctctccgacctctctcctctgaaaccctcctccacagctgcagcccatcctcccggctccctcctagtctgtcctgcgtcctctgtccccgggtttcagagacaacttcccaaagcacaaagcagtttttccccctaggggtgggaggaagcaaaagactctgtacctattttgtatgtgtataataatttgagatgtttttaattattttgattgctggaataaagcatgtggaaatgacccaaacataatcgtcggagcagacgggagtttctcctcggggtcggagcaggaggcacgcggagtgtgaggccacgcatgagcggacgctaaccccctccccagccacaaagagtctacatgtcta

SEQ ID NO: 702 - DNA, 32765 bp, Homo sapiens
  misc_feature (194)..(194): second gene starts at position 194
atggctccctacccctgtggctgccacatcctgctgctgctcttctgctgcctggcggctgcccgggccaacctgctgaacctgaactggctttggttcaataatgaggacaccagccatgcagctaccacgatccctgagccccaggggcccctgcctgtgcagcccacagcagataccaccacacacgtgaccccccggaatggttccacagagccagcgacagcccctggcagccctgagccaccctcagagctgctggaagatggccaggacacccccacttctgccgagagcccggacgcgccagaggagaacattgccggtgtcggagccgagatcctgaacgtggccaaaggcatccggagcttcgtccagctgtggaatgacactgtccccactgagagcttggccagggcggaaaccctggtcctggagactcctgtgggcccccttgccctcgctgggccttccagcaccccccaggagaatgggaccactctctggcccagccgtggcattcctagctctccgggcgcccacacaaccgaggctggcaccttgcctgcacccaccccatcgcctccctccctgggcaggccctgggcaccactcacggggccctcagtgccaccaccatcttcaggtagagcttctctctcctccttgctgggcggggcccctccctggggaagcctgcaggacccagacagccaaggactctcgcccgccgcagccgctcccagccagcagctccaacgccctgacgtccgcctgcgcacgccacttctgcaccccctggtgatgggctccctgggcaagcacgcggccccctccgccttctcctctgggctcccgggcgcactgtctcaggtcgcagtcaccactttaaccagggacagcggtgcttgggtctcccacgtggctaactctgtggggccgggtcttgctaataactctgccctgctcggggctgaccccgaggcccccgccggtcgctgcctgcccctgccaccctccctgccagtctgcggccacctgggcatctcacgcttctggctgcccaaccacctccaccacgagagcggcgagcaggtgcgggccggggcacgggcgtgggggggcctgctgcagacgcactgccaccccttcctcgcctggttcttctgcctgctgctggtccccccatgcggcagcgtcccgccgcccgccccgccaccctgctgccagttctgcgaggccctgcaggatgcgtgttggagccgcctgggcgggggccggctgcccgtcgcctgtgcctcgctcccgacccaggaggatgggtactgtgtgctcattgggccggctgcagagcgcatcagcgaggaggtggggctgctgcagctccttggggaccccccgccccagcaggtcacccagacggatgaccccgacgtcgggctggcctacgtctttgggccagatgccaacagtggccaagtggcccggtaccacttccccagcctcttcttccgtgacttctcactgctgttccacatccggccagccacagagggcccaggggtgctgttcgccatcacggactcggcgcaggccatggtcttgctgggcgtgaagctctctggggtgcaggacgggcaccaggacatctccctgctctacacagaaccaggtgcaggccagacccacacagccgccagcttccggctccccgccttcgtcggccagtggacacacttagccctcagtgtggcaggtggctttgtggccctctacgtggactgtgaggagttccagagaatgccgcttgctcggtcctcacggggcctggagctggagcctggcgccgggctcttcgtggctcaggcggggggagcggaccctgacaagttccagggggtgatcgctgagctgaaggtgcgcagggacccccaggtgagccccatgcactgcctggacgaggaaggcgatgactcagatggggcatccggagactctggcagcgggctcggggacgcccgggagcttctcagggaggagacgggcgcggccctaaaacccaggctccccgcgccaccccccgtcaccacgccacccttggctggaggcagcagcacggaagattccagaagtgaagaagtcgaggagcagaccacggtggcttcgttaggagctcagacacttcctggctcagattctgtctccacgtgggacgggagtgtccggacccctgggggccgcgtgaaagagggcggcctgaaggggcagaaaggggagccaggtgttccgggcccacctggccgggcaggccccccaggatccccatgcctacctggtcccccgggtctcccgtgcccagtgagtcccctgggtcctgcaggcccagcgttgcaaactgtccccggaccacaaggacccccagggcctccggggagggacggcacccctggaagggacggcgagccgggcgaccccggtgaagacggaaagccgggcgacaccgggccacaaggcttccccgggactccaggggacgtaggtcccaagggcgacaagggagaccctggggttggagagagagggcccccaggaccccaagggcctccagggcccccaggaccctccttcagacacgacaagctgaccttcattgacatggagggatctggcttcgggggcgatctggaggccctgcggggtcctcgaggcttccctggacctcccggaccccccggtgtcccaggcctgcccggcgagccaggccgctttggggtgaacagctccgacgtcccaggacccgccggccttcctggtgtgcctgggcgcgagggtccccccgggtttcctggcctcccgggacccccaggccctccgggaagagaggggcccccaggaaggactgggcagaaaggcagcctgggtgaagcaggcgccccaggacataaggggagcaagggagcccccggtcctgctggtgctcgtggggagagcggcctggcaggagcccccggacctgctggaccaccaggcccccctgggccccctgggcccccaggaccaggactccccgctggatttgatgacatggaaggctccggggggcccttctggtcaacagcccgaagcgctgatgggccacagggacctcccggcctgccgggacttaagggggatcctggcgtgcctgggctgccgggggcgaagggagaagttggagcagatggagtccccgggttccccggcctccctggcagagagggcattgctgggccccaggggccaaagggagacagaggcagccggggagaaaagggagatccagggaaggacggagtcgggcagccgggcctccctggcccccccggacccccgggacctgtggtctacgtgtcggagcaggacggatccgtcctgagcgtgccgggacctgagggccggccgggtttcgcaggctttcccggacctgcaggacccaagggcaacctgggctctaagggcgaacgaggctccccgggacccaagggtgagaagggtgaaccgggcagcatcttcagccccgacggcggtgccctgggccctgcccagaaaggagccaagggagagccgggcttccgaggacccccgggtccatacggacggccggggtacaagggagagattggctttcctggacggccgggtcgccccgggatgaacggattgaaaggagagaaaggggagccgggagatgccagccttggatttggcatgaggggaatgcccggccccccaggacctccagggcccccaggccctccagggactcctgtttacgacagcaatgtgtttgctgagtccagccgccccgggcctccaggattgccagggaatcagggccctccaggacccaagggcgccaaaggagaagtgggcccccccggaccaccagggcagtttccgtttgactttcttcagttggaggctgaaatgaagggggagaagggagaccgaggtgatgcaggacagaaaggcgaaaggggggagcccgggggcggcggtttcttcggctccagcctgcccggcccccccggccccccaggcccacgtggctaccctgggattccaggtcccaagggagagagcatccggggccagcccggcccacctggacctcagggaccccccggcatcggctacgaggggcgccagggcccctttgcctggccgggagggccttggcagcccctcagcaagaagccctgcctgatgagacagaggtggtggaagaaactgtggcagaggtgactgaggtatctgtgggagctaatcctgtccaggtggaagtaggagaatttgatgatggtgcagaggaaaccgaagaggaggtggtggcggaaaatccctgccagaaccaccactgcaaacacggcaaggtgtgcgagctggatgagaacaacacccccatgtgcgtgtgccaggaccccaccagctgcccagcccccattggcgagtttgagaaggtgtgcagcaatgacaacaagaccttcgactcttcctgccacttctttgccacaaagtgcaccctggagggcaccaagaagggccacaagctccacctggactacatcgggccttgcaaatacatccccccttgcctggactctgagctgaccgaattccccctgcgcatgcgggactggctcaagaacgtcctggtcaccctgtatgagagggatgaggacaacaaccttctgactgagaagcagaagctgcgggtgaagaagatccatgagaatgagaagcgcctggaggcaggagaccaccccgtggagctgctggcccgggacttcgagaagaactataacatgtacatcttccctgtacactggcagttcggccagctggaccagcaccccattgacgggtacctctcccacaccgagctggctccactgcgtgctcccctcatccccatggagcattgcaccacccgctttttcgagacctgtgacctggacaatgacaagtacatcgccctggatgagtgggccggctgcttcggcatcaagcagaaggatatcgacaaggatcttgtgatctaaatccactccttccacagtaccggattctctctttaaccctccccttcgtgtttcccccaatgtttaaaatgtttggatggtttgttgttctgcctggagacaaggtgctaacatagatttaagtgaatacattaacggtgctaaaaatgaaaattctaacccaagacatgacattcttagctgtaacttaactattaaggccttttccacacgcattaatagtcccatttttctcttgccatttgtagctttgcccattgtcttattggcacatgggtggacacggatctgctgggctctgccttaaacacacattgcagcttcaacttttctctttagtgttctgtttgaaactaatacttaccgagtcagactttgtgttcatttcatttcagggtcttggctgcctgtgggcttccccaggtggcctggaggtgggcaaagggaagtaacagacacacgatgttgtcaaggatggttttgggactagaggctcagtggtgggagagatccctgcagaacccaccaaccagaacgtggtttgcctgaggctgtaactgagagaaagattctggggctgtgttatgaaaatatagacattctcacataagcccagttcatcaccatttcctcctttacctttcagtgcagtttcttttcacattaggctgttggttcaaacttttgggagcacggactgtcagttctctgggaagtggtcagcgcatcctgcagggcttctcctcctctgtcttttggagaaccagggctcttctcaggggctctagggactgccaggctgtttcagccaggaaggccaaaatcaagagtgagatgtagaaagttgtaaaatagaaaaagtggagttggtgaatcggttgttctttcctcacatttggatgattgtcataaggtttttagcatgttcctccttttcttcaccctccccttttttcttctattaatcaagagaaacttcaaagttaatgggatggtcggatctcacaggctgagaactcgttcacctccaagcatttcatgaaaaagctgcttcttattaatcatacaaactctcaccatgatgtgaagagtttcacaaatccttcaaaataaaaagtaatgacttagaaactgccttcctgggtgatttgcatgtgtcttagtcttagtcaccttattatcctgacacaaaaacacatgagcatacatgtctacacatgactacacaaatgcaaacctttgcaaacacattatgcttttgcacacacacacctgtacacacacaccggcatgtttatacacagggagtgtatggttcctgtaagcactaagttagctgttttcatttaatgacctgtggtttaacccttttgatcactaccaccattatcagcaccagactgagcagctatatccttttattaatcatggtcattcattcattcattcattcacaaaatatttatgatgtatttactctgcaccaggtcccatgccaagcactggggacacagttatggcaaagtagacaaagcatttgttcatttggagcttagagtccaggaggaatacattagataatgacacaatcaaatataaattgcaagatgtcacaggtgtgatgaagggagagtaggagagaccatgagtatgtgtaacaggaggacacagcattattctagtgctgtactgttccgtacggcagccactacccacatgtaactttttaagatttaaatttaaattagttaacattcaaaacgcagctccccaatcacactagcaacatttcaagtgcttgagagccatgcatgattagtggttaccctattgaataggtcagaagtagaatcttttcatcatcacagaaagttctattggacagtgctcttctagatcatcataagactacagagcacttttcaaagctcatgcatgttcatcatgttagtgtcgtattttgagctggggttttgagactccccttagagatagagaaacagacccaagaaatgtgctcaattgcaatgggccacatacctagatctccagatgtcatttcccctctcttattttaagttatgttaagattactaaaacaataaaagctcctaaaaaatcaagttgcctgtctctaaacccctccacattcccgcggtccttcagactgcccggagagcgcgctctgcctgccgcctgcctgcctgccactgagggttcccagcaccatgagggcctggatcttctttctcctttgcctggccgggagggccttggcagcccctcagcaagaagccctgcctgatgagacagaggtggtggaagaaactgtggcagaggtgactgaggtatctgtgggagctaatcctgtccaggtggaagtaggagaatttgatgatggtgcagaggaaaccgaagaggaggtggtggcggaaaatccctgccagaaccaccactgcaaacacggcaaggtgtgcgagctggatgagaacaacacccccatgtgcgtgtgccaggaccccaccagctgcccagcccccattggcgagtttgagaaggtgtgcagcaatgacaacaagaccttcgactcttcctgccacttctttgccacaaagtgcaccctggagggcaccaagaagggccacaagctccacctggactacatcgggccttgcaaatacatccccccttgcctggactctgagctgaccgaattccccctgcgcatgcgggactggctcaagaacgtcctggtcaccctgtatgagagggatgaggacaacaaccttctgactgagaagcagaagctgcgggtgaagaagatccatgagaatgagaagcgcctggaggcaggagaccaccccgtggagctgctggcccgggacttcgagaagaactataacatgtacatcttccctgtacactggcagttcggccagctggaccagcaccccattgacgggtacctctcccacaccgagctggctccactgcgtgctcccctcatccccatggagcattgcaccacccgctttttcgagacctgtgacctggacaatgacaagtacatcgccctggatgagtgggccggctgcttcggcatcaagcagaaggatatcgacaaggatcttgtgatctaaatccactccttccacagtaccggattctctctttaaccctccccttcgtgtttcccccaatgtttaaaatgtttggatggtttgttgttctgcctggagacaaggtgctaacatagatttaagtgaatacattaacggtgctaaaaatgaaaattctaacccaagacatgacattcttagctgtaacttaactattaaggccttttccacacgcattaatagtcccatttttctcttgccatttgtagctttgcccattgtcttattggcacatgggtggacacggatctgctgggctctgccttaaacacacattgcagcttcaacttttctctttagtgttctgtttgaaactaatacttaccgagtcagactttgtgttcatttcatttcagggtcttggctgcctgtgggcttccccaggtggcctggaggtgggcaaagggaagtaacagacacacgatgttgtcaaggatggttttgggactagaggctcagtggtgggagagatccctgcagaacccaccaaccagaacgtggtttgcctgaggctgtaactgagagaaagattctggggctgtgttatgaaaatatagacattctcacataagcccagttcatcaccatttcctcctttacctttcagtgcagtttcttttcacattaggctgttggttcaaacttttgggagcacggactgtcagttctctgggaagtggtcagcgcatcctgcagggcttctcctcctctgtcttttggagaaccagggctcttctcaggggctctagggactgccaggctgtttcagccaggaaggccaaaatcaagagtgagatgtagaaagttgtaaaatagaaaaagtggagttggtgaatcggttgttctttcctcacatttggatgattgtcataaggtttttagcatgttcctccttttcttcaccctccccttttttcttctattaatcaagagaaacttcaaagttaatgggatggtcggatctcacaggctgagaactcgttcacctccaagcatttcatgaaaaagctgcttcttattaatcatacaaactctcaccatgatgtgaagagtttcacaaatccttcaaaataaaaagtaatgacttagaaactgccttcctgggtgatttgcatgtgtcttagtcttagtcaccttattatcctgacacaaaaacacatgagcatacatgtctacacatgactacacaaatgcaaacctttgcaaacacattatgcttttgcacacacacacctgtacacacacaccggcatgtttatacacagggagtgtatggttcctgtaagcactaagttagctgttttcatttaatgacctgtggtttaacccttttgatcactaccaccattatcagcaccagactgagcagctatatccttttattaatcatggtcattcattcattcattcattcacaaaatatttatgatgtatttactctgcaccaggtcccatgccaagcactggggacacagttatggcaaagtagacaaagcatttgttcatttggagcttagagtccaggaggaatacattagataatgacacaatcaaatataaattgcaagatgtcacaggtgtgatgaagggagagtaggagagaccatgagtatgtgtaacaggaggacacagcattattctagtgctgtactgttccgtacggcagccactacccacatgtaactttttaagatttaaatttaaattagttaacattcaaaacgcagctccccaatcacactagcaacatttcaagtgcttgagagccatgcatgattagtggttaccctattgaataggtcagaagtagaatcttttcatcatcacagaaagttctattggacagtgctcttctagatcatcataagactacagagcacttttcaaagctcatgcatgttcatcatgttagtgtcgtattttgagctggggttttgagactccccttagagatagagaaacagacccaagaaatgtgctcaattgcaatgggccacatacctagatctccagatgtcatttcccctctcttattttaagttatgttaagattactaaaacaataaaagctcctaaaaaatcaagttgcctgtctctaaacccctccacattcccgcggtccttcagactgcccggagagcgcgctctgcctgccgcctgcctgcctgccactgagggttcccagcaccatgagggcctggatcttctttctcctttgcctggccgggagggccttggcagcccctcagcaagaagccctgcctgatgagacagaggtggtggaagaaactgtggcagaggtgactgaggtatctgtgggagctaatcctgtccaggtggaagtaggagaatttgatgatggtgcagaggaaaccgaagaggaggtggtggcggaaaatccctgccagaaccaccactgcaaacacggcaaggtgtgcgagctggatgagaacaacacccccatgtgcgtgtgccaggaccccaccagctgcccagcccccattggcgagtttgagaaggtgtgcagcaatgacaacaagaccttcgactcttcctgccacttctttgccacaaagtgcaccctggagggcaccaagaagggccacaagctccacctggactacatcgggccttgcaaatacatccccccttgcctggactctgagctgaccgaattccccctgcgcatgcgggactggctcaagaacgtcctggtcaccctgtatgagagggatgaggacaacaaccttctgactgagaagcagaagctgcgggtgaagaagatccatgagaatgagaagcgcctggaggcaggagaccaccccgtggagctgctggcccgggacttcgagaagaactataacatgtacatcttccctgtacactggcagttcggccagctggaccagcaccccattgacgggtacctctcccacaccgagctggctccactgcgtgctcccctcatccccatggagcattgcaccacccgctttttcgagacctgtgacctggacaatgacaagtacatcgccctggatgagtgggccggctgcttcggcatcaagcagaaggatatcgacaaggatcttgtgatctaaatccactccttccacagtaccggattctctctttaaccctccccttcgtgtttcccccaatgtttaaaatgtttggatggtttgttgttctgcctggagacaaggtgctaacatagatttaagtgaatacattaacggtgctaaaaatgaaaattctaacccaagacatgacattcttagctgtaacttaactattaaggccttttccacacgcattaatagtcccatttttctcttgccatttgtagctttgcccattgtcttattggcacatgggtggacacggatctgctgggctctgccttaaacacacattgcagcttcaacttttctctttagtgttctgtttgaaactaatacttaccgagtcagactttgtgttcatttcatttcagggtcttggctgcctgtgggcttccccaggtggcctggaggtgggcaaagggaagtaacagacacacgatgttgtcaaggatggttttgggactagaggctcagtggtgggagagatccctgcagaacccaccaaccagaacgtggtttgcctgaggctgtaactgagagaaagattctggggctgtgttatgaaaatatagacattctcacataagcccagttcatcaccatttcctcctttacctttcagtgcagtttcttttcacattaggctgttggttcaaacttttgggagcacggactgtcagttctctgggaagtggtcagcgcatcctgcagggcttctcctcctctgtcttttggagaaccagggctcttctcaggggctctagggactgccaggctgtttcagccaggaaggccaaaatcaagagtgagatgtagaaagttgtaaaatagaaaaagtggagttggtgaatcggttgttctttcctcacatttggatgattgtcataaggtttttagcatgttcctccttttcttcaccctccccttttttcttctattaatcaagagaaacttcaaagttaatgggatggtcggatctcacaggctgagaactcgttcacctccaagcatttcatgaaaaagctgcttcttattaatcatacaaactctcaccatgatgtgaagagtttcacaaatccttcaaaataaaaagtaatgacttagaaactgccttcctgggtgatttgcatgtgtcttagtcttagtcaccttattatcctgacacaaaaacacatgagcatacatgtctacacatgactacacaaatgcaaacctttgcaaacacattatgcttttgcacacacacacctgtacacacacaccggcatgtttatacacagggagtgtatggttcctgtaagcactaagttagctgttttcatttaatgacctgtggtttaacccttttgatcactaccaccattatcagcaccagactgagcagctatatccttttattaatcatggtcattcattcattcattcattcacaaaatatttatgatgtatttactctgcaccaggtcccatgccaagcactggggacacagttatggcaaagtagacaaagcatttgttcatttggagcttagagtccaggaggaatacattagataatgacacaatcaaatataaattgcaagatgtcacaggtgtgatgaagggagagtaggagagaccatgagtatgtgtaacaggaggacacagcattattctagtgctgtactgttccgtacggcagccactacccacatgtaactttttaagatttaaatttaaattagttaacattcaaaacgcagctccccaatcacactagcaacatttcaagtgcttgagagccatgcatgattagtggttaccctattgaataggtcagaagtagaatcttttcatcatcacagaaagttctattggacagtgctcttctagatcatcataagactacagagcacttttcaaagctcatgcatgttcatcatgttagtgtcgtattttgagctggggttttgagactccccttagagatagagaaacagacccaagaaatgtgctcaattgcaatgggccacatacctagatctccagatgtcatttcccctctcttattttaagttatgttaagattactaaaacaataaaagctcctaaaaaatcaagttgcctgtctctaaacccctccacattcccgcggtccttcagactgcccggagagcgcgctctgcctgccgcctgcctgcctgccactgagggttcccagcaccatgagggcctggatcttctttctcctttgcctggccgggagggccttggcagcccctcagcaagaagccctgcctgatgagacagaggtggtggaagaaactgtggcagaggtgactgaggtatctgtgggagctaatcctgtccaggtggaagtaggagaatttgatgatggtgcagaggaaaccgaagaggaggtggtggcggaaaatccctgccagaaccaccactgcaaacacggcaaggtgtgcgagctggatgagaacaacacccccatgtgcgtgtgccaggaccccaccagctgcccagcccccattggcgagtttgagaaggtgtgcagcaatgacaacaagaccttcgactcttcctgccacttctttgccacaaagtgcaccctggagggcaccaagaagggccacaagctccacctggactacatcgggccttgcaaatacatccccccttgcctggactctgagctgaccgaattccccctgcgcatgcgggactggctcaagaacgtcctggtcaccctgtatgagagggatgaggacaacaaccttctgactgagaagcagaagctgcgggtgaagaagatccatgagaatgagaagcgcctggaggcaggagaccaccccgtggagctgctggcccgggacttcgagaagaactataacatgtacatcttccctgtacactggcagttcggccagctggaccagcaccccattgacgggtacctctcccacaccgagctggctccactgcgtgctcccctcatccccatggagcattgcaccacccgctttttcgagacctgtgacctggacaatgacaagtacatcgccctggatgagtgggccggctgcttcggcatcaagcagaaggatatcgacaaggatcttgtgatctaaatccactccttccacagtaccggattctctctttaaccctccccttcgtgtttcccccaatgtttaaaatgtttggatggtttgttgttctgcctggagacaaggtgctaacatagatttaagtgaatacattaacggtgctaaaaatgaaaattctaacccaagacatgacattcttagctgtaacttaactattaaggccttttccacacgcattaatagtcccatttttctcttgccatttgtagctttgcccattgtcttattggcacatgggtggacacggatctgctgggctctgccttaaacacacattgcagcttcaacttttctctttagtgttctgtttgaaactaatacttaccgagtcagactttgtgttcatttcatttcagggtcttggctgcctgtgggcttccccaggtggcctggaggtgggcaaagggaagtaacagacacacgatgttgtcaaggatggttttgggactagaggctcagtggtgggagagatccctgcagaacccaccaaccagaacgtggtttgcctgaggctgtaactgagagaaagattctggggctgtgttatgaaaatatagacattctcacataagcccagttcatcaccatttcctcctttacctttcagtgcagtttcttttcacattaggctgttggttcaaacttttgggagcacggactgtcagttctctgggaagtggtcagcgcatcctgcagggcttctcctcctctgtcttttggagaaccagggctcttctcaggggctctagggactgccaggctgtttcagccaggaaggccaaaatcaagagtgagatgtagaaagttgtaaaatagaaaaagtggagttggtgaatcggttgttctttcctcacatttggatgattgtcataaggtttttagcatgttcctccttttcttcaccctccccttttttcttctattaatcaagagaaacttcaaagttaatgggatggtcggatctcacaggctgagaactcgttcacctccaagcatttcatgaaaaagctgcttcttattaatcatacaaactctcaccatgatgtgaagagtttcacaaatccttcaaaataaaaagtaatgacttagaaactgccttcctgggtgatttgcatgtgtcttagtcttagtcaccttattatcctgacacaaaaacacatgagcatacatgtctacacatgactacacaaatgcaaacctttgcaaacacattatgcttttgcacacacacacctgtacacacacaccggcatgtttatacacagggagtgtatggttcctgtaagcactaagttagctgttttcatttaatgacctgtggtttaacccttttgatcactaccaccattatcagcaccagactgagcagctatatccttttattaatcatggtcattcattcattcattcattcacaaaatatttatgatgtatttactctgcaccaggtcccatgccaagcactggggacacagttatggcaaagtagacaaagcatttgttcatttggagcttagagtccaggaggaatacattagataatgacacaatcaaatataaattgcaagatgtcacaggtgtgatgaagggagagtaggagagaccatgagtatgtgtaacaggaggacacagcattattctagtgctgtactgttccgtacggcagccactacccacatgtaactttttaagatttaaatttaaattagttaacattcaaaacgcagctccccaatcacactagcaacatttcaagtgcttgagagccatgcatgattagtggttaccctattgaataggtcagaagtagaatcttttcatcatcacagaaagttctattggacagtgctcttctagatcatcataagactacagagcacttttcaaagctcatgcatgttcatcatgttagtgtcgtattttgagctggggttttgagactccccttagagatagagaaacagacccaagaaatgtgctcaattgcaatgggccacatacctagatctccagatgtcatttcccctctcttattttaagttatgttaagattactaaaacaataaaagctcctaaaaaatcaagttgcctgtctctaaacccctccacattcccgcggtccttcagactgcccggagagcgcgctctgcctgccgcctgcctgcctgccactgagggttcccagcaccatgagggcctggatcttctttctcctttgcctggccgggagggccttggcagcccctcagcaagaagccctgcctgatgagacagaggtggtggaagaaactgtggcagaggtgactgaggtatctgtgggagctaatcctgtccaggtggaagtaggagaatttgatgatggtgcagaggaaaccgaagaggaggtggtggcggaaaatccctgccagaaccaccactgcaaacacggcaaggtgtgcgagctggatgagaacaacacccccatgtgcgtgtgccaggaccccaccagctgcccagcccccattggcgagtttgagaaggtgtgcagcaatgacaacaagaccttcgactcttcctgccacttctttgccacaaagtgcaccctggagggcaccaagaagggccacaagctccacctggactacatcgggccttgcaaatacatccccccttgcctggactctgagctgaccgaattccccctgcgcatgcgggactggctcaagaacgtcctggtcaccctgtatgagagggatgaggacaacaaccttctgactgagaagcagaagctgcgggtgaagaagatccatgagaatgagaagcgcctggaggcaggagaccaccccgtggagctgctggcccgggacttcgagaagaactataacatgtacatcttccctgtacactggcagttcggccagctggaccagcaccccattgacgggtacctctcccacaccgagctggctccactgcgtgctcccctcatccccatggagcattgcaccacccgctttttcgagacctgtgacctggacaatgacaagtacatcgccctggatgagtgggccggctgcttcggcatcaagcagaaggatatcgacaaggatcttgtgatctaaatccactccttccacagtaccggattctctctttaaccctccccttcgtgtttcccccaatgtttaaaatgtttggatggtttgttgttctgcctggagacaaggtgctaacatagatttaagtgaatacattaacggtgctaaaaatgaaaattctaacccaagacatgacattcttagctgtaacttaactattaaggccttttccacacgcattaatagtcccatttttctcttgccatttgtagctttgcccattgtcttattggcacatgggtggacacggatctgctgggctctgccttaaacacacattgcagcttcaacttttctctttagtgttctgtttgaaactaatacttaccgagtcagactttgtgttcatttcatttcagggtcttggctgcctgtgggcttccccaggtggcctggaggtgggcaaagggaagtaacagacacacgatgttgtcaaggatggttttgggactagaggctcagtggtgggagagatccctgcagaacccaccaaccagaacgtggtttgcctgaggctgtaactgagagaaagattctggggctgtgttatgaaaatatagacattctcacataagcccagttcatcaccatttcctcctttacctttcagtgcagtttcttttcacattaggctgttggttcaaacttttgggagcacggactgtcagttctctgggaagtggtcagcgcatcctgcagggcttctcctcctctgtcttttggagaaccagggctcttctcaggggctctagggactgccaggctgtttcagccaggaaggccaaaatcaagagtgagatgtagaaagttgtaaaatagaaaaagtggagttggtgaatcggttgttctttcctcacatttggatgattgtcataaggtttttagcatgttcctccttttcttcaccctccccttttttcttctattaatcaagagaaacttcaaagttaatgggatggtcggatctcacaggctgagaactcgttcacctccaagcatttcatgaaaaagctgcttcttattaatcatacaaactctcaccatgatgtgaagagtttcacaaatccttcaaaataaaaagtaatgacttagaaactgccttcctgggtgatttgcatgtgtcttagtcttagtcaccttattatcctgacacaaaaacacatgagcatacatgtctacacatgactacacaaatgcaaacctttgcaaacacattatgcttttgcacacacacacctgtacacacacaccggcatgtttatacacagggagtgtatggttcctgtaagcactaagttagctgttttcatttaatgacctgtggtttaacccttttgatcactaccaccattatcagcaccagactgagcagctatatccttttattaatcatggtcattcattcattcattcattcacaaaatatttatgatgtatttactctgcaccaggtcccatgccaagcactggggacacagttatggcaaagtagacaaagcatttgttcatttggagcttagagtccaggaggaatacattagataatgacacaatcaaatataaattgcaagatgtcacaggtgtgatgaagggagagtaggagagaccatgagtatgtgtaacaggaggacacagcattattctagtgctgtactgttccgtacggcagccactacccacatgtaactttttaagatttaaatttaaattagttaacattcaaaacgcagctccccaatcacactagcaacatttcaagtgcttgagagccatgcatgattagtggttaccctattgaataggtcagaagtagaatcttttcatcatcacagaaagttctattggacagtgctcttctagatcatcataagactacagagcacttttcaaagctcatgcatgttcatcatgttagtgtcgtattttgagctggggttttgagactccccttagagatagagaaacagacccaagaaatgtgctcaattgcaatgggccacatacctagatctccagatgtcatttcccctctcttattttaagttatgttaagattactaaaacaataaaagctcctaaaaaatcaagttgcctgtctctaaacccctccacattcccgcggtccttcagactgcccggagagcgcgctctgcctgccgcctgcctgcctgccactgagggttcccagcaccatgagggcctggatcttctttctcctttgcctggccgggagggccttggcagcccctcagcaagaagccctgcctgatgagacagaggtggtggaagaaactgtggcagaggtgactgaggtatctgtgggagctaatcctgtccaggtggaagtaggagaatttgatgatggtgcagaggaaaccgaagaggaggtggtggcggaaaatccctgccagaaccaccactgcaaacacggcaaggtgtgcgagctggatgagaacaacacccccatgtgcgtgtgccaggaccccaccagctgcccagcccccattggcgagtttgagaaggtgtgcagcaatgacaacaagaccttcgactcttcctgccacttctttgccacaaagtgcaccctggagggcaccaagaagggccacaagctccacctggactacatcgggccttgcaaatacatccccccttgcctggactctgagctgaccgaattccccctgcgcatgcgggactggctcaagaacgtcctggtcaccctgtatgagagggatgaggacaacaaccttctgactgagaagcagaagctgcgggtgaagaagatccatgagaatgagaagcgcctggaggcaggagaccaccccgtggagctgctggcccgggacttcgagaagaactataacatgtacatcttccctgtacactggcagttcggccagctggaccagcaccccattgacgggtacctctcccacaccgagctggctccactgcgtgctcccctcatccccatggagcattgcaccacccgctttttcgagacctgtgacctggacaatgacaagtacatcgccctggatgagtgggccggctgcttcggcatcaagcagaaggatatcgacaaggatcttgtgatctaaatccactccttccacagtaccggattctctctttaaccctccccttcgtgtttcccccaatgtttaaaatgtttggatggtttgttgttctgcctggagacaaggtgctaacatagatttaagtgaatacattaacggtgctaaaaatgaaaattctaacccaagacatgacattcttagctgtaacttaactattaaggccttttccacacgcattaatagtcccatttttctcttgccatttgtagctttgcccattgtcttattggcacatgggtggacacggatctgctgggctctgccttaaacacacattgcagcttcaacttttctctttagtgttctgtttgaaactaatacttaccgagtcagactttgtgttcatttcatttcagggtcttggctgcctgtgggcttccccaggtggcctggaggtgggcaaagggaagtaacagacacacgatgttgtcaaggatggttttgggactagaggctcagtggtgggagagatccctgcagaacccaccaaccagaacgtggtttgcctgaggctgtaactgagagaaagattctggggctgtgttatgaaaatatagacattctcacataagcccagttcatcaccatttcctcctttacctttcagtgcagtttcttttcacattaggctgttggttcaaacttttgggagcacggactgtcagttctctgggaagtggtcagcgcatcctgcagggcttctcctcctctgtcttttggagaaccagggctcttctcaggggctctagggactgccaggctgtttcagccaggaaggccaaaatcaagagtgagatgtagaaagttgtaaaatagaaaaagtggagttggtgaatcggttgttctttcctcacatttggatgattgtcataaggtttttagcatgttcctccttttcttcaccctccccttttttcttctattaatcaagagaaacttcaaagttaatgggatggtcggatctcacaggctgagaactcgttcacctccaagcatttcatgaaaaagctgcttcttattaatcatacaaactctcaccatgatgtgaagagtttcacaaatccttcaaaataaaaagtaatgacttagaaactgccttcctgggtgatttgcatgtgtcttagtcttagtcaccttattatcctgacacaaaaacacatgagcatacatgtctacacatgactacacaaatgcaaacctttgcaaacacattatgcttttgcacacacacacctgtacacacacaccggcatgtttatacacagggagtgtatggttcctgtaagcactaagttagctgttttcatttaatgacctgtggtttaacccttttgatcactaccaccattatcagcaccagactgagcagctatatccttttattaatcatggtcattcattcattcattcattcacaaaatatttatgatgtatttactctgcaccaggtcccatgccaagcactggggacacagttatggcaaagtagacaaagcatttgttcatttggagcttagagtccaggaggaatacattagataatgacacaatcaaatataaattgcaagatgtcacaggtgtgatgaagggagagtaggagagaccatgagtatgtgtaacaggaggacacagcattattctagtgctgtactgttccgtacggcagccactacccacatgtaactttttaagatttaaatttaaattagttaacattcaaaacgcagctccccaatcacactagcaacatttcaagtgcttgagagccatgcatgattagtggttaccctattgaataggtcagaagtagaatcttttcatcatcacagaaagttctattggacagtgctcttctagatcatcataagactacagagcacttttcaaagctcatgcatgttcatcatgttagtgtcgtattttgagctggggttttgagactccccttagagatagagaaacagacccaagaaatgtgctcaattgcaatgggccacatacctagatctccagatgtcatttcccctctcttattttaagttatgttaagattactaaaacaataaaagctcctaaaaaatcaagttgcctgtctctaaacccctccacattcccgcggtccttcagactgcccggagagcgcgctctgcctgccgcctgcctgcctgccactgagggttcccagcaccatgagggcctggatcttctttctcctttgcctggccgggagggccttggcagcccctcagcaagaagccctgcctgatgagacagaggtggtggaagaaactgtggcagaggtgactgaggtatctgtgggagctaatcctgtccaggtggaagtaggagaatttgatgatggtgcagaggaaaccgaagaggaggtggtggcggaaaatccctgccagaaccaccactgcaaacacggcaaggtgtgcgagctggatgagaacaacacccccatgtgcgtgtgccaggaccccaccagctgcccagcccccattggcgagtttgagaaggtgtgcagcaatgacaacaagaccttcgactcttcctgccacttctttgccacaaagtgcaccctggagggcaccaagaagggccacaagctccacctggactacatcgggccttgcaaatacatccccccttgcctggactctgagctgaccgaattccccctgcgcatgcgggactggctcaagaacgtcctggtcaccctgtatgagagggatgaggacaacaaccttctgactgagaagcagaagctgcgggtgaagaagatccatgagaatgagaagcgcctggaggcaggagaccaccccgtggagctgctggcccgggacttcgagaagaactataacatgtacatcttccctgtacactggcagttcggccagctggaccagcaccccattgacgggtacctctcccacaccgagctggctccactgcgtgctcccctcatccccatggagcattgcaccacccgctttttcgagacctgtgacctggacaatgacaagtacatcgccctggatgagtgggccggctgcttcggcatcaagcagaaggatatcgacaaggatcttgtgatctaaatccactccttccacagtaccggattctctctttaaccctccccttcgtgtttcccccaatgtttaaaatgtttggatggtttgttgttctgcctggagacaaggtgctaacatagatttaagtgaatacattaacggtgctaaaaatgaaaattctaacccaagacatgacattcttagctgtaacttaactattaaggccttttccacacgcattaatagtcccatttttctcttgccatttgtagctttgcccattgtcttattggcacatgggtggacacggatctgctgggctctgccttaaacacacattgcagcttcaacttttctctttagtgttctgtttgaaactaatacttaccgagtcagactttgtgttcatttcatttcagggtcttggctgcctgtgggcttccccaggtggcctggaggtgggcaaagggaagtaacagacacacgatgttgtcaaggatggttttgggactagaggctcagtggtgggagagatccctgcagaacccaccaaccagaacgtggtttgcctgaggctgtaactgagagaaagattctggggctgtgttatgaaaatatagacattctcacataagcccagttcatcaccatttcctcctttacctttcagtgcagtttcttttcacattaggctgttggttcaaacttttgggagcacggactgtcagttctctgggaagtggtcagcgcatcctgcagggcttctcctcctctgtcttttggagaaccagggctcttctcaggggctctagggactgccaggctgtttcagccaggaaggccaaaatcaagagtgagatgtagaaagttgtaaaatagaaaaagtggagttggtgaatcggttgttctttcctcacatttggatgattgtcataaggtttttagcatgttcctccttttcttcaccctccccttttttcttctattaatcaagagaaacttcaaagttaatgggatggtcggatctcacaggctgagaactcgttcacctccaagcatttcatgaaaaagctgcttcttattaatcatacaaactctcaccatgatgtgaagagtttcacaaatccttcaaaataaaaagtaatgacttagaaactgccttcctgggtgatttgcatgtgtcttagtcttagtcaccttattatcctgacacaaaaacacatgagcatacatgtctacacatgactacacaaatgcaaacctttgcaaacacattatgcttttgcacacacacacctgtacacacacaccggcatgtttatacacagggagtgtatggttcctgtaagcactaagttagctgttttcatttaatgacctgtggtttaacccttttgatcactaccaccattatcagcaccagactgagcagctatatccttttattaatcatggtcattcattcattcattcattcacaaaatatttatgatgtatttactctgcaccaggtcccatgccaagcactggggacacagttatggcaaagtagacaaagcatttgttcatttggagcttagagtccaggaggaatacattagataatgacacaatcaaatataaattgcaagatgtcacaggtgtgatgaagggagagtaggagagaccatgagtatgtgtaacaggaggacacagcattattctagtgctgtactgttccgtacggcagccactacccacatgtaactttttaagatttaaatttaaattagttaacattcaaaacgcagctccccaatcacactagcaacatttcaagtgcttgagagccatgcatgattagtggttaccctattgaataggtcagaagtagaatcttttcatcatcacagaaagttctattggacagtgctcttctagatcatcataagactacagagcacttttcaaagctcatgcatgttcatcatgttagtgtcgtattttgagctggggttttgagactccccttagagatagagaaacagacccaagaaatgtgctcaattgcaatgggccacatacctagatctccagatgtcatttcccctctcttattttaagttatgttaagattactaaaacaataaaagctcctaaaaaatcaagttgcctgtctctaaacccctccacattcccgcggtccttcagactgcccggagagcgcgctctgcctgccgcctgcctgcctgccactgagggttcccagcaccatgagggcctggatcttctttctcctttgcctggccgggagggccttggcagcccctcagcaagaagccctgcctgatgagacagaggtggtggaagaaactgtggcagaggtgactgaggtatctgtgggagctaatcctgtccaggtggaagtaggagaatttgatgatggtgcagaggaaaccgaagaggaggtggtggcggaaaatccctgccagaaccaccactgcaaacacggcaaggtgtgcgagctggatgagaacaacacccccatgtgcgtgtgccaggaccccaccagctgcccagcccccattggcgagtttgagaaggtgtgcagcaatgacaacaagaccttcgactcttcctgccacttctttgccacaaagtgcaccctggagggcaccaagaagggccacaagctccacctggactacatcgggccttgcaaatacatccccccttgcctggactctgagctgaccgaattccccctgcgcatgcgggactggctcaagaacgtcctggtcaccctgtatgagagggatgaggacaacaaccttctgactgagaagcagaagctgcgggtgaagaagatccatgagaatgagaagcgcctggaggcaggagaccaccccgtggagctgctggcccgggacttcgagaagaactataacatgtacatcttccctgtacactggcagttcggccagctggaccagcaccccattgacgggtacctctcccacaccgagctggctccactgcgtgctcccctcatccccatggagcattgcaccacccgctttttcgagacctgtgacctggacaatgacaagtacatcgccctggatgagtgggccggctgcttcggcatcaagcagaaggatatcgacaaggatcttgtgatctaaatccactccttccacagtaccggattctctctttaaccctccccttcgtgtttcccccaatgtttaaaatgtttggatggtttgttgttctgcctggagacaaggtgctaacatagatttaagtgaatacattaacggtgctaaaaatgaaaattctaacccaagacatgacattcttagctgtaacttaactattaaggccttttccacacgcattaatagtcccatttttctcttgccatttgtagctttgcccattgtcttattggcacatgggtggacacggatctgctgggctctgccttaaacacacattgcagcttcaacttttctctttagtgttctgtttgaaactaatacttaccgagtcagactttgtgttcatttcatttcagggtcttggctgcctgtgggcttccccaggtggcctggaggtgggcaaagggaagtaacagacacacgatgttgtcaaggatggttttgggactagaggctcagtggtgggagagatccctgcagaacccaccaaccagaacgtggtttgcctgaggctgtaactgagagaaagattctggggctgtgttatgaaaatatagacattctcacataagcccagttcatcaccatttcctcctttacctttcagtgcagtttcttttcacattaggctgttggttcaaacttttgggagcacggactgtcagttctctgggaagtggtcagcgcatcctgcagggcttctcctcctctgtcttttggagaaccagggctcttctcaggggctctagggactgccaggctgtttcagccaggaaggccaaaatcaagagtgagatgtagaaagttgtaaaatagaaaaagtggagttggtgaatcggttgttctttcctcacatttggatgattgtcataaggtttttagcatgttcctccttttcttcaccctccccttttttcttctattaatcaagagaaacttcaaagttaatgggatggtcggatctcacaggctgagaactcgttcacctccaagcatttcatgaaaaagctgcttcttattaatcatacaaactctcaccatgatgtgaagagtttcacaaatccttcaaaataaaaagtaatgacttagaaactgccttcctgggtgatttgcatgtgtcttagtcttagtcaccttattatcctgacacaaaaacacatgagcatacatgtctacacatgactacacaaatgcaaacctttgcaaacacattatgcttttgcacacacacacctgtacacacacaccggcatgtttatacacagggagtgtatggttcctgtaagcactaagttagctgttttcatttaatgacctgtggtttaacccttttgatcactaccaccattatcagcaccagactgagcagctatatccttttattaatcatggtcattcattcattcattcattcacaaaatatttatgatgtatttactctgcaccaggtcccatgccaagcactggggacacagttatggcaaagtagacaaagcatttgttcatttggagcttagagtccaggaggaatacattagataatgacacaatcaaatataaattgcaagatgtcacaggtgtgatgaagggagagtaggagagaccatgagtatgtgtaacaggaggacacagcattattctagtgctgtactgttccgtacggcagccactacccacatgtaactttttaagatttaaatttaaattagttaacattcaaaacgcagctccccaatcacactagcaacatttcaagtgcttgagagccatgcatgattagtggttaccctattgaataggtcagaagtagaatcttttcatcatcacagaaagttctattggacagtgctcttctagatcatcataagactacagagcacttttcaaagctcatgcatgttcatcatgttagtgtcgtattttgagctggggttttgagactccccttagagatagagaaacagacccaagaaatgtgctcaattgcaatgggccacatacctagatctccagatgtcatttcccctctcttattttaagttatgttaagattactaaaacaataaaagctcctaaaaaatcaagttgcctgtctctaaacccctccacattcccgcggtccttcagactgcccggagagcgcgctctgcctgccgcctgcctgcctgccactgagggttcccagcaccatgagggcctggatcttctttctcctttgcctggccgggagggccttggcagcccctcagcaagaagccctgcctgatgagacagaggtggtggaagaaactgtggcagaggtgactgaggtatctgtgggagctaatcctgtccaggtggaagtaggagaatttgatgatggtgcagaggaaaccgaagaggaggtggtggcggaaaatccctgccagaaccaccactgcaaacacggcaaggtgtgcgagctggatgagaacaacacccccatgtgcgtgtgccaggaccccaccagctgcccagcccccattggcgagtttgagaaggtgtgcagcaatgacaacaagaccttcgactcttcctgccacttctttgccacaaagtgcaccctggagggcaccaagaagggccacaagctccacctggactacatcgggccttgcaaatacatccccccttgcctggactctgagctgaccgaattccccctgcgcatgcgggactggctcaagaacgtcctggtcaccctgtatgagagggatgaggacaacaaccttctgactgagaagcagaagctgcgggtgaagaagatccatgagaatgagaagcgcctggaggcaggagaccaccccgtggagctgctggcccgggacttcgagaagaactataacatgtacatcttccctgtacactggcagttcggccagctggaccagcaccccattgacgggtacctctcccacaccgagctggctccactgcgtgctcccctcatccccatggagcattgcaccacccgctttttcgagacctgtgacctggacaatgacaagtacatcgccctggatgagtgggccggctgcttcggcatcaagcagaaggatatcgacaaggatcttgtgatctaaatccactccttccacagtaccggattctctctttaaccctccccttcgtgtttcccccaatgtttaaaatgtttggatggtttgttgttctgcctggagacaaggtgctaacatagatttaagtgaatacattaacggtgctaaaaatgaaaattctaacccaagacatgacattcttagctgtaacttaactattaaggccttttccacacgcattaatagtcccatttttctcttgccatttgtagctttgcccattgtcttattggcacatgggtggacacggatctgctgggctctgccttaaacacacattgcagcttcaacttttctctttagtgttctgtttgaaactaatacttaccgagtcagactttgtgttcatttcatttcagggtcttggctgcctgtgggcttccccaggtggcctggaggtgggcaaagggaagtaacagacacacgatgttgtcaaggatggttttgggactagaggctcagtggtgggagagatccctgcagaacccaccaaccagaacgtggtttgcctgaggctgtaactgagagaaagattctggggctgtgttatgaaaatatagacattctcacataagcccagttcatcaccatttcctcctttacctttcagtgcagtttcttttcacattaggctgttggttcaaacttttgggagcacggactgtcagttctctgggaagtggtcagcgcatcctgcagggcttctcctcctctgtcttttggagaaccagggctcttctcaggggctctagggactgccaggctgtttcagccaggaaggccaaaatcaagagtgagatgtagaaagttgtaaaatagaaaaagtggagttggtgaatcggttgttctttcctcacatttggatgattgtcataaggtttttagcatgttcctccttttcttcaccctccccttttttcttctattaatcaagagaaacttcaaagttaatgggatggtcggatctcacaggctgagaactcgttcacctccaagcatttcatgaaaaagctgcttcttattaatcatacaaactctcaccatgatgtgaagagtttcacaaatccttcaaaataaaaagtaatgacttagaaactgccttcctgggtgatttgcatgtgtcttagtcttagtcaccttattatcctgacacaaaaacacatgagcatacatgtctacacatgactacacaaatgcaaacctttgcaaacacattatgcttttgcacacacacacctgtacacacacaccggcatgtttatacacagggagtgtatggttcctgtaagcactaagttagctgttttcatttaatgacctgtggtttaacccttttgatcactaccaccattatcagcaccagactgagcagctatatccttttattaatcatggtcattcattcattcattcattcacaaaatatttatgatgtatttactctgcaccaggtcccatgccaagcactggggacacagttatggcaaagtagacaaagcatttgttcatttggagcttagagtccaggaggaatacattagataatgacacaatcaaatataaattgcaagatgtcacaggtgtgatgaagggagagtaggagagaccatgagtatgtgtaacaggaggacacagcattattctagtgctgtactgttccgtacggcagccactacccacatgtaactttttaagatttaaatttaaattagttaacattcaaaacgcagctccccaatcacactagcaacatttcaagtgcttgagagccatgcatgattagtggttaccctattgaataggtcagaagtagaatcttttcatcatcacagaaagttctattggacagtgctcttctagatcatcataagactacagagcacttttcaaagctcatgcatgttcatcatgttagtgtcgtattttgagctggggttttgagactccccttagagatagagaaacagacccaagaaatgtgctcaattgcaatgggccacatacctagatctccagatgtcatttcccctctcttattttaagttatgttaagattactaaaacaataaaagctcctaaaaaatcaagttgcctgtctctaaacccctccacattcccgcggtccttcagactgcccggagagcgcgctctgcctgccgcctgcctgcctgccactgagggttcccagcaccatgagggcctggatcttctttctcctttgcctggccgggagggccttggcagcccctcagcaagaagccctgcctgatgagacagaggtggtggaagaaactgtggcagaggtgactgaggtatctgtgggagctaatcctgtccaggtggaagtaggagaatttgatgatggtgcagaggaaaccgaagaggaggtggtggcggaaaatccctgccagaaccaccactgcaaacacggcaaggtgtgcgagctggatgagaacaacacccccatgtgcgtgtgccaggaccccaccagctgcccagcccccattggcgagtttgagaaggtgtgc

SEQ ID NO: 703 - DNA, 32765 bp, Homo sapiens
  misc_feature (949)..(949): second gene starts at position 949
atggcgccgaggtgcccctggccatggccgcggcggcggcgcctcctggacgtgctcgcgcccctggtcctgctgctcggggtccgcgcggcctccgcggagccagagcgcatcagcgaggaggtggggctgctgcagctccttggggaccccccgccccagcaggtcacccagacggatgaccccgacgtcgggctggcctacgtctttgggccagatgccaacagtggccaagtggcccggtaccacttccccagcctcttcttccgtgacttctcactgctgttccacatccggccagccacagagggcccaggggtgctgttcgccatcacggactcggcgcaggccatggtcttgctgggcgtgaagctctctggggtgcaggacgggcaccaggacatctccctgctctacacagaaccaggtgcaggccagacccacacagccgccagcttccggctccccgccttcgtcggccagtggacacacttagccctcagtgtggcaggtggctttgtggccctctacgtggactgtgaggagttccagagaatgccgcttgctcggtcctcacggggcctggagctggagcctggcgccgggctcttcgtggctcaggcggggggagcggaccctgacaagttccagggggtgatcgctgagctgaaggtgcgcagggacccccaggtgagccccatgcactgcctggacgaggaaggcgatgactcagatggggcatccggagactctggcagcgggctcggggacgcccgggagcttctcagggaggagacgggcgcggccctaaaacccaggctccccgcgccaccccccgtcaccacgccacccttggctggaggcagcagcacggaagattccagaagtgaagaagtcgaggagcagaccacggtggcttcgttaggagctcagacacttcctggctcagattctgtctccacgtgggacgggagtgtccggacccctgggggccgcgtgaaagagggcggcctgaaggggcagaaaggggagccaggtgttccgggcccacctggccgggcaggccccccaggatccccatgcctacctggtcccccgggtctcccgtgcccagtgagtcccctgggtcctgcaggcccagcgttgcaaactgtccccggaccacaaggacccccagggcctccggggagggacggcacccctggaagggacggcgagccgggcgaccccggtgaagacggaaagccgggcgacaccgggccacaaggcttccccgggactccaggggacgtaggtcccaagggcgacaagggagaccctggggttggagagagagggcccccaggaccccaagggcctccagggcccccaggaccctccttcagacacgacaagctgaccttcattgacatggagggatctggcttcgggggcgatctggaggccctgcggggtcctcgaggcttccctggacctcccggaccccccggtgtcccaggcctgcccggcgagccaggccgctttggggtgaacagctccgacgtcccaggacccgccggccttcctggtgtgcctgggcgcgagggtccccccgggtttcctggcctcccgggacccccaggccctccgggaagagaggggcccccaggaaggactgggcagaaaggcagcctgggtgaagcaggcgccccaggacataaggggagcaagggagcccccggtcctgctggtgctcgtggggagagcggcctggcaggagcccccggacctgctggaccaccaggcccccctgggccccctgggcccccaggaccaggactccccgctggatttgatgacatggaaggctccggggggcccttctggtcaacagcccgaagcgctgatgggccacagggacctcccggcctgccgggacttaagggggatcctggcgtgcctgggctgccgggggcgaagggagaagttggagcagatggagtccccgggttccccggcctccctggcagagagggcattgctgggccccaggggccaaagggagacagaggcagccggggagaaaagggagatccagggaaggacggagtcgggcagccgggcctccctggcccccccggacccccgggacctgtggtctacgtgtcggagcaggacggatccgtcctgagcgtgccgggacctgagggccggccgggtttcgcaggctttcccggacctgcaggacccaagggcaacctgggctctaagggcgaacgaggctccccgggacccaagggtgagaagggtgaaccgggcagcatcttcagccccgacggcggtgccctgggccctgcccagaaaggagccaagggagagccgggcttccgaggacccccgggtccatacggacggccggggtacaagggagagattggctttcctggacggccgggtcgccccgggatgaacggattgaaaggagagaaaggggagccgggagatgccagccttggatttggcatgaggggaatgcccggccccccaggacctccagggcccccaggccctccagggactcctgtttacgacagcaatgtgtttgctgagtccagccgccccgggcctccaggattgccagggaatcagggccctccaggacccaagggcgccaaaggagaagtgggcccccccggaccaccagggcagtttccgtttgactttcttcagttggaggctgaaatgaagggggagaagggagaccgaggtgatgcaggacagaaaggcgaaaggggggagcccgggggcggcggtttcttcggctccagcctgcccggcccccccggccccccaggcccacgtggctaccctgggattccaggtcccaagggagagagcatccggggccagcccggcccacctggacctcagggaccccccggcatcggctacgaggggcgccagggcccctttgcctggccgggagggccttggcagcccctcagcaagaagccctgcctgatgagacagaggtggtggaagaaactgtggcagaggtgactgaggtatctgtgggagctaatcctgtccaggtggaagtaggagaatttgatgatggtgcagaggaaaccgaagaggaggtggtggcggaaaatccctgccagaaccaccactgcaaacacggcaaggtgtgcgagctggatgagaacaacacccccatgtgcgtgtgccaggaccccaccagctgcccagcccccattggcgagtttgagaaggtgtgcagcaatgacaacaagaccttcgactcttcctgccacttctttgccacaaagtgcaccctggagggcaccaagaagggccacaagctccacctggactacatcgggccttgcaaatacatccccccttgcctggactctgagctgaccgaattccccctgcgcatgcgggactggctcaagaacgtcctggtcaccctgtatgagagggatgaggacaacaaccttctgactgagaagcagaagctgcgggtgaagaagatccatgagaatgagaagcgcctggaggcaggagaccaccccgtggagctgctggcccgggacttcgagaagaactataacatgtacatcttccctgtacactggcagttcggccagctggaccagcaccccattgacgggtacctctcccacaccgagctggctccactgcgtgctcccctcatccccatggagcattgcaccacccgctttttcgagacctgtgacctggacaatgacaagtacatcgccctggatgagtgggccggctgcttcggcatcaagcagaaggatatcgacaaggatcttgtgatctaaatccactccttccacagtaccggattctctctttaaccctccccttcgtgtttcccccaatgtttaaaatgtttggatggtttgttgttctgcctggagacaaggtgctaacatagatttaagtgaatacattaacggtgctaaaaatgaaaattctaacccaagacatgacattcttagctgtaacttaactattaaggccttttccacacgcattaatagtcccatttttctcttgccatttgtagctttgcccattgtcttattggcacatgggtggacacggatctgctgggctctgccttaaacacacattgcagcttcaacttttctctttagtgttctgtttgaaactaatacttaccgagtcagactttgtgttcatttcatttcagggtcttggctgcctgtgggcttccccaggtggcctggaggtgggcaaagggaagtaacagacacacgatgttgtcaaggatggttttgggactagaggctcagtggtgggagagatccctgcagaacccaccaaccagaacgtggtttgcctgaggctgtaactgagagaaagattctggggctgtgttatgaaaatatagacattctcacataagcccagttcatcaccatttcctcctttacctttcagtgcagtttcttttcacattaggctgttggttcaaacttttgggagcacggactgtcagttctctgggaagtggtcagcgcatcctgcagggcttctcctcctctgtcttttggagaaccagggctcttctcaggggctctagggactgccaggctgtttcagccaggaaggccaaaatcaagagtgagatgtagaaagttgtaaaatagaaaaagtggagttggtgaatcggttgttctttcctcacatttggatgattgtcataaggtttttagcatgttcctccttttcttcaccctccccttttttcttctattaatcaagagaaacttcaaagttaatgggatggtcggatctcacaggctgagaactcgttcacctccaagcatttcatgaaaaagctgcttcttattaatcatacaaactctcaccatgatgtgaagagtttcacaaatccttcaaaataaaaagtaatgacttagaaactgccttcctgggtgatttgcatgtgtcttagtcttagtcaccttattatcctgacacaaaaacacatgagcatacatgtctacacatgactacacaaatgcaaacctttgcaaacacattatgcttttgcacacacacacctgtacacacacaccggcatgtttatacacagggagtgtatggttcctgtaagcactaagttagctgttttcatttaatgacctgtggtttaacccttttgatcactaccaccattatcagcaccagactgagcagctatatccttttattaatcatggtcattcattcattcattcattcacaaaatatttatgatgtatttactctgcaccaggtcccatgccaagcactggggacacagttatggcaaagtagacaaagcatttgttcatttggagcttagagtccaggaggaatacattagataatgacacaatcaaatataaattgcaagatgtcacaggtgtgatgaagggagagtaggagagaccatgagtatgtgtaacaggaggacacagcattattctagtgctgtactgttccgtacggcagccactacccacatgtaactttttaagatttaaatttaaattagttaacattcaaaacgcagctccccaatcacactagcaacatttcaagtgcttgagagccatgcatgattagtggttaccctattgaataggtcagaagtagaatcttttcatcatcacagaaagttctattggacagtgctcttctagatcatcataagactacagagcacttttcaaagctcatgcatgttcatcatgttagtgtcgtattttgagctggggttttgagactccccttagagatagagaaacagacccaagaaatgtgctcaattgcaatgggccacatacctagatctccagatgtcatttcccctctcttattttaagttatgttaagattactaaaacaataaaagctcctaaaaaatcaagttgcctgtctctaaacccctccacattcccgcggtccttcagactgcccggagagcgcgctctgcctgccgcctgcctgcctgccactgagggttcccagcaccatgagggcctggatcttctttctcctttgcctggccgggagggccttggcagcccctcagcaagaagccctgcctgatgagacagaggtggtggaagaaactgtggcagaggtgactgaggtatctgtgggagctaatcctgtccaggtggaagtaggagaatttgatgatggtgcagaggaaaccgaagaggaggtggtggcggaaaatccctgccagaaccaccactgcaaacacggcaaggtgtgcgagctggatgagaacaacacccccatgtgcgtgtgccaggaccccaccagctgcccagcccccattggcgagtttgagaaggtgtgcagcaatgacaacaagaccttcgactcttcctgccacttctttgccacaaagtgcaccctggagggcaccaagaagggccacaagctccacctggactacatcgggccttgcaaatacatccccccttgcctggactctgagctgaccgaattccccctgcgcatgcgggactggctcaagaacgtcctggtcaccctgtatgagagggatgaggacaacaaccttctgactgagaagcagaagctgcgggtgaagaagatccatgagaatgagaagcgcctggaggcaggagaccaccccgtggagctgctggcccgggacttcgagaagaactataacatgtacatcttccctgtacactggcagttcggccagctggaccagcaccccattgacgggtacctctcccacaccgagctggctccactgcgtgctcccctcatccccatggagcattgcaccacccgctttttcgagacctgtgacctggacaatgacaagtacatcgccctggatgagtgggccggctgcttcggcatcaagcagaaggatatcgacaaggatcttgtgatctaaatccactccttccacagtaccggattctctctttaaccctccccttcgtgtttcccccaatgtttaaaatgtttggatggtttgttgttctgcctggagacaaggtgctaacatagatttaagtgaatacattaacggtgctaaaaatgaaaattctaacccaagacatgacattcttagctgtaacttaactattaaggccttttccacacgcattaatagtcccatttttctcttgccatttgtagctttgcccattgtcttattggcacatgggtggacacggatctgctgggctctgccttaaacacacattgcagcttcaacttttctctttagtgttctgtttgaaactaatacttaccgagtcagactttgtgttcatttcatttcagggtcttggctgcctgtgggcttccccaggtggcctggaggtgggcaaagggaagtaacagacacacgatgttgtcaaggatggttttgggactagaggctcagtggtgggagagatccctgcagaacccaccaaccagaacgtggtttgcctgaggctgtaactgagagaaagattctggggctgtgttatgaaaatatagacattctcacataagcccagttcatcaccatttcctcctttacctttcagtgcagtttcttttcacattaggctgttggttcaaacttttgggagcacggactgtcagttctctgggaagtggtcagcgcatcctgcagggcttctcctcctctgtcttttggagaaccagggctcttctcaggggctctagggactgccaggctgtttcagccaggaaggccaaaatcaagagtgagatgtagaaagttgtaaaatagaaaaagtggagttggtgaatcggttgttctttcctcacatttggatgattgtcataaggtttttagcatgttcctccttttcttcaccctccccttttttcttctattaatcaagagaaacttcaaagttaatgggatggtcggatctcacaggctgagaactcgttcacctccaagcatttcatgaaaaagctgcttcttattaatcatacaaactctcaccatgatgtgaagagtttcacaaatccttcaaaataaaaagtaatgacttagaaactgccttcctgggtgatttgcatgtgtcttagtcttagtcaccttattatcctgacacaaaaacacatgagcatacatgtctacacatgactacacaaatgcaaacctttgcaaacacattatgcttttgcacacacacacctgtacacacacaccggcatgtttatacacagggagtgtatggttcctgtaagcactaagttagctgttttcatttaatgacctgtggtttaacccttttgatcactaccaccattatcagcaccagactgagcagctatatccttttattaatcatggtcattcattcattcattcattcacaaaatatttatgatgtatttactctgcaccaggtcccatgccaagcactggggacacagttatggcaaagtagacaaagcatttgttcatttggagcttagagtccaggaggaatacattagataatgacacaatcaaatataaattgcaagatgtcacaggtgtgatgaagggagagtaggagagaccatgagtatgtgtaacaggaggacacagcattattctagtgctgtactgttccgtacggcagccactacccacatgtaactttttaagatttaaatttaaattagttaacattcaaaacgcagctccccaatcacactagcaacatttcaagtgcttgagagccatgcatgattagtggttaccctattgaataggtcagaagtagaatcttttcatcatcacagaaagttctattggacagtgctcttctagatcatcataagactacagagcacttttcaaagctcatgcatgttcatcatgttagtgtcgtattttgagctggggttttgagactccccttagagatagagaaacagacccaagaaatgtgctcaattgcaatgggccacatacctagatctccagatgtcatttcccctctcttattttaagttatgttaagattactaaaacaataaaagctcctaaaaaatcaagttgcctgtctctaaacccctccacattcccgcggtccttcagactgcccggagagcgcgctctgcctgccgcctgcctgcctgccactgagggttcccagcaccatgagggcctggatcttctttctcctttgcctggccgggagggccttggcagcccctcagcaagaagccctgcctgatgagacagaggtggtggaagaaactgtggcagaggtgactgaggtatctgtgggagctaatcctgtccaggtggaagtaggagaatttgatgatggtgcagaggaaaccgaagaggaggtggtggcggaaaatccctgccagaaccaccactgcaaacacggcaaggtgtgcgagctggatgagaacaacacccccatgtgcgtgtgccaggaccccaccagctgcccagcccccattggcgagtttgagaaggtgtgcagcaatgacaacaagaccttcgactcttcctgccacttctttgccacaaagtgcaccctggagggcaccaagaagggccacaagctccacctggactacatcgggccttgcaaatacatccccccttgcctggactctgagctgaccgaattccccctgcgcatgcgggactggctcaagaacgtcctggtcaccctgtatgagagggatgaggacaacaaccttctgactgagaagcagaagctgcgggtgaagaagatccatgagaatgagaagcgcctggaggcaggagaccaccccgtggagctgctggcccgggacttcgagaagaactataacatgtacatcttccctgtacactggcagttcggccagctggaccagcaccccattgacgggtacctctcccacaccgagctggctccactgcgtgctcccctcatccccatggagcattgcaccacccgctttttcgagacctgtgacctggacaatgacaagtacatcgccctggatgagtgggccggctgcttcggcatcaagcagaaggatatcgacaaggatcttgtgatctaaatccactccttccacagtaccggattctctctttaaccctccccttcgtgtttcccccaatgtttaaaatgtttggatggtttgttgttctgcctggagacaaggtgctaacatagatttaagtgaatacattaacggtgctaaaaatgaaaattctaacccaagacatgacattcttagctgtaacttaactattaaggccttttccacacgcattaatagtcccatttttctcttgccatttgtagctttgcccattgtcttattggcacatgggtggacacggatctgctgggctctgccttaaacacacattgcagcttcaacttttctctttagtgttctgtttgaaactaatacttaccgagtcagactttgtgttcatttcatttcagggtcttggctgcctgtgggcttccccaggtggcctggaggtgggcaaagggaagtaacagacacacgatgttgtcaaggatggttttgggactagaggctcagtggtgggagagatccctgcagaacccaccaaccagaacgtggtttgcctgaggctgtaactgagagaaagattctggggctgtgttatgaaaatatagacattctcacataagcccagttcatcaccatttcctcctttacctttcagtgcagtttcttttcacattaggctgttggttcaaacttttgggagcacggactgtcagttctctgggaagtggtcagcgcatcctgcagggcttctcctcctctgtcttttggagaaccagggctcttctcaggggctctagggactgccaggctgtttcagccaggaaggccaaaatcaagagtgagatgtagaaagttgtaaaatagaaaaagtggagttggtgaatcggttgttctttcctcacatttggatgattgtcataaggtttttagcatgttcctccttttcttcaccctccccttttttcttctattaatcaagagaaacttcaaagttaatgggatggtcggatctcacaggctgagaactcgttcacctccaagcatttcatgaaaaagctgcttcttattaatcatacaaactctcaccatgatgtgaagagtttcacaaatccttcaaaataaaaagtaatgacttagaaactgccttcctgggtgatttgcatgtgtcttagtcttagtcaccttattatcctgacacaaaaacacatgagcatacatgtctacacatgactacacaaatgcaaacctttgcaaacacattatgcttttgcacacacacacctgtacacacacaccggcatgtttatacacagggagtgtatggttcctgtaagcactaagttagctgttttcatttaatgacctgtggtttaacccttttgatcactaccaccattatcagcaccagactgagcagctatatccttttattaatcatggtcattcattcattcattcattcacaaaatatttatgatgtatttactctgcaccaggtcccatgccaagcactggggacacagttatggcaaagtagacaaagcatttgttcatttggagcttagagtccaggaggaatacattagataatgacacaatcaaatataaattgcaagatgtcacaggtgtgatgaagggagagtaggagagaccatgagtatgtgtaacaggaggacacagcattattctagtgctgtactgttccgtacggcagccactacccacatgtaactttttaagatttaaatttaaattagttaacattcaaaacgcagctccccaatcacactagcaacatttcaagtgcttgagagccatgcatgattagtggttaccctattgaataggtcagaagtagaatcttttcatcatcacagaaagttctattggacagtgctcttctagatcatcataagactacagagcacttttcaaagctcatgcatgttcatcatgttagtgtcgtattttgagctggggttttgagactccccttagagatagagaaacagacccaagaaatgtgctcaattgcaatgggccacatacctagatctccagatgtcatttcccctctcttattttaagttatgttaagattactaaaacaataaaagctcctaaaaaatcaagttgcctgtctctaaacccctccacattcccgcggtccttcagactgcccggagagcgcgctctgcctgccgcctgcctgcctgccactgagggttcccagcaccatgagggcctggatcttctttctcctttgcctggccgggagggccttggcagcccctcagcaagaagccctgcctgatgagacagaggtggtggaagaaactgtggcagaggtgactgaggtatctgtgggagctaatcctgtccaggtggaagtaggagaatttgatgatggtgcagaggaaaccgaagaggaggtggtggcggaaaatccctgccagaaccaccactgcaaacacggcaaggtgtgcgagctggatgagaacaacacccccatgtgcgtgtgccaggaccccaccagctgcccagcccccattggcgagtttgagaaggtgtgcagcaatgacaacaagaccttcgactcttcctgccacttctttgccacaaagtgcaccctggagggcaccaagaagggccacaagctccacctggactacatcgggccttgcaaatacatccccccttgcctggactctgagctgaccgaattccccctgcgcatgcgggactggctcaagaacgtcctggtcaccctgtatgagagggatgaggacaacaaccttctgactgagaagcagaagctgcgggtgaagaagatccatgagaatgagaagcgcctggaggcaggagaccaccccgtggagctgctggcccgggacttcgagaagaactataacatgtacatcttccctgtacactggcagttcggccagctggaccagcaccccattgacgggtacctctcccacaccgagctggctccactgcgtgctcccctcatccccatggagcattgcaccacccgctttttcgagacctgtgacctggacaatgacaagtacatcgccctggatgagtgggccggctgcttcggcatcaagcagaaggatatcgacaaggatcttgtgatctaaatccactccttccacagtaccggattctctctttaaccctccccttcgtgtttcccccaatgtttaaaatgtttggatggtttgttgttctgcctggagacaaggtgctaacatagatttaagtgaatacattaacggtgctaaaaatgaaaattctaacccaagacatgacattcttagctgtaacttaactattaaggccttttccacacgcattaatagtcccatttttctcttgccatttgtagctttgcccattgtcttattggcacatgggtggacacggatctgctgggctctgccttaaacacacattgcagcttcaacttttctctttagtgttctgtttgaaactaatacttaccgagtcagactttgtgttcatttcatttcagggtcttggctgcctgtgggcttccccaggtggcctggaggtgggcaaagggaagtaacagacacacgatgttgtcaaggatggttttgggactagaggctcagtggtgggagagatccctgcagaacccaccaaccagaacgtggtttgcctgaggctgtaactgagagaaagattctggggctgtgttatgaaaatatagacattctcacataagcccagttcatcaccatttcctcctttacctttcagtgcagtttcttttcacattaggctgttggttcaaacttttgggagcacggactgtcagttctctgggaagtggtcagcgcatcctgcagggcttctcctcctctgtcttttggagaaccagggctcttctcaggggctctagggactgccaggctgtttcagccaggaaggccaaaatcaagagtgagatgtagaaagttgtaaaatagaaaaagtggagttggtgaatcggttgttctttcctcacatttggatgattgtcataaggtttttagcatgttcctccttttcttcaccctccccttttttcttctattaatcaagagaaacttcaaagttaatgggatggtcggatctcacaggctgagaactcgttcacctccaagcatttcatgaaaaagctgcttcttattaatcatacaaactctcaccatgatgtgaagagtttcacaaatccttcaaaataaaaagtaatgacttagaaactgccttcctgggtgatttgcatgtgtcttagtcttagtcaccttattatcctgacacaaaaacacatgagcatacatgtctacacatgactacacaaatgcaaacctttgcaaacacattatgcttttgcacacacacacctgtacacacacaccggcatgtttatacacagggagtgtatggttcctgtaagcactaagttagctgttttcatttaatgacctgtggtttaacccttttgatcactaccaccattatcagcaccagactgagcagctatatccttttattaatcatggtcattcattcattcattcattcacaaaatatttatgatgtatttactctgcaccaggtcccatgccaagcactggggacacagttatggcaaagtagacaaagcatttgttcatttggagcttagagtccaggaggaatacattagataatgacacaatcaaatataaattgcaagatgtcacaggtgtgatgaagggagagtaggagagaccatgagtatgtgtaacaggaggacacagcattattctagtgctgtactgttccgtacggcagccactacccacatgtaactttttaagatttaaatttaaattagttaacattcaaaacgcagctccccaatcacactagcaacatttcaagtgcttgagagccatgcatgattagtggttaccctattgaataggtcagaagtagaatcttttcatcatcacagaaagttctattggacagtgctcttctagatcatcataagactacagagcacttttcaaagctcatgcatgttcatcatgttagtgtcgtattttgagctggggttttgagactccccttagagatagagaaacagacccaagaaatgtgctcaattgcaatgggccacatacctagatctccagatgtcatttcccctctcttattttaagttatgttaagattactaaaacaataaaagctcctaaaaaatcaagttgcctgtctctaaacccctccacattcccgcggtccttcagactgcccggagagcgcgctctgcctgccgcctgcctgcctgccactgagggttcccagcaccatgagggcctggatcttctttctcctttgcctggccgggagggccttggcagcccctcagcaagaagccctgcctgatgagacagaggtggtggaagaaactgtggcagaggtgactgaggtatctgtgggagctaatcctgtccaggtggaagtaggagaatttgatgatggtgcagaggaaaccgaagaggaggtggtggcggaaaatccctgccagaaccaccactgcaaacacggcaaggtgtgcgagctggatgagaacaacacccccatgtgcgtgtgccaggaccccaccagctgcccagcccccattggcgagtttgagaaggtgtgcagcaatgacaacaagaccttcgactcttcctgccacttctttgccacaaagtgcaccctggagggcaccaagaagggccacaagctccacctggactacatcgggccttgcaaatacatccccccttgcctggactctgagctgaccgaattccccctgcgcatgcgggactggctcaagaacgtcctggtcaccctgtatgagagggatgaggacaacaaccttctgactgagaagcagaagctgcgggtgaagaagatccatgagaatgagaagcgcctggaggcaggagaccaccccgtggagctgctggcccgggacttcgagaagaactataacatgtacatcttccctgtacactggcagttcggccagctggaccagcaccccattgacgggtacctctcccacaccgagctggctccactgcgtgctcccctcatccccatggagcattgcaccacccgctttttcgagacctgtgacctggacaatgacaagtacatcgccctggatgagtgggccggctgcttcggcatcaagcagaaggatatcgacaaggatcttgtgatctaaatccactccttccacagtaccggattctctctttaaccctccccttcgtgtttcccccaatgtttaaaatgtttggatggtttgttgttctgcctggagacaaggtgctaacatagatttaagtgaatacattaacggtgctaaaaatgaaaattctaacccaagacatgacattcttagctgtaacttaactattaaggccttttccacacgcattaatagtcccatttttctcttgccatttgtagctttgcccattgtcttattggcacatgggtggacacggatctgctgggctctgccttaaacacacattgcagcttcaacttttctctttagtgttctgtttgaaactaatacttaccgagtcagactttgtgttcatttcatttcagggtcttggctgcctgtgggcttccccaggtggcctggaggtgggcaaagggaagtaacagacacacgatgttgtcaaggatggttttgggactagaggctcagtggtgggagagatccctgcagaacccaccaaccagaacgtggtttgcctgaggctgtaactgagagaaagattctggggctgtgttatgaaaatatagacattctcacataagcccagttcatcaccatttcctcctttacctttcagtgcagtttcttttcacattaggctgttggttcaaacttttgggagcacggactgtcagttctctgggaagtggtcagcgcatcctgcagggcttctcctcctctgtcttttggagaaccagggctcttctcaggggctctagggactgccaggctgtttcagccaggaaggccaaaatcaagagtgagatgtagaaagttgtaaaatagaaaaagtggagttggtgaatcggttgttctttcctcacatttggatgattgtcataaggtttttagcatgttcctccttttcttcaccctccccttttttcttctattaatcaagagaaacttcaaagttaatgggatggtcggatctcacaggctgagaactcgttcacctccaagcatttcatgaaaaagctgcttcttattaatcatacaaactctcaccatgatgtgaagagtttcacaaatccttcaaaataaaaagtaatgacttagaaactgccttcctgggtgatttgcatgtgtcttagtcttagtcaccttattatcctgacacaaaaacacatgagcatacatgtctacacatgactacacaaatgcaaacctttgcaaacacattatgcttttgcacacacacacctgtacacacacaccggcatgtttatacacagggagtgtatggttcctgtaagcactaagttagctgttttcatttaatgacctgtggtttaacccttttgatcactaccaccattatcagcaccagactgagcagctatatccttttattaatcatggtcattcattcattcattcattcacaaaatatttatgatgtatttactctgcaccaggtcccatgccaagcactggggacacagttatggcaaagtagacaaagcatttgttcatttggagcttagagtccaggaggaatacattagataatgacacaatcaaatataaattgcaagatgtcacaggtgtgatgaagggagagtaggagagaccatgagtatgtgtaacaggaggacacagcattattctagtgctgtactgttccgtacggcagccactacccacatgtaactttttaagatttaaatttaaattagttaacattcaaaacgcagctccccaatcacactagcaacatttcaagtgcttgagagccatgcatgattagtggttaccctattgaataggtcagaagtagaatcttttcatcatcacagaaagttctattggacagtgctcttctagatcatcataagactacagagcacttttcaaagctcatgcatgttcatcatgttagtgtcgtattttgagctggggttttgagactccccttagagatagagaaacagacccaagaaatgtgctcaattgcaatgggccacatacctagatctccagatgtcatttcccctctcttattttaagttatgttaagattactaaaacaataaaagctcctaaaaaatcaagttgcctgtctctaaacccctccacattcccgcggtccttcagactgcccggagagcgcgctctgcctgccgcctgcctgcctgccactgagggttcccagcaccatgagggcctggatcttctttctcctttgcctggccgggagggccttggcagcccctcagcaagaagccctgcctgatgagacagaggtggtggaagaaactgtggcagaggtgactgaggtatctgtgggagctaatcctgtccaggtggaagtaggagaatttgatgatggtgcagaggaaaccgaagaggaggtggtggcggaaaatccctgccagaaccaccactgcaaacacggcaaggtgtgcgagctggatgagaacaacacccccatgtgcgtgtgccaggaccccaccagctgcccagcccccattggcgagtttgagaaggtgtgcagcaatgacaacaagaccttcgactcttcctgccacttctttgccacaaagtgcaccctggagggcaccaagaagggccacaagctccacctggactacatcgggccttgcaaatacatccccccttgcctggactctgagctgaccgaattccccctgcgcatgcgggactggctcaagaacgtcctggtcaccctgtatgagagggatgaggacaacaaccttctgactgagaagcagaagctgcgggtgaagaagatccatgagaatgagaagcgcctggaggcaggagaccaccccgtggagctgctggcccgggacttcgagaagaactataacatgtacatcttccctgtacactggcagttcggccagctggaccagcaccccattgacgggtacctctcccacaccgagctggctccactgcgtgctcccctcatccccatggagcattgcaccacccgctttttcgagacctgtgacctggacaatgacaagtacatcgccctggatgagtgggccggctgcttcggcatcaagcagaaggatatcgacaaggatcttgtgatctaaatccactccttccacagtaccggattctctctttaaccctccccttcgtgtttcccccaatgtttaaaatgtttggatggtttgttgttctgcctggagacaaggtgctaacatagatttaagtgaatacattaacggtgctaaaaatgaaaattctaacccaagacatgacattcttagctgtaacttaactattaaggccttttccacacgcattaatagtcccatttttctcttgccatttgtagctttgcccattgtcttattggcacatgggtggacacggatctgctgggctctgccttaaacacacattgcagcttcaacttttctctttagtgttctgtttgaaactaatacttaccgagtcagactttgtgttcatttcatttcagggtcttggctgcctgtgggcttccccaggtggcctggaggtgggcaaagggaagtaacagacacacgatgttgtcaaggatggttttgggactagaggctcagtggtgggagagatccctgcagaacccaccaaccagaacgtggtttgcctgaggctgtaactgagagaaagattctggggctgtgttatgaaaatatagacattctcacataagcccagttcatcaccatttcctcctttacctttcagtgcagtttcttttcacattaggctgttggttcaaacttttgggagcacggactgtcagttctctgggaagtggtcagcgcatcctgcagggcttctcctcctctgtcttttggagaaccagggctcttctcaggggctctagggactgccaggctgtttcagccaggaaggccaaaatcaagagtgagatgtagaaagttgtaaaatagaaaaagtggagttggtgaatcggttgttctttcctcacatttggatgattgtcataaggtttttagcatgttcctccttttcttcaccctccccttttttcttctattaatcaagagaaacttcaaagttaatgggatggtcggatctcacaggctgagaactcgttcacctccaagcatttcatgaaaaagctgcttcttattaatcatacaaactctcaccatgatgtgaagagtttcacaaatccttcaaaataaaaagtaatgacttagaaactgccttcctgggtgatttgcatgtgtcttagtcttagtcaccttattatcctgacacaaaaacacatgagcatacatgtctacacatgactacacaaatgcaaacctttgcaaacacattatgcttttgcacacacacacctgtacacacacaccggcatgtttatacacagggagtgtatggttcctgtaagcactaagttagctgttttcatttaatgacctgtggtttaacccttttgatcactaccaccattatcagcaccagactgagcagctatatccttttattaatcatggtcattcattcattcattcattcacaaaatatttatgatgtatttactctgcaccaggtcccatgccaagcactggggacacagttatggcaaagtagacaaagcatttgttcatttggagcttagagtccaggaggaatacattagataatgacacaatcaaatataaattgcaagatgtcacaggtgtgatgaagggagagtaggagagaccatgagtatgtgtaacaggaggacacagcattattctagtgctgtactgttccgtacggcagccactacccacatgtaactttttaagatttaaatttaaattagttaacattcaaaacgcagctccccaatcacactagcaacatttcaagtgcttgagagccatgcatgattagtggttaccctattgaataggtcagaagtagaatcttttcatcatcacagaaagttctattggacagtgctcttctagatcatcataagactacagagcacttttcaaagctcatgcatgttcatcatgttagtgtcgtattttgagctggggttttgagactccccttagagatagagaaacagacccaagaaatgtgctcaattgcaatgggccacatacctagatctccagatgtcatttcccctctcttattttaagttatgttaagattactaaaacaataaaagctcctaaaaaatcaagttgcctgtctctaaacccctccacattcccgcggtccttcagactgcccggagagcgcgctctgcctgccgcctgcctgcctgccactgagggttcccagcaccatgagggcctggatcttctttctcctttgcctggccgggagggccttggcagcccctcagcaagaagccctgcctgatgagacagaggtggtggaagaaactgtggcagaggtgactgaggtatctgtgggagctaatcctgtccaggtggaagtaggagaatttgatgatggtgcagaggaaaccgaagaggaggtggtggcggaaaatccctgccagaaccaccactgcaaacacggcaaggtgtgcgagctggatgagaacaacacccccatgtgcgtgtgccaggaccccaccagctgcccagcccccattggcgagtttgagaaggtgtgcagcaatgacaacaagaccttcgactcttcctgccacttctttgccacaaagtgcaccctggagggcaccaagaagggccacaagctccacctggactacatcgggccttgcaaatacatccccccttgcctggactctgagctgaccgaattccccctgcgcatgcgggactggctcaagaacgtcctggtcaccctgtatgagagggatgaggacaacaaccttctgactgagaagcagaagctgcgggtgaagaagatccatgagaatgagaagcgcctggaggcaggagaccaccccgtggagctgctggcccgggacttcgagaagaactataacatgtacatcttccctgtacactggcagttcggccagctggaccagcaccccattgacgggtacctctcccacaccgagctggctccactgcgtgctcccctcatccccatggagcattgcaccacccgctttttcgagacctgtgacctggacaatgacaagtacatcgccctggatgagtgggccggctgcttcggcatcaagcagaaggatatcgacaaggatcttgtgatctaaatccactccttccacagtaccggattctctctttaaccctccccttcgtgtttcccccaatgtttaaaatgtttggatggtttgttgttctgcctggagacaaggtgctaacatagatttaagtgaatacattaacggtgctaaaaatgaaaattctaacccaagacatgacattcttagctgtaacttaactattaaggccttttccacacgcattaatagtcccatttttctcttgccatttgtagctttgcccattgtcttattggcacatgggtggacacggatctgctgggctctgccttaaacacacattgcagcttcaacttttctctttagtgttctgtttgaaactaatacttaccgagtcagactttgtgttcatttcatttcagggtcttggctgcctgtgggcttccccaggtggcctggaggtgggcaaagggaagtaacagacacacgatgttgtcaaggatggttttgggactagaggctcagtggtgggagagatccctgcagaacccaccaaccagaacgtggtttgcctgaggctgtaactgagagaaagattctggggctgtgttatgaaaatatagacattctcacataagcccagttcatcaccatttcctcctttacctttcagtgcagtttcttttcacattaggctgttggttcaaacttttgggagcacggactgtcagttctctgggaagtggtcagcgcatcctgcagggcttctcctcctctgtcttttggagaaccagggctcttctcaggggctctagggactgccaggctgtttcagccaggaaggccaaaatcaagagtgagatgtagaaagttgtaaaatagaaaaagtggagttggtgaatcggttgttctttcctcacatttggatgattgtcataaggtttttagcatgttcctccttttcttcaccctccccttttttcttctattaatcaagagaaacttcaaagttaatgggatggtcggatctcacaggctgagaactcgttcacctccaagcatttcatgaaaaagctgcttcttattaatcatacaaactctcaccatgatgtgaagagtttcacaaatccttcaaaataaaaagtaatgacttagaaactgccttcctgggtgatttgcatgtgtcttagtcttagtcaccttattatcctgacacaaaaacacatgagcatacatgtctacacatgactacacaaatgcaaacctttgcaaacacattatgcttttgcacacacacacctgtacacacacaccggcatgtttatacacagggagtgtatggttcctgtaagcactaagttagctgttttcatttaatgacctgtggtttaacccttttgatcactaccaccattatcagcaccagactgagcagctatatccttttattaatcatggtcattcattcattcattcattcacaaaatatttatgatgtatttactctgcaccaggtcccatgccaagcactggggacacagttatggcaaagtagacaaagcatttgttcatttggagcttagagtccaggaggaatacattagataatgacacaatcaaatataaattgcaagatgtcacaggtgtgatgaagggagagtaggagagaccatgagtatgtgtaacaggaggacacagcattattctagtgctgtactgttccgtacggcagccactacccacatgtaactttttaagatttaaatttaaattagttaacattcaaaacgcagctccccaatcacactagcaacatttcaagtgcttgagagccatgcatgattagtggttaccctattgaataggtcagaagtagaatcttttcatcatcacagaaagttctattggacagtgctcttctagatcatcataagactacagagcacttttcaaagctcatgcatgttcatcatgttagtgtcgtattttgagctggggttttgagactccccttagagatagagaaacagacccaagaaatgtgctcaattgcaatgggccacatacctagatctccagatgtcatttcccctctcttattttaagttatgttaagattactaaaacaataaaagctcctaaaaaatcaagttgcctgtctctaaacccctccacattcccgcggtccttcagactgcccggagagcgcgctctgcctgccgcctgcctgcctgccactgagggttcccagcaccatgagggcctggatcttctttctcctttgcctggccgggagggccttggcagcccctcagcaagaagccctgcctgatgagacagaggtggtggaagaaactgtggcagaggtgactgaggtatctgtgggagctaatcctgtccaggtggaagtaggagaatttgatgatggtgcagaggaaaccgaagaggaggtggtggcggaaaatccctgccagaaccaccactgcaaacacggcaaggtgtgcgagctggatgagaacaacacccccatgtgcgtgtgccaggaccccaccagctgcccagcccccattggcgagtttgagaaggtgtgcagcaatgacaacaagaccttcgactcttcctgccacttctttgccacaaagtgcaccctggagggcaccaagaagggccacaagctccacctggactacatcgggccttgcaaatacatccccccttgcctggactctgagctgaccgaattccccctgcgcatgcgggactggctcaagaacgtcctggtcaccctgtatgagagggatgaggacaacaaccttctgactgagaagcagaagctgcgggtgaagaagatccatgagaatgagaagcgcctggaggcaggagaccaccccgtggagctgctggcccgggacttcgagaagaactataacatgtacatcttccctgtacactggcagttcggccagctggaccagcaccccattgacgggtacctctcccacaccgagctggctccactgcgtgctcccctcatccccatggagcattgcaccacccgctttttcgagacctgtgacctggacaatgacaagtacatcgccctggatgagtgggccggctgcttcggcatcaagcagaaggatatcgacaaggatcttgtgatctaaatccactccttccacagtaccggattctctctttaaccctccccttcgtgtttcccccaatgtttaaaatgtttggatggtttgttgttctgcctggagacaaggtgctaacatagatttaagtgaatacattaacggtgctaaaaatgaaaattctaacccaagacatgacattcttagctgtaacttaactattaaggccttttccacacgcattaatagtcccatttttctcttgccatttgtagctttgcccattgtcttattggcacatgggtggacacggatctgctgggctctgccttaaacacacattgcagcttcaacttttctctttagtgttctgtttgaaactaatacttaccgagtcagactttgtgttcatttcatttcagggtcttggctgcctgtgggcttccccaggtggcctggaggtgggcaaagggaagtaacagacacacgatgttgtcaaggatggttttgggactagaggctcagtggtgggagagatccctgcagaacccaccaaccagaacgtggtttgcctgaggctgtaactgagagaaagattctggggctgtgttatgaaaatatagacattctcacataagcccagttcatcaccatttcctcctttacctttcagtgcagtttcttttcacattaggctgttggttcaaacttttgggagcacggactgtcagttctctgggaagtggtcagcgcatcctgcagggcttctcctcctctgtcttttggagaaccagggctcttctcaggggctctagggactgccaggctgtttcagccaggaaggccaaaatcaagagtgagatgtagaaagttgtaaaatagaaaaagtggagttggtgaatcggttgttctttcctcacatttggatgattgtcataaggtttttagcatgttcctccttttcttcaccctccccttttttcttctattaatcaagagaaacttcaaagttaatgggatggtcggatctcacaggctgagaactcgttcacctccaagcatttcatgaaaaagctgcttcttattaatcatacaaactctcaccatgatgtgaagagtttcacaaatccttcaaaataaaaagtaatgacttagaaactgccttcctgggtgatttgcatgtgtcttagtcttagtcaccttattatcctgacacaaaaacacatgagcatacatgtctacacatgactacacaaatgcaaacctttgcaaacacattatgcttttgcacacacacacctgtacacacacaccggcatgtttatacacagggagtgtatggttcctgtaagcactaagttagctgttttcatttaatgacctgtggtttaacccttttgatcactaccaccattatcagcaccagactgagcagctatatccttttattaatcatggtcattcattcattcattcattcacaaaatatttatgatgtatttactctgcaccaggtcccatgccaagcactggggacacagttatggcaaagtagacaaagcatttgttcatttggagcttagagtccaggaggaatacattagataatgacacaatcaaatataaattgcaagatgtcacaggtgtgatgaagggagagtaggagagaccatgagtatgtgtaacaggaggacacagcattattctagtgctgtactgttccgtacggcagccactacccacatgtaactttttaagatttaaatttaaattagttaacattcaaaacgcagctccccaatcacactagcaacatttcaagtgcttgagagccatgcatgattagtggttaccctattgaataggtcagaagtagaatcttttcatcatcacagaaagttctattggacagtgctcttctagatcatcataagactacagagcacttttcaaagctcatgcatgttcatcatgttagtgtcgtattttgagctggggttttgagactccccttagagatagagaaacagacccaagaaatgtgctcaattgcaatgggccacatacctagatctccagatgtcatttcccctctcttattttaagttatgttaagattactaaaacaataaaagctcctaaaaaatcaagttgcctgtctctaaacccctccacattcccgcggtccttcagactgcccggagagcgcgctctgcctgccgcctgcctgcctgccactgagggttcccagcaccatgagggcctggatcttctttctcctttgcctggccgggagggccttggcagcccctcagcaagaagccctgcctgatgagacagaggtggtggaagaaactgtggcagaggtgactgaggtatctgtgggagctaatcctgtccaggtggaagtaggagaatttgatgatggtgcagaggaaaccgaagaggaggtggtggcggaaaatccctgccagaaccaccactgcaaacacggcaaggtgtgcgagctggatgagaacaacacccccatgtgcgtgtgccaggaccccaccagctgcccagcccccattggcgagtttgagaaggtgtgcagcaatgacaacaagaccttcgactcttcctgccacttctttgccacaaagtgcaccctggagggcaccaagaagggccacaagctccacctggactacatcgggccttgcaaatacatccccccttgcctggactctgagctgaccgaattccccctgcgcatgcgggactggctcaagaacgtcctggtcaccctgtatgagagggatgaggacaacaaccttctgactgagaagcagaagctgcgggtgaagaagatccatgagaatgagaagcgcctggaggcaggagaccaccccgtggagctgctggcccgggacttcgagaagaactataacatgtacatcttccctgtacactggcagttcggccagctggaccagcaccccattgacgggtacctctcccacaccgagctggctccactgcgtgctcccctcatccccatggagcattgcaccacccgctttttcgagacctgtgacctggacaatgacaagtacatcgccctggatgagtgggccggctgcttcggcatcaagcagaaggatatcgacaaggatcttgtgatctaaatccactccttccacagtaccggattctctctttaaccctccccttcgtgtttcccccaatgtttaaaatgtttggatggtttgttgttctgcctggagacaaggtgctaacatagatttaagtgaatacattaacggtgctaaaaatgaaaattctaacccaagacatgacattcttagctgtaacttaactattaaggccttttccacacgcattaatagtcccatttttctcttgccatttgtagctttgcccattgtcttattggcacatgggtggacacggatctgctgggctctgccttaaacacacattgcagcttcaacttttctctttagtgttctgtttgaaactaatacttaccgagtcagactttgtgttcatttcatttcagggtcttggctgcctgtgggcttccccaggtggcctggaggtgggcaaagggaagtaacagacacacgatgttgtcaaggatggttttgggactagaggctcagtggtgggagagatccctgcagaacccaccaaccagaacgtggtttgcctgaggctgtaactgagagaaagattctggggctgtgttatgaaaatatagacattctcacataagcccagttcatcaccatttcctcctttacctttcagtgcagtttcttttcacattaggctgttggttcaaacttttgggagcacggactgtcagttctctgggaagtggtcagcgcatcctgcagggcttctcctcctctgtcttttggagaaccagggctcttctcaggggctctagggactgccaggctgtttcagccaggaaggccaaaatcaagagtgagatgtagaaagttgtaaaatagaaaaagtggagttggtgaatcggttgttctttcctcacatttggatgattgtcataaggtttttagcatgttcctccttttcttcaccctccccttttttcttctattaatcaagagaaacttcaaagttaatgggatggtcggatctcacaggctgagaactcgttcacctccaagcatttcatgaaaaagctgcttcttattaatcatacaaactctcaccatgatgtgaagagtttcacaaatccttcaaaataaaaagtaatgacttagaaactgccttcctgggtgatttgcatgtgtcttagtcttagtcaccttattatcctgacacaaaaacacatgagcatacatgtctacacatgactacacaaatgcaaacctttgcaaacacattatgcttttgcacacacacacctgtacacacacaccggcatgtttatacacagggagtgtatggttcctgtaagcactaagttagctgttttcatttaatgacctgtggtttaacccttttgatcactaccaccattatcagcaccagactgagcagctatatccttttattaatcatggtcattcattcattcattcattcacaaaatatttatgatgtatttactctgcaccaggtcccatgccaagcactggggacacagttatggcaaagtagacaaagcatttgttcatttggagcttagagtccaggaggaatacattagataatgacacaatcaaatataaattgcaagatgtcacaggtgtgatgaagggagagtaggagagaccatgagtatgtgtaacaggaggacacagcattattctagtgctgtactgttccgtacggcagccactacccacatgtaactttttaagatttaaatttaaattagttaacattcaaaacgcagctccccaatcacactagcaacatttcaagtgcttgagagccatgcatgattagtggttaccctattgaataggtcagaagtagaatcttttcatcatcacagaaagttctattggacagtgctcttctagatcatcataagactacagagcacttttcaaagctcatgcatgttcatcatgttagtgtcgtattttgagctggggttttgagactccccttagagatagagaaacagacccaagaaatgtgctcaattgcaatgggccacatacctagatctccagatgtcatttcccctctcttattttaagttatgttaagattactaaaacaataaaagctcctaaaaaatcaagttgcctgtctctaaacccctccacattcccgcggtccttcagactgcccggagagcgcgctctgcctgccgcctgcctgcctgccactgagggttcccagcaccatgagggcctggatcttctttctcctttgcctggccgggagggccttggcagcccctcagcaagaagccctgcctgatgagacagaggtggtggaagaaactgtggcagaggtgactgaggtatctgtgggagctaatcctgtccaggtggaagtaggagaatttgatgatggtgcagaggaaaccgaagaggaggtggtggcggaaaatccctgccagaaccaccactgcaaacacggcaaggtgtgcgagctggatgagaacaacacccccatgtgcgtgtgccaggaccccaccagctgcccagcccccattggcgagtttgagaaggtgtgcagcaatgacaacaagaccttcgactcttcctgccacttctttgccacaaagtgcaccctggagggcaccaagaagggccacaagctccacctggactacatcgggccttgcaaatacatccccccttgcctggactctgagctgaccgaattccccctgcgcatgcgggactggctcaagaacgtcctggtcaccctgtatgagagggatgaggacaacaaccttctgactgagaagcagaagctgcgggtgaagaagatccatgagaatgagaagcgcctggaggcaggagaccaccccgtggagctgctggcccgggacttcgagaagaactataacatgtacatcttccctgtacactggcagttcggccagctggaccagcaccccattgacgggtacctctcccacaccgagctggctccactgcgtgctcccctcatccccatggagcattgcaccacccgctttttcgagacctgtgacctggacaatgacaagtacatcgccctggatgagtgggccggctgcttcggcatcaagcagaaggatatcgacaaggatcttgtgatctaaatccactccttccacagtaccggattctctctttaaccctccccttcgtgtttcccccaatgtttaaaatgtttggatggtttgttgttctgcctggagacaaggtgctaacatagatttaagtgaatacattaacggtgctaaaaatgaaaattctaacccaagacatgacattcttagctgtaacttaactattaaggccttttccacacgcattaatagtcccatttttctcttgccatttgtagctttgcccattgtcttattggcacatgggtggacacggatctgctgggctctgccttaaacacacattgcagcttcaacttttctctttagtgttctgtttgaaactaatacttaccgagtcagactttgtgttcatttcatttcagggtcttggctgcctgtgggcttccccaggtggcctggaggtgggcaaagggaagtaacagacacacgatgttgtcaaggatggttttgggactagaggctcagtggtgggagagatccctgcagaacccaccaaccagaacgtggtttgcctgaggctgtaactgagagaaagattctggggctgtgttatgaaaatatagacattctcacataagcccagttcatcaccatttcctcctttacctttcagtgcagtttcttttcacattaggc

SEQ ID NO: 704 - DNA, 32765 bp, Homo sapiens
  misc_feature (489)..(489): second gene starts at position 489
atggctccctacccctgtggctgccacatcctgctgctgctcttctgctgcctggcggctgcccgggccaacctgctgaacctgaactggctttggttcaataatgaggacaccagccatgcagctaccacgatccctgagccccaggggcccctgcctgtgcagcccacagcagataccaccacacacgtgaccccccggaatggttccacagagccagcgacagcccctggcagccctgagccaccctcagagctgctggaagatggccaggacacccccacttctgccgagagcccggacgcgccagaggagaacattgccggtgtcggagccgagatcctgaacgtggccaaaggcatccggagcttcgtccagctgtggaatgacactgtccccactgagagcttggccagggcggaaaccctggtcctggagactcctgtgggcccccttgccctcgctgggccttccagcaccccccaggagaatgggaccactctctggcccagccgtggcattcctagctctccgggcgcccacacaaccgaggctggcaccttgcctgcacccaccccatcgcctccctccctgggcaggccctgggcaccactcacggggccctcagtgccaccaccatcttcagagcgcatcagcgaggaggtggggctgctgcagctccttggggaccccccgccccagcaggtcacccagacggatgaccccgacgtcgggctggcctacgtctttgggccagatgccaacagtggccaagtggcccggtaccacttccccagcctcttcttccgtgacttctcactgctgttccacatccggccagccacagagggcccaggggtgctgttcgccatcacggactcggcgcaggccatggtcttgctgggcgtgaagctctctggggtgcaggacgggcaccaggacatctccctgctctacacagaaccaggtgcaggccagacccacacagccgccagcttccggctccccgccttcgtcggccagtggacacacttagccctcagtgtggcaggtggctttgtggccctctacgtggactgtgaggagttccagagaatgccgcttgctcggtcctcacggggcctggagctggagcctggcgccgggctcttcgtggctcaggcggggggagcggaccctgacaagttccagggggtgatcgctgagctgaaggtgcgcagggacccccaggtgagccccatgcactgcctggacgaggaaggcgatgactcagatggggcatccggagactctggcagcgggctcggggacgcccgggagcttctcagggaggagacgggcgcggccctaaaacccaggctccccgcgccaccccccgtcaccacgccacccttggctggaggcagcagcacggaagattccagaagtgaagaagtcgaggagcagaccacggtggcttcgttaggagctcagacacttcctggctcagattctgtctccacgtgggacgggagtgtccggacccctgggggccgcgtgaaagagggcggcctgaaggggcagaaaggggagccaggtgttccgggcccacctggccgggcaggccccccaggatccccatgcctacctggtcccccgggtctcccgtgcccagtgagtcccctgggtcctgcaggcccagcgttgcaaactgtccccggaccacaaggacccccagggcctccggggagggacggcacccctggaagggacggcgagccgggcgaccccggtgaagacggaaagccgggcgacaccgggccacaaggcttccccgggactccaggggacgtaggtcccaagggcgacaagggagaccctggggttggagagagagggcccccaggaccccaagggcctccagggcccccaggaccctccttcagacacgacaagctgaccttcattgacatggagggatctggcttcgggggcgatctggaggccctgcggggtcctcgaggcttccctggacctcccggaccccccggtgtcccaggcctgcccggcgagccaggccgctttggggtgaacagctccgacgtcccaggacccgccggccttcctggtgtgcctgggcgcgagggtccccccgggtttcctggcctcccgggacccccaggccctccgggaagagaggggcccccaggaaggactgggcagaaaggcagcctgggtgaagcaggcgccccaggacataaggggagcaagggagcccccggtcctgctggtgctcgtggggagagcggcctggcaggagcccccggacctgctggaccaccaggcccccctgggccccctgggcccccaggaccaggactccccgctggatttgatgacatggaaggctccggggggcccttctggtcaacagcccgaagcgctgatgggccacagggacctcccggcctgccgggacttaagggggatcctggcgtgcctgggctgccgggggcgaagggagaagttggagcagatggagtccccgggttccccggcctccctggcagagagggcattgctgggccccaggggccaaagggagacagaggcagccggggagaaaagggagatccagggaaggacggagtcgggcagccgggcctccctggcccccccggacccccgggacctgtggtctacgtgtcggagcaggacggatccgtcctgagcgtgccgggacctgagggccggccgggtttcgcaggctttcccggacctgcaggacccaagggcaacctgggctctaagggcgaacgaggctccccgggacccaagggtgagaagggtgaaccgggcagcatcttcagccccgacggcggtgccctgggccctgcccagaaaggagccaagggagagccgggcttccgaggacccccgggtccatacggacggccggggtacaagggagagattggctttcctggacggccgggtcgccccgggatgaacggattgaaaggagagaaaggggagccgggagatgccagccttggatttggcatgaggggaatgcccggccccccaggacctccagggcccccaggccctccagggactcctgtttacgacagcaatgtgtttgctgagtccagccgccccgggcctccaggattgccagggaatcagggccctccaggacccaagggcgccaaaggagaagtgggcccccccggaccaccagggcagtttccgtttgactttcttcagttggaggctgaaatgaagggggagaagggagaccgaggtgatgcaggacagaaaggcgaaaggggggagcccgggggcggcggtttcttcggctccagcctgcccggcccccccggccccccaggcccacgtggctaccctgggattccaggtcccaagggagagagcatccggggccagcccggcccacctggacctcagggaccccccggcatcggctacgaggggcgccagggcccctttgcctggccgggagggccttggcagcccctcagcaagaagccctgcctgatgagacagaggtggtggaagaaactgtggcagaggtgactgaggtatctgtgggagctaatcctgtccaggtggaagtaggagaatttgatgatggtgcagaggaaaccgaagaggaggtggtggcggaaaatccctgccagaaccaccactgcaaacacggcaaggtgtgcgagctggatgagaacaacacccccatgtgcgtgtgccaggaccccaccagctgcccagcccccattggcgagtttgagaaggtgtgcagcaatgacaacaagaccttcgactcttcctgccacttctttgccacaaagtgcaccctggagggcaccaagaagggccacaagctccacctggactacatcgggccttgcaaatacatccccccttgcctggactctgagctgaccgaattccccctgcgcatgcgggactggctcaagaacgtcctggtcaccctgtatgagagggatgaggacaacaaccttctgactgagaagcagaagctgcgggtgaagaagatccatgagaatgagaagcgcctggaggcaggagaccaccccgtggagctgctggcccgggacttcgagaagaactataacatgtacatcttccctgtacactggcagttcggccagctggaccagcaccccattgacgggtacctctcccacaccgagctggctccactgcgtgctcccctcatccccatggagcattgcaccacccgctttttcgagacctgtgacctggacaatgacaagtacatcgccctggatgagtgggccggctgcttcggcatcaagcagaaggatatcgacaaggatcttgtgatctaaatccactccttccacagtaccggattctctctttaaccctccccttcgtgtttcccccaatgtttaaaatgtttggatggtttgttgttctgcctggagacaaggtgctaacatagatttaagtgaatacattaacggtgctaaaaatgaaaattctaacccaagacatgacattcttagctgtaacttaactattaaggccttttccacacgcattaatagtcccatttttctcttgccatttgtagctttgcccattgtcttattggcacatgggtggacacggatctgctgggctctgccttaaacacacattgcagcttcaacttttctctttagtgttctgtttgaaactaatacttaccgagtcagactttgtgttcatttcatttcagggtcttggctgcctgtgggcttccccaggtggcctggaggtgggcaaagggaagtaacagacacacgatgttgtcaaggatggttttgggactagaggctcagtggtgggagagatccctgcagaacccaccaaccagaacgtggtttgcctgaggctgtaactgagagaaagattctggggctgtgttatgaaaatatagacattctcacataagcccagttcatcaccatttcctcctttacctttcagtgcagtttcttttcacattaggctgttggttcaaacttttgggagcacggactgtcagttctctgggaagtggtcagcgcatcctgcagggcttctcctcctctgtcttttggagaaccagggctcttctcaggggctctagggactgccaggctgtttcagccaggaaggccaaaatcaagagtgagatgtagaaagttgtaaaatagaaaaagtggagttggtgaatcggttgttctttcctcacatttggatgattgtcataaggtttttagcatgttcctccttttcttcaccctccccttttttcttctattaatcaagagaaacttcaaagttaatgggatggtcggatctcacaggctgagaactcgttcacctccaagcatttcatgaaaaagctgcttcttattaatcatacaaactctcaccatgatgtgaagagtttcacaaatccttcaaaataaaaagtaatgacttagaaactgccttcctgggtgatttgcatgtgtcttagtcttagtcaccttattatcctgacacaaaaacacatgagcatacatgtctacacatgactacacaaatgcaaacctttgcaaacacattatgcttttgcacacacacacctgtacacacacaccggcatgtttatacacagggagtgtatggttcctgtaagcactaagttagctgttttcatttaatgacctgtggtttaacccttttgatcactaccaccattatcagcaccagactgagcagctatatccttttattaatcatggtcattcattcattcattcattcacaaaatatttatgatgtatttactctgcaccaggtcccatgccaagcactggggacacagttatggcaaagtagacaaagcatttgttcatttggagcttagagtccaggaggaatacattagataatgacacaatcaaatataaattgcaagatgtcacaggtgtgatgaagggagagtaggagagaccatgagtatgtgtaacaggaggacacagcattattctagtgctgtactgttccgtacggcagccactacccacatgtaactttttaagatttaaatttaaattagttaacattcaaaacgcagctccccaatcacactagcaacatttcaagtgcttgagagccatgcatgattagtggttaccctattgaataggtcagaagtagaatcttttcatcatcacagaaagttctattggacagtgctcttctagatcatcataagactacagagcacttttcaaagctcatgcatgttcatcatgttagtgtcgtattttgagctggggttttgagactccccttagagatagagaaacagacccaagaaatgtgctcaattgcaatgggccacatacctagatctccagatgtcatttcccctctcttattttaagttatgttaagattactaaaacaataaaagctcctaaaaaatcaagttgcctgtctctaaacccctccacattcccgcggtccttcagactgcccggagagcgcgctctgcctgccgcctgcctgcctgccactgagggttcccagcaccatgagggcctggatcttctttctcctttgcctggccgggagggccttggcagcccctcagcaagaagccctgcctgatgagacagaggtggtggaagaaactgtggcagaggtgactgaggtatctgtgggagctaatcctgtccaggtggaagtaggagaatttgatgatggtgcagaggaaaccgaagaggaggtggtggcggaaaatccctgccagaaccaccactgcaaacacggcaaggtgtgcgagctggatgagaacaacacccccatgtgcgtgtgccaggaccccaccagctgcccagcccccattggcgagtttgagaaggtgtgcagcaatgacaacaagaccttcgactcttcctgccacttctttgccacaaagtgcaccctggagggcaccaagaagggccacaagctccacctggactacatcgggccttgcaaatacatccccccttgcctggactctgagctgaccgaattccccctgcgcatgcgggactggctcaagaacgtcctggtcaccctgtatgagagggatgaggacaacaaccttctgactgagaagcagaagctgcgggtgaagaagatccatgagaatgagaagcgcctggaggcaggagaccaccccgtggagctgctggcccgggacttcgagaagaactataacatgtacatcttccctgtacactggcagttcggccagctggaccagcaccccattgacgggtacctctcccacaccgagctggctccactgcgtgctcccctcatccccatggagcattgcaccacccgctttttcgagacctgtgacctggacaatgacaagtacatcgccctggatgagtgggccggctgcttcggcatcaagcagaaggatatcgacaaggatcttgtgatctaaatccactccttccacagtaccggattctctctttaaccctccccttcgtgtttcccccaatgtttaaaatgtttggatggtttgttgttctgcctggagacaaggtgctaacatagatttaagtgaatacattaacggtgctaaaaatgaaaattctaacccaagacatgacattcttagctgtaacttaactattaaggccttttccacacgcattaatagtcccatttttctcttgccatttgtagctttgcccattgtcttattggcacatgggtggacacggatctgctgggctctgccttaaacacacattgcagcttcaacttttctctttagtgttctgtttgaaactaatacttaccgagtcagactttgtgttcatttcatttcagggtcttggctgcctgtgggcttccccaggtggcctggaggtgggcaaagggaagtaacagacacacgatgttgtcaaggatggttttgggactagaggctcagtggtgggagagatccctgcagaacccaccaaccagaacgtggtttgcctgaggctgtaactgagagaaagattctggggctgtgttatgaaaatatagacattctcacataagcccagttcatcaccatttcctcctttacctttcagtgcagtttcttttcacattaggctgttggttcaaacttttgggagcacggactgtcagttctctgggaagtggtcagcgcatcctgcagggcttctcctcctctgtcttttggagaaccagggctcttctcaggggctctagggactgccaggctgtttcagccaggaaggccaaaatcaagagtgagatgtagaaagttgtaaaatagaaaaagtggagttggtgaatcggttgttctttcctcacatttggatgattgtcataaggtttttagcatgttcctccttttcttcaccctccccttttttcttctattaatcaagagaaacttcaaagttaatgggatggtcggatctcacaggctgagaactcgttcacctccaagcatttcatgaaaaagctgcttcttattaatcatacaaactctcaccatgatgtgaagagtttcacaaatccttcaaaataaaaagtaatgacttagaaactgccttcctgggtgatttgcatgtgtcttagtcttagtcaccttattatcctgacacaaaaacacatgagcatacatgtctacacatgactacacaaatgcaaacctttgcaaacacattatgcttttgcacacacacacctgtacacacacaccggcatgtttatacacagggagtgtatggttcctgtaagcactaagttagctgttttcatttaatgacctgtggtttaacccttttgatcactaccaccattatcagcaccagactgagcagctatatccttttattaatcatggtcattcattcattcattcattcacaaaatatttatgatgtatttactctgcaccaggtcccatgccaagcactggggacacagttatggcaaagtagacaaagcatttgttcatttggagcttagagtccaggaggaatacattagataatgacacaatcaaatataaattgcaagatgtcacaggtgtgatgaagggagagtaggagagaccatgagtatgtgtaacaggaggacacagcattattctagtgctgtactgttccgtacggcagccactacccacatgtaactttttaagatttaaatttaaattagttaacattcaaaacgcagctccccaatcacactagcaacatttcaagtgcttgagagccatgcatgattagtggttaccctattgaataggtcagaagtagaatcttttcatcatcacagaaagttctattggacagtgctcttctagatcatcataagactacagagcacttttcaaagctcatgcatgttcatcatgttagtgtcgtattttgagctggggttttgagactccccttagagatagagaaacagacccaagaaatgtgctcaattgcaatgggccacatacctagatctccagatgtcatttcccctctcttattttaagttatgttaagattactaaaacaataaaagctcctaaaaaatcaagttgcctgtctctaaacccctccacattcccgcggtccttcagactgcccggagagcgcgctctgcctgccgcctgcctgcctgccactgagggttcccagcaccatgagggcctggatcttctttctcctttgcctggccgggagggccttggcagcccctcagcaagaagccctgcctgatgagacagaggtggtggaagaaactgtggcagaggtgactgaggtatctgtgggagctaatcctgtccaggtggaagtaggagaatttgatgatggtgcagaggaaaccgaagaggaggtggtggcggaaaatccctgccagaaccaccactgcaaacacggcaaggtgtgcgagctggatgagaacaacacccccatgtgcgtgtgccaggaccccaccagctgcccagcccccattggcgagtttgagaaggtgtgcagcaatgacaacaagaccttcgactcttcctgccacttctttgccacaaagtgcaccctggagggcaccaagaagggccacaagctccacctggactacatcgggccttgcaaatacatccccccttgcctggactctgagctgaccgaattccccctgcgcatgcgggactggctcaagaacgtcctggtcaccctgtatgagagggatgaggacaacaaccttctgactgagaagcagaagctgcgggtgaagaagatccatgagaatgagaagcgcctggaggcaggagaccaccccgtggagctgctggcccgggacttcgagaagaactataacatgtacatcttccctgtacactggcagttcggccagctggaccagcaccccattgacgggtacctctcccacaccgagctggctccactgcgtgctcccctcatccccatggagcattgcaccacccgctttttcgagacctgtgacctggacaatgacaagtacatcgccctggatgagtgggccggctgcttcggcatcaagcagaaggatatcgacaaggatcttgtgatctaaatccactccttccacagtaccggattctctctttaaccctccccttcgtgtttcccccaatgtttaaaatgtttggatggtttgttgttctgcctggagacaaggtgctaacatagatttaagtgaatacattaacggtgctaaaaatgaaaattctaacccaagacatgacattcttagctgtaacttaactattaaggccttttccacacgcattaatagtcccatttttctcttgccatttgtagctttgcccattgtcttattggcacatgggtggacacggatctgctgggctctgccttaaacacacattgcagcttcaacttttctctttagtgttctgtttgaaactaatacttaccgagtcagactttgtgttcatttcatttcagggtcttggctgcctgtgggcttccccaggtggcctggaggtgggcaaagggaagtaacagacacacgatgttgtcaaggatggttttgggactagaggctcagtggtgggagagatccctgcagaacccaccaaccagaacgtggtttgcctgaggctgtaactgagagaaagattctggggctgtgttatgaaaatatagacattctcacataagcccagttcatcaccatttcctcctttacctttcagtgcagtttcttttcacattaggctgttggttcaaacttttgggagcacggactgtcagttctctgggaagtggtcagcgcatcctgcagggcttctcctcctctgtcttttggagaaccagggctcttctcaggggctctagggactgccaggctgtttcagccaggaaggccaaaatcaagagtgagatgtagaaagttgtaaaatagaaaaagtggagttggtgaatcggttgttctttcctcacatttggatgattgtcataaggtttttagcatgttcctccttttcttcaccctccccttttttcttctattaatcaagagaaacttcaaagttaatgggatggtcggatctcacaggctgagaactcgttcacctccaagcatttcatgaaaaagctgcttcttattaatcatacaaactctcaccatgatgtgaagagtttcacaaatccttcaaaataaaaagtaatgacttagaaactgccttcctgggtgatttgcatgtgtcttagtcttagtcaccttattatcctgacacaaaaacacatgagcatacatgtctacacatgactacacaaatgcaaacctttgcaaacacattatgcttttgcacacacacacctgtacacacacaccggcatgtttatacacagggagtgtatggttcctgtaagcactaagttagctgttttcatttaatgacctgtggtttaacccttttgatcactaccaccattatcagcaccagactgagcagctatatccttttattaatcatggtcattcattcattcattcattcacaaaatatttatgatgtatttactctgcaccaggtcccatgccaagcactggggacacagttatggcaaagtagacaaagcatttgttcatttggagcttagagtccaggaggaatacattagataatgacacaatcaaatataaattgcaagatgtcacaggtgtgatgaagggagagtaggagagaccatgagtatgtgtaacaggaggacacagcattattctagtgctgtactgttccgtacggcagccactacccacatgtaactttttaagatttaaatttaaattagttaacattcaaaacgcagctccccaatcacactagcaacatttcaagtgcttgagagccatgcatgattagtggttaccctattgaataggtcagaagtagaatcttttcatcatcacagaaagttctattggacagtgctcttctagatcatcataagactacagagcacttttcaaagctcatgcatgttcatcatgttagtgtcgtattttgagctggggttttgagactccccttagagatagagaaacagacccaagaaatgtgctcaattgcaatgggccacatacctagatctccagatgtcatttcccctctcttattttaagttatgttaagattactaaaacaataaaagctcctaaaaaatcaagttgcctgtctctaaacccctccacattcccgcggtccttcagactgcccggagagcgcgctctgcctgccgcctgcctgcctgccactgagggttcccagcaccatgagggcctggatcttctttctcctttgcctggccgggagggccttggcagcccctcagcaagaagccctgcctgatgagacagaggtggtggaagaaactgtggcagaggtgactgaggtatctgtgggagctaatcctgtccaggtggaagtaggagaatttgatgatggtgcagaggaaaccgaagaggaggtggtggcggaaaatccctgccagaaccaccactgcaaacacggcaaggtgtgcgagctggatgagaacaacacccccatgtgcgtgtgccaggaccccaccagctgcccagcccccattggcgagtttgagaaggtgtgcagcaatgacaacaagaccttcgactcttcctgccacttctttgccacaaagtgcaccctggagggcaccaagaagggccacaagctccacctggactacatcgggccttgcaaatacatccccccttgcctggactctgagctgaccgaattccccctgcgcatgcgggactggctcaagaacgtcctggtcaccctgtatgagagggatgaggacaacaaccttctgactgagaagcagaagctgcgggtgaagaagatccatgagaatgagaagcgcctggaggcaggagaccaccccgtggagctgctggcccgggacttcgagaagaactataacatgtacatcttccctgtacactggcagttcggccagctggaccagcaccccattgacgggtacctctcccacaccgagctggctccactgcgtgctcccctcatccccatggagcattgcaccacccgctttttcgagacctgtgacctggacaatgacaagtacatcgccctggatgagtgggccggctgcttcggcatcaagcagaaggatatcgacaaggatcttgtgatctaaatccactccttccacagtaccggattctctctttaaccctccccttcgtgtttcccccaatgtttaaaatgtttggatggtttgttgttctgcctggagacaaggtgctaacatagatttaagtgaatacattaacggtgctaaaaatgaaaattctaacccaagacatgacattcttagctgtaacttaactattaaggccttttccacacgcattaatagtcccatttttctcttgccatttgtagctttgcccattgtcttattggcacatgggtggacacggatctgctgggctctgccttaaacacacattgcagcttcaacttttctctttagtgttctgtttgaaactaatacttaccgagtcagactttgtgttcatttcatttcagggtcttggctgcctgtgggcttccccaggtggcctggaggtgggcaaagggaagtaacagacacacgatgttgtcaaggatggttttgggactagaggctcagtggtgggagagatccctgcagaacccaccaaccagaacgtggtttgcctgaggctgtaactgagagaaagattctggggctgtgttatgaaaatatagacattctcacataagcccagttcatcaccatttcctcctttacctttcagtgcagtttcttttcacattaggctgttggttcaaacttttgggagcacggactgtcagttctctgggaagtggtcagcgcatcctgcagggcttctcctcctctgtcttttggagaaccagggctcttctcaggggctctagggactgccaggctgtttcagccaggaaggccaaaatcaagagtgagatgtagaaagttgtaaaatagaaaaagtggagttggtgaatcggttgttctttcctcacatttggatgattgtcataaggtttttagcatgttcctccttttcttcaccctccccttttttcttctattaatcaagagaaacttcaaagttaatgggatggtcggatctcacaggctgagaactcgttcacctccaagcatttcatgaaaaagctgcttcttattaatcatacaaactctcaccatgatgtgaagagtttcacaaatccttcaaaataaaaagtaatgacttagaaactgccttcctgggtgatttgcatgtgtcttagtcttagtcaccttattatcctgacacaaaaacacatgagcatacatgtctacacatgactacacaaatgcaaacctttgcaaacacattatgcttttgcacacacacacctgtacacacacaccggcatgtttatacacagggagtgtatggttcctgtaagcactaagttagctgttttcatttaatgacctgtggtttaacccttttgatcactaccaccattatcagcaccagactgagcagctatatccttttattaatcatggtcattcattcattcattcattcacaaaatatttatgatgtatttactctgcaccaggtcccatgccaagcactggggacacagttatggcaaagtagacaaagcatttgttcatttggagcttagagtccaggaggaatacattagataatgacacaatcaaatataaattgcaagatgtcacaggtgtgatgaagggagagtaggagagaccatgagtatgtgtaacaggaggacacagcattattctagtgctgtactgttccgtacggcagccactacccacatgtaactttttaagatttaaatttaaattagttaacattcaaaacgcagctccccaatcacactagcaacatttcaagtgcttgagagccatgcatgattagtggttaccctattgaataggtcagaagtagaatcttttcatcatcacagaaagttctattggacagtgctcttctagatcatcataagactacagagcacttttcaaagctcatgcatgttcatcatgttagtgtcgtattttgagctggggttttgagactccccttagagatagagaaacagacccaagaaatgtgctcaattgcaatgggccacatacctagatctccagatgtcatttcccctctcttattttaagttatgttaagattactaaaacaataaaagctcctaaaaaatcaagttgcctgtctctaaacccctccacattcccgcggtccttcagactgcccggagagcgcgctctgcctgccgcctgcctgcctgccactgagggttcccagcaccatgagggcctggatcttctttctcctttgcctggccgggagggccttggcagcccctcagcaagaagccctgcctgatgagacagaggtggtggaagaaactgtggcagaggtgactgaggtatctgtgggagctaatcctgtccaggtggaagtaggagaatttgatgatggtgcagaggaaaccgaagaggaggtggtggcggaaaatccctgccagaaccaccactgcaaacacggcaaggtgtgcgagctggatgagaacaacacccccatgtgcgtgtgccaggaccccaccagctgcccagcccccattggcgagtttgagaaggtgtgcagcaatgacaacaagaccttcgactcttcctgccacttctttgccacaaagtgcaccctggagggcaccaagaagggccacaagctccacctggactacatcgggccttgcaaatacatccccccttgcctggactctgagctgaccgaattccccctgcgcatgcgggactggctcaagaacgtcctggtcaccctgtatgagagggatgaggacaacaaccttctgactgagaagcagaagctgcgggtgaagaagatccatgagaatgagaagcgcctggaggcaggagaccaccccgtggagctgctggcccgggacttcgagaagaactataacatgtacatcttccctgtacactggcagttcggccagctggaccagcaccccattgacgggtacctctcccacaccgagctggctccactgcgtgctcccctcatccccatggagcattgcaccacccgctttttcgagacctgtgacctggacaatgacaagtacatcgccctggatgagtgggccggctgcttcggcatcaagcagaaggatatcgacaaggatcttgtgatctaaatccactccttccacagtaccggattctctctttaaccctccccttcgtgtttcccccaatgtttaaaatgtttggatggtttgttgttctgcctggagacaaggtgctaacatagatttaagtgaatacattaacggtgctaaaaatgaaaattctaacccaagacatgacattcttagctgtaacttaactattaaggccttttccacacgcattaatagtcccatttttctcttgccatttgtagctttgcccattgtcttattggcacatgggtggacacggatctgctgggctctgccttaaacacacattgcagcttcaacttttctctttagtgttctgtttgaaactaatacttaccgagtcagactttgtgttcatttcatttcagggtcttggctgcctgtgggcttccccaggtggcctggaggtgggcaaagggaagtaacagacacacgatgttgtcaaggatggttttgggactagaggctcagtggtgggagagatccctgcagaacccaccaaccagaacgtggtttgcctgaggctgtaactgagagaaagattctggggctgtgttatgaaaatatagacattctcacataagcccagttcatcaccatttcctcctttacctttcagtgcagtttcttttcacattaggctgttggttcaaacttttgggagcacggactgtcagttctctgggaagtggtcagcgcatcctgcagggcttctcctcctctgtcttttggagaaccagggctcttctcaggggctctagggactgccaggctgtttcagccaggaaggccaaaatcaagagtgagatgtagaaagttgtaaaatagaaaaagtggagttggtgaatcggttgttctttcctcacatttggatgattgtcataaggtttttagcatgttcctccttttcttcaccctccccttttttcttctattaatcaagagaaacttcaaagttaatgggatggtcggatctcacaggctgagaactcgttcacctccaagcatttcatgaaaaagctgcttcttattaatcatacaaactctcaccatgatgtgaagagtttcacaaatccttcaaaataaaaagtaatgacttagaaactgccttcctgggtgatttgcatgtgtcttagtcttagtcaccttattatcctgacacaaaaacacatgagcatacatgtctacacatgactacacaaatgcaaacctttgcaaacacattatgcttttgcacacacacacctgtacacacacaccggcatgtttatacacagggagtgtatggttcctgtaagcactaagttagctgttttcatttaatgacctgtggtttaacccttttgatcactaccaccattatcagcaccagactgagcagctatatccttttattaatcatggtcattcattcattcattcattcacaaaatatttatgatgtatttactctgcaccaggtcccatgccaagcactggggacacagttatggcaaagtagacaaagcatttgttcatttggagcttagagtccaggaggaatacattagataatgacacaatcaaatataaattgcaagatgtcacaggtgtgatgaagggagagtaggagagaccatgagtatgtgtaacaggaggacacagcattattctagtgctgtactgttccgtacggcagccactacccacatgtaactttttaagatttaaatttaaattagttaacattcaaaacgcagctccccaatcacactagcaacatttcaagtgcttgagagccatgcatgattagtggttaccctattgaataggtcagaagtagaatcttttcatcatcacagaaagttctattggacagtgctcttctagatcatcataagactacagagcacttttcaaagctcatgcatgttcatcatgttagtgtcgtattttgagctggggttttgagactccccttagagatagagaaacagacccaagaaatgtgctcaattgcaatgggccacatacctagatctccagatgtcatttcccctctcttattttaagttatgttaagattactaaaacaataaaagctcctaaaaaatcaagttgcctgtctctaaacccctccacattcccgcggtccttcagactgcccggagagcgcgctctgcctgccgcctgcctgcctgccactgagggttcccagcaccatgagggcctggatcttctttctcctttgcctggccgggagggccttggcagcccctcagcaagaagccctgcctgatgagacagaggtggtggaagaaactgtggcagaggtgactgaggtatctgtgggagctaatcctgtccaggtggaagtaggagaatttgatgatggtgcagaggaaaccgaagaggaggtggtggcggaaaatccctgccagaaccaccactgcaaacacggcaaggtgtgcgagctggatgagaacaacacccccatgtgcgtgtgccaggaccccaccagctgcccagcccccattggcgagtttgagaaggtgtgcagcaatgacaacaagaccttcgactcttcctgccacttctttgccacaaagtgcaccctggagggcaccaagaagggccacaagctccacctggactacatcgggccttgcaaatacatccccccttgcctggactctgagctgaccgaattccccctgcgcatgcgggactggctcaagaacgtcctggtcaccctgtatgagagggatgaggacaacaaccttctgactgagaagcagaagctgcgggtgaagaagatccatgagaatgagaagcgcctggaggcaggagaccaccccgtggagctgctggcccgggacttcgagaagaactataacatgtacatcttccctgtacactggcagttcggccagctggaccagcaccccattgacgggtacctctcccacaccgagctggctccactgcgtgctcccctcatccccatggagcattgcaccacccgctttttcgagacctgtgacctggacaatgacaagtacatcgccctggatgagtgggccggctgcttcggcatcaagcagaaggatatcgacaaggatcttgtgatctaaatccactccttccacagtaccggattctctctttaaccctccccttcgtgtttcccccaatgtttaaaatgtttggatggtttgttgttctgcctggagacaaggtgctaacatagatttaagtgaatacattaacggtgctaaaaatgaaaattctaacccaagacatgacattcttagctgtaacttaactattaaggccttttccacacgcattaatagtcccatttttctcttgccatttgtagctttgcccattgtcttattggcacatgggtggacacggatctgctgggctctgccttaaacacacattgcagcttcaacttttctctttagtgttctgtttgaaactaatacttaccgagtcagactttgtgttcatttcatttcagggtcttggctgcctgtgggcttccccaggtggcctggaggtgggcaaagggaagtaacagacacacgatgttgtcaaggatggttttgggactagaggctcagtggtgggagagatccctgcagaacccaccaaccagaacgtggtttgcctgaggctgtaactgagagaaagattctggggctgtgttatgaaaatatagacattctcacataagcccagttcatcaccatttcctcctttacctttcagtgcagtttcttttcacattaggctgttggttcaaacttttgggagcacggactgtcagttctctgggaagtggtcagcgcatcctgcagggcttctcctcctctgtcttttggagaaccagggctcttctcaggggctctagggactgccaggctgtttcagccaggaaggccaaaatcaagagtgagatgtagaaagttgtaaaatagaaaaagtggagttggtgaatcggttgttctttcctcacatttggatgattgtcataaggtttttagcatgttcctccttttcttcaccctccccttttttcttctattaatcaagagaaacttcaaagttaatgggatggtcggatctcacaggctgagaactcgttcacctccaagcatttcatgaaaaagctgcttcttattaatcatacaaactctcaccatgatgtgaagagtttcacaaatccttcaaaataaaaagtaatgacttagaaactgccttcctgggtgatttgcatgtgtcttagtcttagtcaccttattatcctgacacaaaaacacatgagcatacatgtctacacatgactacacaaatgcaaacctttgcaaacacattatgcttttgcacacacacacctgtacacacacaccggcatgtttatacacagggagtgtatggttcctgtaagcactaagttagctgttttcatttaatgacctgtggtttaacccttttgatcactaccaccattatcagcaccagactgagcagctatatccttttattaatcatggtcattcattcattcattcattcacaaaatatttatgatgtatttactctgcaccaggtcccatgccaagcactggggacacagttatggcaaagtagacaaagcatttgttcatttggagcttagagtccaggaggaatacattagataatgacacaatcaaatataaattgcaagatgtcacaggtgtgatgaagggagagtaggagagaccatgagtatgtgtaacaggaggacacagcattattctagtgctgtactgttccgtacggcagccactacccacatgtaactttttaagatttaaatttaaattagttaacattcaaaacgcagctccccaatcacactagcaacatttcaagtgcttgagagccatgcatgattagtggttaccctattgaataggtcagaagtagaatcttttcatcatcacagaaagttctattggacagtgctcttctagatcatcataagactacagagcacttttcaaagctcatgcatgttcatcatgttagtgtcgtattttgagctggggttttgagactccccttagagatagagaaacagacccaagaaatgtgctcaattgcaatgggccacatacctagatctccagatgtcatttcccctctcttattttaagttatgttaagattactaaaacaataaaagctcctaaaaaatcaagttgcctgtctctaaacccctccacattcccgcggtccttcagactgcccggagagcgcgctctgcctgccgcctgcctgcctgccactgagggttcccagcaccatgagggcctggatcttctttctcctttgcctggccgggagggccttggcagcccctcagcaagaagccctgcctgatgagacagaggtggtggaagaaactgtggcagaggtgactgaggtatctgtgggagctaatcctgtccaggtggaagtaggagaatttgatgatggtgcagaggaaaccgaagaggaggtggtggcggaaaatccctgccagaaccaccactgcaaacacggcaaggtgtgcgagctggatgagaacaacacccccatgtgcgtgtgccaggaccccaccagctgcccagcccccattggcgagtttgagaaggtgtgcagcaatgacaacaagaccttcgactcttcctgccacttctttgccacaaagtgcaccctggagggcaccaagaagggccacaagctccacctggactacatcgggccttgcaaatacatccccccttgcctggactctgagctgaccgaattccccctgcgcatgcgggactggctcaagaacgtcctggtcaccctgtatgagagggatgaggacaacaaccttctgactgagaagcagaagctgcgggtgaagaagatccatgagaatgagaagcgcctggaggcaggagaccaccccgtggagctgctggcccgggacttcgagaagaactataacatgtacatcttccctgtacactggcagttcggccagctggaccagcaccccattgacgggtacctctcccacaccgagctggctccactgcgtgctcccctcatccccatggagcattgcaccacccgctttttcgagacctgtgacctggacaatgacaagtacatcgccctggatgagtgggccggctgcttcggcatcaagcagaaggatatcgacaaggatcttgtgatctaaatccactccttccacagtaccggattctctctttaaccctccccttcgtgtttcccccaatgtttaaaatgtttggatggtttgttgttctgcctggagacaaggtgctaacatagatttaagtgaatacattaacggtgctaaaaatgaaaattctaacccaagacatgacattcttagctgtaacttaactattaaggccttttccacacgcattaatagtcccatttttctcttgccatttgtagctttgcccattgtcttattggcacatgggtggacacggatctgctgggctctgccttaaacacacattgcagcttcaacttttctctttagtgttctgtttgaaactaatacttaccgagtcagactttgtgttcatttcatttcagggtcttggctgcctgtgggcttccccaggtggcctggaggtgggcaaagggaagtaacagacacacgatgttgtcaaggatggttttgggactagaggctcagtggtgggagagatccctgcagaacccaccaaccagaacgtggtttgcctgaggctgtaactgagagaaagattctggggctgtgttatgaaaatatagacattctcacataagcccagttcatcaccatttcctcctttacctttcagtgcagtttcttttcacattaggctgttggttcaaacttttgggagcacggactgtcagttctctgggaagtggtcagcgcatcctgcagggcttctcctcctctgtcttttggagaaccagggctcttctcaggggctctagggactgccaggctgtttcagccaggaaggccaaaatcaagagtgagatgtagaaagttgtaaaatagaaaaagtggagttggtgaatcggttgttctttcctcacatttggatgattgtcataaggtttttagcatgttcctccttttcttcaccctccccttttttcttctattaatcaagagaaacttcaaagttaatgggatggtcggatctcacaggctgagaactcgttcacctccaagcatttcatgaaaaagctgcttcttattaatcatacaaactctcaccatgatgtgaagagtttcacaaatccttcaaaataaaaagtaatgacttagaaactgccttcctgggtgatttgcatgtgtcttagtcttagtcaccttattatcctgacacaaaaacacatgagcatacatgtctacacatgactacacaaatgcaaacctttgcaaacacattatgcttttgcacacacacacctgtacacacacaccggcatgtttatacacagggagtgtatggttcctgtaagcactaagttagctgttttcatttaatgacctgtggtttaacccttttgatcactaccaccattatcagcaccagactgagcagctatatccttttattaatcatggtcattcattcattcattcattcacaaaatatttatgatgtatttactctgcaccaggtcccatgccaagcactggggacacagttatggcaaagtagacaaagcatttgttcatttggagcttagagtccaggaggaatacattagataatgacacaatcaaatataaattgcaagatgtcacaggtgtgatgaagggagagtaggagagaccatgagtatgtgtaacaggaggacacagcattattctagtgctgtactgttccgtacggcagccactacccacatgtaactttttaagatttaaatttaaattagttaacattcaaaacgcagctccccaatcacactagcaacatttcaagtgcttgagagccatgcatgattagtggttaccctattgaataggtcagaagtagaatcttttcatcatcacagaaagttctattggacagtgctcttctagatcatcataagactacagagcacttttcaaagctcatgcatgttcatcatgttagtgtcgtattttgagctggggttttgagactccccttagagatagagaaacagacccaagaaatgtgctcaattgcaatgggccacatacctagatctccagatgtcatttcccctctcttattttaagttatgttaagattactaaaacaataaaagctcctaaaaaatcaagttgcctgtctctaaacccctccacattcccgcggtccttcagactgcccggagagcgcgctctgcctgccgcctgcctgcctgccactgagggttcccagcaccatgagggcctggatcttctttctcctttgcctggccgggagggccttggcagcccctcagcaagaagccctgcctgatgagacagaggtggtggaagaaactgtggcagaggtgactgaggtatctgtgggagctaatcctgtccaggtggaagtaggagaatttgatgatggtgcagaggaaaccgaagaggaggtggtggcggaaaatccctgccagaaccaccactgcaaacacggcaaggtgtgcgagctggatgagaacaacacccccatgtgcgtgtgccaggaccccaccagctgcccagcccccattggcgagtttgagaaggtgtgcagcaatgacaacaagaccttcgactcttcctgccacttctttgccacaaagtgcaccctggagggcaccaagaagggccacaagctccacctggactacatcgggccttgcaaatacatccccccttgcctggactctgagctgaccgaattccccctgcgcatgcgggactggctcaagaacgtcctggtcaccctgtatgagagggatgaggacaacaaccttctgactgagaagcagaagctgcgggtgaagaagatccatgagaatgagaagcgcctggaggcaggagaccaccccgtggagctgctggcccgggacttcgagaagaactataacatgtacatcttccctgtacactggcagttcggccagctggaccagcaccccattgacgggtacctctcccacaccgagctggctccactgcgtgctcccctcatccccatggagcattgcaccacccgctttttcgagacctgtgacctggacaatgacaagtacatcgccctggatgagtgggccggctgcttcggcatcaagcagaaggatatcgacaaggatcttgtgatctaaatccactccttccacagtaccggattctctctttaaccctccccttcgtgtttcccccaatgtttaaaatgtttggatggtttgttgttctgcctggagacaaggtgctaacatagatttaagtgaatacattaacggtgctaaaaatgaaaattctaacccaagacatgacattcttagctgtaacttaactattaaggccttttccacacgcattaatagtcccatttttctcttgccatttgtagctttgcccattgtcttattggcacatgggtggacacggatctgctgggctctgccttaaacacacattgcagcttcaacttttctctttagtgttctgtttgaaactaatacttaccgagtcagactttgtgttcatttcatttcagggtcttggctgcctgtgggcttccccaggtggcctggaggtgggcaaagggaagtaacagacacacgatgttgtcaaggatggttttgggactagaggctcagtggtgggagagatccctgcagaacccaccaaccagaacgtggtttgcctgaggctgtaactgagagaaagattctggggctgtgttatgaaaatatagacattctcacataagcccagttcatcaccatttcctcctttacctttcagtgcagtttcttttcacattaggctgttggttcaaacttttgggagcacggactgtcagttctctgggaagtggtcagcgcatcctgcagggcttctcctcctctgtcttttggagaaccagggctcttctcaggggctctagggactgccaggctgtttcagccaggaaggccaaaatcaagagtgagatgtagaaagttgtaaaatagaaaaagtggagttggtgaatcggttgttctttcctcacatttggatgattgtcataaggtttttagcatgttcctccttttcttcaccctccccttttttcttctattaatcaagagaaacttcaaagttaatgggatggtcggatctcacaggctgagaactcgttcacctccaagcatttcatgaaaaagctgcttcttattaatcatacaaactctcaccatgatgtgaagagtttcacaaatccttcaaaataaaaagtaatgacttagaaactgccttcctgggtgatttgcatgtgtcttagtcttagtcaccttattatcctgacacaaaaacacatgagcatacatgtctacacatgactacacaaatgcaaacctttgcaaacacattatgcttttgcacacacacacctgtacacacacaccggcatgtttatacacagggagtgtatggttcctgtaagcactaagttagctgttttcatttaatgacctgtggtttaacccttttgatcactaccaccattatcagcaccagactgagcagctatatccttttattaatcatggtcattcattcattcattcattcacaaaatatttatgatgtatttactctgcaccaggtcccatgccaagcactggggacacagttatggcaaagtagacaaagcatttgttcatttggagcttagagtccaggaggaatacattagataatgacacaatcaaatataaattgcaagatgtcacaggtgtgatgaagggagagtaggagagaccatgagtatgtgtaacaggaggacacagcattattctagtgctgtactgttccgtacggcagccactacccacatgtaactttttaagatttaaatttaaattagttaacattcaaaacgcagctccccaatcacactagcaacatttcaagtgcttgagagccatgcatgattagtggttaccctattgaataggtcagaagtagaatcttttcatcatcacagaaagttctattggacagtgctcttctagatcatcataagactacagagcacttttcaaagctcatgcatgttcatcatgttagtgtcgtattttgagctggggttttgagactccccttagagatagagaaacagacccaagaaatgtgctcaattgcaatgggccacatacctagatctccagatgtcatttcccctctcttattttaagttatgttaagattactaaaacaataaaagctcctaaaaaatcaagttgcctgtctctaaacccctccacattcccgcggtccttcagactgcccggagagcgcgctctgcctgccgcctgcctgcctgccactgagggttcccagcaccatgagggcctggatcttctttctcctttgcctggccgggagggccttggcagcccctcagcaagaagccctgcctgatgagacagaggtggtggaagaaactgtggcagaggtgactgaggtatctgtgggagctaatcctgtccaggtggaagtaggagaatttgatgatggtgcagaggaaaccgaagaggaggtggtggcggaaaatccctgccagaaccaccactgcaaacacggcaaggtgtgcgagctggatgagaacaacacccccatgtgcgtgtgccaggaccccaccagctgcccagcccccattggcgagtttgagaaggtgtgcagcaatgacaacaagaccttcgactcttcctgccacttctttgccacaaagtgcaccctggagggcaccaagaagggccacaagctccacctggactacatcgggccttgcaaatacatccccccttgcctggactctgagctgaccgaattccccctgcgcatgcgggactggctcaagaacgtcctggtcaccctgtatgagagggatgaggacaacaaccttctgactgagaagcagaagctgcgggtgaagaagatccatgagaatgagaagcgcctggaggcaggagaccaccccgtggagctgctggcccgggacttcgagaagaactataacatgtacatcttccctgtacactggcagttcggccagctggaccagcaccccattgacgggtacctctcccacaccgagctggctccactgcgtgctcccctcatccccatggagcattgcaccacccgctttttcgagacctgtgacctggacaatgacaagtacatcgccctggatgagtgggccggctgcttcggcatcaagcagaaggatatcgacaaggatcttgtgatctaaatccactccttccacagtaccggattctctctttaaccctccccttcgtgtttcccccaatgtttaaaatgtttggatggtttgttgttctgcctggagacaaggtgctaacatagatttaagtgaatacattaacggtgctaaaaatgaaaattctaacccaagacatgacattcttagctgtaacttaactattaaggccttttccacacgcattaatagtcccatttttctcttgccatttgtagctttgcccattgtcttattggcacatgggtggacacggatctgctgggctctgccttaaacacacattgcagcttcaacttttctctttagtgttctgtttgaaactaatacttaccgagtcagactttgtgttcatttcatttcagggtcttggctgcctgtgggcttccccaggtggcctggaggtgggcaaagggaagtaacagacacacgatgttgtcaaggatggttttgggactagaggctcagtggtgggagagatccctgcagaacccaccaaccagaacgtggtttgcctgaggctgtaactgagagaaagattctggggctgtgttatgaaaatatagacattctcacataagcccagttcatcaccatttcctcctttacctttcagtgcagtttcttttcacattaggctgttggttcaaacttttgggagcacggactgtcagttctctgggaagtggtcagcgcatcctgcagggcttctcctcctctgtcttttggagaaccagggctcttctcaggggctctagggactgccaggctgtttcagccaggaaggccaaaatcaagagtgagatgtagaaagttgtaaaatagaaaaagtggagttggtgaatcggttgttctttcctcacatttggatgattgtcataaggtttttagcatgttcctccttttcttcaccctccccttttttcttctattaatcaagagaaacttcaaagttaatgggatggtcggatctcacaggctgagaactcgttcacctccaagcatttcatgaaaaagctgcttcttattaatcatacaaactctcaccatgatgtgaagagtttcacaaatccttcaaaataaaaagtaatgacttagaaactgccttcctgggtgatttgcatgtgtcttagtcttagtcaccttattatcctgacacaaaaacacatgagcatacatgtctacacatgactacacaaatgcaaacctttgcaaacacattatgcttttgcacacacacacctgtacacacacaccggcatgtttatacacagggagtgtatggttcctgtaagcactaagttagctgttttcatttaatgacctgtggtttaacccttttgatcactaccaccattatcagcaccagactgagcagctatatccttttattaatcatggtcattcattcattcattcattcacaaaatatttatgatgtatttactctgcaccaggtcccatgccaagcactggggacacagttatggcaaagtagacaaagcatttgttcatttggagcttagagtccaggaggaatacattagataatgacacaatcaaatataaattgcaagatgtcacaggtgtgatgaagggagagtaggagagaccatgagtatgtgtaacaggaggacacagcattattctagtgctgtactgttccgtacggcagccactacccacatgtaactttttaagatttaaatttaaattagttaacattcaaaacgcagctccccaatcacactagcaacatttcaagtgcttgagagccatgcatgattagtggttaccctattgaataggtcagaagtagaatcttttcatcatcacagaaagttctattggacagtgctcttctagatcatcataagactacagagcacttttcaaagctcatgcatgttcatcatgttagtgtcgtattttgagctggggttttgagactccccttagagatagagaaacagacccaagaaatgtgctcaattgcaatgggccacatacctagatctccagatgtcatttcccctctcttattttaagttatgttaagattactaaaacaataaaagctcctaaaaaatcaagttgcctgtctctaaacccctccacattcccgcggtccttcagactgcccggagagcgcgctctgcctgccgcctgcctgcctgccactgagggttcccagcaccatgagggcctggatcttctttctcctttgcctggccgggagggccttggcagcccctcagcaagaagccctgcctgatgagacagaggtggtggaagaaactgtggcagaggtgactgaggtatctgtgggagctaatcctgtccaggtggaagtaggagaatttgatgatggtgcagaggaaaccgaagaggaggtggtggcggaaaatccctgccagaaccaccactgcaaacacggcaaggtgtgcgagctggatgagaacaacacccccatgtgcgtgtgccaggaccccaccagctgcccagcccccattggcgagtttgagaaggtgtgcagcaatgacaacaagaccttcgactcttcctgccacttctttgccacaaagtgcaccctggagggcaccaagaagggccacaagctccacctggactacatcgggccttgcaaatacatccccccttgcctggactctgagctgaccgaattccccctgcgcatgcgggactggctcaagaacgtcctggtcaccctgtatgagagggatgaggacaacaaccttctgactgagaagcagaagctgcgggtgaagaagatccatgagaatgagaagcgcctggaggcaggagaccaccccgtggagctgctggcccgggacttcgagaagaactataacatgtacatcttccctgtacactggcagttcggccagctggaccagcaccccattgacgggtacctctcccacaccgagctggctccactgcgtgctcccctcatccccatggagcattgcaccacccgctttttcgagacctgtgacctggacaatgacaagtacatcgccctggatgagtgggccggctgcttcggcatcaagcagaaggatatcgacaaggatcttgtgatctaaatccactccttccacagtaccggattctctctttaaccctccccttcgtgtttcccccaatgtttaaaatgtttggatggtttgttgttctgcctggagacaaggtgctaacatagatttaagtgaata

SEQ ID NO: 705 - DNA, 2410 bp, Homo sapiens
  misc_feature (26)..(26): second gene starts at position 26
atgagggcctggatcttctttctccctcccggccccccaggccccccagggcccccttcatttcctggccctcacaggcagactatcagcgttcccggccctccgggcccccctgggccccctgggccccctggaaccatgggcgcctcctcaggggtgaggctctgggctacacgccaggccatgctgggccaggtgcacgaggttcccgagggctggctcatcttcgtggccgagcaggaggagctctacgtccgcgtgcagaacgggttccggaaggtccagctggaggcccggacaccactcccacgagggacggacaatgaagtggccgccttgcagccccccgtggtgcagctgcacgacagcaacccctacccgcggcgggagcacccccaccccaccgcgcggccctggcgggcagatgacatcctggccagcccccctcgcctgcccgagccccagccctaccccggagccccgcaccacagctcctacgtgcacctgcggccggcgcgacccacaagcccacccgcccacagccaccgcgacttccagccggtgctccacctggttgcgctcaacagccccctgtcaggcggcatgcggggcatccgcggggccgacttccagtgcttccagcaggcgcgggccgtggggctggcgggcaccttccgcgccttcctgtcctcgcgcctgcaggacctgtacagcatcgtgcgccgtgccgaccgcgcagccgtgcccatcgtcaacctcaaggacgagctgctgtttcccagctgggaggctctgttctcaggctctgagggtccgctgaagcccggggcacgcatcttctcctttgacggcaaggacgtcctgaggcaccccacctggccccagaagagcgtgtggcatggctcggaccccaacgggcgcaggctgaccgagagctactgtgagacgtggcggacggaggctccctcggccacgggccaggcctcctcgctgctggggggcaggctcctggggcagagtgccgcgagctgccatcacgcctacatcgtgctctgcattgagaacagcttcatgactgcctccaagtagccaccgcctggatgcggatggccggagaggaccggcggctcggaggaagcccccaccgtgggcagggagcggccggccagcccctggccccaggacctggctgccatactttcctgtatagttcacgtttcatgtaatcctcaagaaataaaaggaagccaaagagtgtatttttttaaaagtttaaaacagaagcctgatgctgacattcacctgccccaactctcccctgacctgtgagcccagctgggtcaggcagggtgcagtatcatgccctgtgcaacctcttggcctgatcagaccacggctcgatttctccaggatttcctgctttgggaagccgtgctcgccccagcaggtgctgacttcatctcccacctagcagcaccgttctgtgcacaaaacccagacctgttagcagacaggccccgtgaggcaatgggagctgaggccacactcagcacaaggccatctgggctcctccagggtgtgtgctcgccctgcggtagatgggagggaggctcaggtccctggggctagggggagccccttctgctcagctctgggccattctccacagcaaccccaggctgaagcaggttcccaagctcagaggcgcactgtgacccccagctccggcctgtcctccaacaccaagcacagcagcctggggctggcctcccaaatgagccatgagatgatacatccaaagcagacagctccaccctggccgagtccaagctgggagattcaagggacccatgagttggggtctggcagcctcccatccagggcccccatctcatgcccctggctgggacgtggctcagccagcacttgtccagctgagcgccaggatggaacacggccacatcaaagaggctgaggctggcacaggacatgcggtagccagcacacagggcagtgagggagggctgtcatctgtgcactgcccatggacaggctggctccagatgcagggcagtcattggctgtctcctaggaaacccatatccttaccctccttgggactgaaggggaaccccggggtgcccacaggccgccctgcgggtgaacaaagcagccacgaggtgcaacaaggtcctctgtcagtcacagccacccctgagatccggcaacatcaacccgagtcattcgttctgtggagggacaagtggactcagggcagcgccaggctgaccacagcacagccaacacgcacctgcctcaggactgcgacgaaaccggtggggctggttctgtaattgtgtgtgatgtgaagccaattcagacaggcaaataaaagtgaccttttacactg

SEQ ID NO: 706 - DNA, 2411 bp, Homo sapiens
  misc_feature (26)..(26): second gene starts at position 26
atgagggcctggatcttctttctccctcccggccccccaggccccccagggcccccttcatttcctggccctcacaggcagactatcagcgttcccggccctccgggcccccctgggccccctgggccccctggaaccatgggcgcctcctcaggggtgaggctctgggctacacgccaggccatgctgggccaggtgcacgaggttcccgagggctggctcatcttcgtggccgagcaggaggagctctacgtccgcgtgcagaacgggttccggaaggtccagctggaggcccggacaccactcccacgagggacggacaatgaagtggccgccttgcagccccccgtggtgcagctgcacgacagcaacccctacccgcggcgggagcacccccaccccaccgcgcggccctggcgggcagatgacatcctggccagcccccctcgcctgcccgagccccagccctaccccggagccccgcaccacagctcctacgtgcacctgcggccggcgcgacccacaagcccacccgcccacagccaccgcgacttccagccggtgctccacctggttgcgctcaacagccccctgtcaggcggcatgcggggcatccgcggggccgacttccagtgcttccagcaggcgcgggccgtggggctggcgggcaccttccgcgccttcctgtcctcgcgcctgcaggacctgtacagcatcgtgcgccgtgccgaccgcgcagccgtgcccatcgtcaacctcaaggacgagctgctgtttcccagctgggaggctctgttctcaggctctgagggtccgctgaagcccggggcacgcatcttctcctttgacggcaaggacgtcctgaggcaccccacctggccccagaagagcgtgtggcatggctcggaccccaacgggcgcaggctgaccgagagctactgtgagacgtggcggacggaggctccctcggccacgggccaggcctcctcgctgctggggggcaggctcctggggcagagtgccgcgagctgccatcacgcctacatcgtgctctgcattgagaacagcttcatgactgcctccaagtagccaccgcctggatgcggatggccggagaggaccggcggctcggaggaagcccccaccgtgggcagggagcggccggccagcccctggccccaggacctggctgccatactttcctgtatagttcacgtttcatgtaatcctcaagaaataaaaggaagccaaagagtgtatttttttaaaagtttaaaacagaagcctgatgctgacattcacctgccccaactctcccctgacctgtgagcccagctgggtcaggcagggtgcagtatcatgccctgtgcaacctcttggcctgatcagaccacggctcgatttctccaggatttcctgctttgggaagccgtgctcgccccagcaggtgctgacttcatctcccacctagcagcaccgttctgtgcacaaaacccagacctgttagcagacaggccccgtgaggcaatgggagctgaggccacactcagcacaaggccatctgggctcctccagggtgtgtgctcgccctgcggtagatgggagggaggctcaggtccctggggctagggggagccccttctgctcagctctgggccattctccacagcaaccccaggctgaagcaggttcccaagctcagaggcgcactgtgacccccagctccggcctgtcctccaacaccaagcacagcagcctggggctggcctcccaaatgagccatgagatgatacatccaaagcagacagctccaccctggccgagtccaagctgggagattcaagggacccatgagttggggtctggcagcctcccatccagggcccccatctcatgcccctggctgggacgtggctcagccagcacttgtccagctgagcgccaggatggaacacggccacatcaaagaggctgaggctggcacaggacatgcggtagccagcacacagggcagtgagggagggctgtcatctgtgcactgcccatggacaggctggctccagatgcagggcagtcattggctgtctcctaggaaacccatatccttaccctccttgggactgaaggggaaccccggggtgcccacaggccgccctgcgggtgaacaaagcagccacgaggtgcaacaaggtcctctgtcagtcacagccacccctgagatccggcaacatcaacccgagtcattcgttctgtggagggacaagtggactcagggcagcgccaggctgaccacagcacagccaacacgcacctgcctcaggactgcgacgaaaccggtggggctggttctgtaattgtgtgtgatgtgaagccaattcagacaggcaaataaaagtgaccttttacactga

SEQ ID NO: 707 - DNA, 2411 bp, Homo sapiens; identical to SEQ ID NO: 706
  misc_feature (26)..(26): second gene starts at position 26

SEQ ID NO: 708 - DNA, 32765 bp, Homo sapiens; identical to SEQ ID NO: 702
  misc_feature (194)..(194): second gene starts at position 194

SEQ ID NO: 709 - DNA, 32765 bp, Homo sapiens; identical to SEQ ID NO: 703
  misc_feature (949)..(949): second gene starts at position 949

SEQ ID NO: 710 - DNA, 32765 bp, Homo sapiens; identical to SEQ ID NO: 703
  misc_feature (949)..(949): second gene starts at position 949

SEQ ID NO: 711 - DNA, 32765 bp, Homo sapiens; identical to SEQ ID NO: 702
  misc_feature (194)..(194): second gene starts at position 194

SEQ ID NO: 712 - DNA, 32765 bp, Homo sapiens; identical to SEQ ID NO: 703
  misc_feature (949)..(949): second gene starts at position 949

SEQ ID NO: 713 - DNA, 32765 bp, Homo sapiens; identical to SEQ ID NO: 704
  misc_feature (489)..(489): second gene starts at position 489

SEQ ID NO: 714 - DNA, 32765 bp, Homo sapiens
  misc_feature (679)..(679): second gene starts at position 679
atggcggacggcgtggaccacatagacatttacgcggatgtcggcgaagagttcaaccaggaagctgaatatggtgggcatgatcagatagatttgtatgacgatgtcatatctccatctgcaaataatggagatgccccagaagaccgagattacatggatactctcccaccaactgttggtgatgatgtgggtaaaggagcagcaccaaatgttgtctatacatatactggaaagagaattgcattatatattggaaatctaacatggtggacaacagatgaagacttaactgaagcagttcattctttgggagtaaatgatattttggagataaaattttttgaaaatcgggcaaatggccagtcaaaggggtttgcccttgttggtgttggatctgaagcatcttcaaaaaagttaatggatctgttacctaaaagagaacttcatggtcagaatcctgttgtaactccatgcaataaacagttcctgagtcaatttgaaatgcagtccaggaaaactacacaatcaggacaaatgtctggggaaggtaaagctggtcctccaggaggcagttcccgtgcagcatttccacaaggtggtagaggacggggccgttttccaggggctgttcctggtggggacagatttcctgggccagcaggaccaggagggccagtgaagttggtccccctggtccccctggccctgctggcgagaaaggatcccctggtgctgatggtcctgctggtgctcctggtactcccgggcctcaaggtattgctggacagcgtggtgtggtcggcctgcctggtcagagaggagagagaggcttccctggtcttcctggcccctctggtgaacctggcaaacaaggtccctctggagcaagtggtgaacgtggtccccctggtcccatgggcccccctggattggctggaccccctggtgaatctggacgtgagggggctcctggtgccgaaggttcccctggacgagacggttctcctggcgccaagggtgaccgtggtgagaccggccccgctggaccccctggtgctcctggtgctcctggtgcccctggccccgttggccctgctggcaagagtggtgatcgtggtgagactggtcctgctggtcccaccggtcctgtcggccctgttggcgcccgtggccccgccggaccccaaggcccccgtggtgacaagggtgagacaggcgaacagggcgacagaggcataaagggtcaccgtggcttctctggcctccagggtccccctggccctcctggctctcctggtgaacaaggtccctctggagcctctggtcctgctggtccccgaggtccccctggctctgctggtgctcctggcaaagatggactcaacggtctccctggccccattgggccccctggtcctcgcggtcgcactggtgatgctggtcctgttggtccccccggccctcctggacctcctggtccccctggtcctcccagcgctggtttcgacttcagcttcctgccccagccacctcaagagaaggctcacgatggtggccgctactaccgggctgatgatgccaatgtggttcgtgaccgtgacctcgaggtggacaccaccctcaagagcctgagccagcagatcgagaacatccggagcccagagggcagccgcaagaaccccgcccgcacctgccgtgacctcaagatgtgccactctgactggaagagtggagagtactggattgaccccaaccaaggctgcaacctggatgccatcaaagtcttctgcaacatggagactggtgagacctgcgtgtaccccactcagcccagtgtggcccagaagaactggtacatcagcaagaaccccaaggacaagaggcatgtctggttcggcgagagcatgaccgatggattccagttcgagtatggcggccagggctccgaccctgccgatgtggccatccagctgaccttcctgcgcctgatgtccaccgaggcctcccagaacatcacctaccactgcaagaacagcgtggcctacatggaccagcagactggcaacctcaagaaggccctgctcctccagggctccaacgagatcgagatccgcgccgagggcaacagccgcttcacctacagcgtcactgtcgatggctgcacgagtcacaccggagcctggggcaagacagtgattgaatacaaaaccaccaagacctcccgcctgcccatcatcgatgtggcccccttggacgttggtgccccagaccaggaattcggcttcgacgttggccctgtctgcttcctgtaaactccctccatcccaacctggctccctcccacccaaccaactttccccccaacccggaaacagacaagcaacccaaactgaaccccctcaaaagccaaaaaatgggagacaatttcacatggactttggaaaatatttttttcctttgcattcatctctcaaacttagtttttatctttgaccaaccgaacatgaccaaaaaccaaaagtgcattcaaccttaccaaaaaaaaaaaaaaaaaaagaataaataaataactttttaaaaaaggaagcttggtccacttgcttgaagacccatgcgggggtaagtccctttctgcccgttgggcttatgaaaccccaatgctgccctttctgctcctttctccacaccccccttggggcctcccctccactccttcccaaatctgtctccccagaagacacaggaaacaatgtattgtctgcccagcaatcaaaggcaatgctcaaacacccaagtggcccccaccctcagcccgctcctgcccgcccagcacccccaggccctgggggacctggggttctcagactgccaaagaagccttgccatctggcgctcccatggctcttgcaacatctccccttcgtttttgagggggtcatgccgggggagccaccagcccctcactgggttcggaggagagtcaggaagggccacgacaaagcagaaacatcggatttggggaacgcgtgtcaatcccttgtgccgcagggctgggcgggagagactgttctgttccttgtgtaactgtgttgctgaaagactacctcgttcttgtcttgatgtgtcaccggggcaactgcctgggggcggggatgggggcagggtggaagcggctccccattttataccaaaggtgctacatctatgtgatgggtggggtggggagggaatcactggtgctatagaaattgagatgcccccccaggccagcaaatgttcctttttgttcaaagtctatttttattccttgatatttttctttttttttttttttttttgtggatggggacttgtgaatttttctaaaggtgctatttaacatgggaggagagcgtgtgcggctccagcccagcccgctgctcactttccaccctctctccacctgcctctggcttctcaggcctctgctctccgacctctctcctctgaaaccctcctccacagctgcagcccatcctcccggctccctcctagtctgtcctgcgtcctctgtccccgggtttcagagacaacttcccaaagcacaaagcagtttttccccctaggggtgggaggaagcaaaagactctgtacctattttgtatgtgtataataatttgagatgtttttaattattttgattgctggaataaagcatgtggaaatgacccaaacataatcgtcggagcagacgggagtttctcctcggggtcggagcaggaggcacgcggagtgtgaggccacgcatgagcggacgctaaccccctccccagccacaaagagtctacatgtctagggtctagacatgttcagctttgtggacctccggctcctgctcctcttagcggccaccgccctcctgacgcacggccaagaggaaggccaagtcgagggccaagacgaagacatcccaccaatcacctgcgtacagaacggcctcaggtaccatgaccgagacgtgtggaaacccgagccctgccggatctgcgtctgcgacaacggcaaggtgttgtgcgatgacgtgatctgtgacgagaccaagaactgccccggcgccgaagtccccgagggcgagtgctgtcccgtctgccccgacggctcagagtcacccaccgaccaagaaaccaccggcgtcgagggacccaagggagacactggcccccgaggcccaaggggacccgcaggcccccctggccgagatggcatccctggacagcctggacttcccggaccccccggaccccccggacctcccggaccccctggcctcggaggaaactttgctccccagctgtcttatggctatgatgagaaatcaaccggaggaatttccgtgcctggccccatgggtccctctggtcctcgtggtctccctggcccccctggtgcacctggtccccaaggcttccaaggtccccctggtgagcctggcgagcctggagcttcaggtcccatgggtccccgaggtcccccaggtccccctggaaagaatggagatgatggggaagctggaaaacctggtcgtcctggtgagcgtgggcctcctgggcctcagggtgctcgaggattgcccggaacagctggcctccctggaatgaagggacacagaggtttcagtggtttggatggtgccaagggagatgctggtcctgctggtcctaagggtgagcctggcagccctggtgaaaatggagctcctggtcagatgggcccccgtggcctgcctggtgagagaggtcgccctggagcccctggccctgctggtgctcgtggaaatgatggtgctactggtgctgccgggccccctggtcccaccggccccgctggtcctcctggcttccctggtgctgttggtgctaagggtgaagctggtccccaagggccccgaggctctgaaggtccccagggtgtgcgtggtgagcctggcccccctggccctgctggtgctgctggccctgctggaaaccctggtgctgatggacagcctggtgctaaaggtgccaatggtgctcctggtattgctggtgctcctggcttccctggtgcccgaggcccctctggaccccagggccccggcggccctcctggtcccaagggtaacagcggtgaacctggtgctcctggcagcaaaggagacactggtgctaagggagagcctggccctgttggtgttcaaggaccccctggccctgctggagaggaaggaaagcgaggagctcgaggtgaacccggacccactggcctgcccggaccccctggcgagcgtggtggacctggtagccgtggtttccctggcgcagatggtgttgctggtcccaagggtcccgctggtgaacgtggttctcctggccctgctggccccaaaggatctcctggtgaagctggtcgtcccggtgaagctggtctgcctggtgccaagggtctgactggaagccctggcagccctggtcctgatggcaaaactggcccccctggtcccgccggtcaagatggtcgccccggacccccaggcccacctggtgcccgtggtcaggctggtgtgatgggattccctggacctaaaggtgctgctggagagcccggcaaggctggagagcgaggtgttcccggaccccctggcgctgtcggtcctgctggcaaagatggagaggctggagctcagggaccccctggccctgctggtcccgctggcgagagaggtgaacaaggccctgctggctcccccggattccagggtctccctggtcctgctggtcctccaggtgaagcaggcaaacctggtgaacagggtgttcctggagaccttggcgcccctggcccctctggagcaagaggcgagagaggtttccctggcgagcgtggtgtgcaaggtccccctggtcctgctggtccccgaggggccaacggtgctcccggcaacgatggtgctaagggtgatgctggtgcccctggagctcccggtagccagggcgcccctggccttcagggaatgcctggtgaacgtggtgcagctggtcttccagggcctaagggtgacagaggtgatgctggtcccaaaggtgctgatggctctcctggcaaagatggcgtccgtggtctgactggccccattggtcctcctggccctgctggtgcccctggtgacaagggtgaaagtggtcccagcggccctgctggtcccactggagctcgtggtgcccccggagaccgtggtgagcctggtccccccggccctgctggctttgctggcccccctggtgctgacggccaacctggtgctaaaggcgaacctggtgatgctggtgctaaaggcgatgctggtccccctggccctgccggacccgctggaccccctggccccattggtaatgttggtgctcctggagccaaaggtgctcgcggcagcgctggtccccctggtgctactggtttccctggtgctgctggccgagtcggtcctcctggcccctctggaaatgctggaccccctggccctcctggtcctgctggcaaagaaggcggcaaaggtccccgtggtgagactggccctgctggacgtcctggtgaagttggtccccctggtccccctggccctgctggcgagaaaggatcccctggtgctgatggtcctgctggtgctcctggtactcccgggcctcaaggtattgctggacagcgtggtgtggtcggcctgcctggtcagagaggagagagaggcttccctggtcttcctggcccctctggtgaacctggcaaacaaggtccctctggagcaagtggtgaacgtggtccccctggtcccatgggcccccctggattggctggaccccctggtgaatctggacgtgagggggctcctggtgccgaaggttcccctggacgagacggttctcctggcgccaagggtgaccgtggtgagaccggccccgctggaccccctggtgctcctggtgctcctggtgcccctggccccgttggccctgctggcaagagtggtgatcgtggtgagactggtcctgctggtcccaccggtcctgtcggccctgttggcgcccgtggccccgccggaccccaaggcccccgtggtgacaagggtgagacaggcgaacagggcgacagaggcataaagggtcaccgtggcttctctggcctccagggtccccctggccctcctggctctcctggtgaacaaggtccctctggagcctctggtcctgctggtccccgaggtccccctggctctgctggtgctcctggcaaagatggactcaacggtctccctggccccattgggccccctggtcctcgcggtcgcactggtgatgctggtcctgttggtccccccggccctcctggacctcctggtccccctggtcctcccagcgctggtttcgacttcagcttcctgccccagccacctcaagagaaggctcacgatggtggccgctactaccgggctgatgatgccaatgtggttcgtgaccgtgacctcgaggtggacaccaccctcaagagcctgagccagcagatcgagaacatccggagcccagagggcagccgcaagaaccccgcccgcacctgccgtgacctcaagatgtgccactctgactggaagagtggagagtactggattgaccccaaccaaggctgcaacctggatgccatcaaagtcttctgcaacatggagactggtgagacctgcgtgtaccccactcagcccagtgtggcccagaagaactggtacatcagcaagaaccccaaggacaagaggcatgtctggttcggcgagagcatgaccgatggattccagttcgagtatggcggccagggctccgaccctgccgatgtggccatccagctgaccttcctgcgcctgatgtccaccgaggcctcccagaacatcacctaccactgcaagaacagcgtggcctacatggaccagcagactggcaacctcaagaaggccctgctcctccagggctccaacgagatcgagatccgcgccgagggcaacagccgcttcacctacagcgtcactgtcgatggctgcacgagtcacaccggagcctggggcaagacagtgattgaatacaaaaccaccaagacctcccgcctgcccatcatcgatgtggcccccttggacgttggtgccccagaccaggaattcggcttcgacgttggccctgtctgcttcctgtaaactccctccatcccaacctggctccctcccacccaaccaactttccccccaacccggaaacagacaagcaacccaaactgaaccccctcaaaagccaaaaaatgggagacaatttcacatggactttggaaaatatttttttcctttgcattcatctctcaaacttagtttttatctttgaccaaccgaacatgaccaaaaaccaaaagtgcattcaaccttaccaaaaaaaaaaaaaaaaaaagaataaataaataactttttaaaaaaggaagcttggtccacttgcttgaagacccatgcgggggtaagtccctttctgcccgttgggcttatgaaaccccaatgctgccctttctgctcctttctccacaccccccttggggcctcccctccactccttcccaaatctgtctccccagaagacacaggaaacaatgtattgtctgcccagcaatcaaaggcaatgctcaaacacccaagtggcccccaccctcagcccgctcctgcccgcccagcacccccaggccctgggggacctggggttctcagactgccaaagaagccttgccatctggcgctcccatggctcttgcaacatctccccttcgtttttgagggggtcatgccgggggagccaccagcccctcactgggttcggaggagagtcaggaagggccacgacaaagcagaaacatcggatttggggaacgcgtgtcaatcccttgtgccgcagggctgggcgggagagactgttctgttccttgtgtaactgtgttgctgaaagactacctcgttcttgtcttgatgtgtcaccggggcaactgcctgggggcggggatgggggcagggtggaagcggctccccattttataccaaaggtgctacatctatgtgatgggtggggtggggagggaatcactggtgctatagaaattgagatgcccccccaggccagcaaatgttcctttttgttcaaagtctatttttattccttgatatttttctttttttttttttttttttgtggatggggacttgtgaatttttctaaaggtgctatttaacatgggaggagagcgtgtgcggctccagcccagcccgctgctcactttccaccctctctccacctgcctctggcttctcaggcctctgctctccgacctctctcctctgaaaccctcctccacagctgcagcccatcctcccggctccctcctagtctgtcctgcgtcctctgtccccgggtttcagagacaacttcccaaagcacaaagcagtttttccccctaggggtgggaggaagcaaaagactctgtacctattttgtatgtgtataataatttgagatgtttttaattattttgattgctggaataaagcatgtggaaatgacccaaacataatcgtcggagcagacgggagtttctcctcggggtcggagcaggaggcacgcggagtgtgaggccacgcatgagcggacgctaaccccctccccagccacaaagagtctacatgtctagggtctagacatgttcagctttgtggacctccggctcctgctcctcttagcggccaccgccctcctgacgcacggccaagaggaaggccaagtcgagggccaagacgaagacatcccaccaatcacctgcgtacagaacggcctcaggtaccatgaccgagacgtgtggaaacccgagccctgccggatctgcgtctgcgacaacggcaaggtgttgtgcgatgacgtgatctgtgacgagaccaagaactgccccggcgccgaagtccccgagggcgagtgctgtcccgtctgccccgacggctcagagtcacccaccgaccaagaaaccaccggcgtcgagggacccaagggagacactggcccccgaggcccaaggggacccgcaggcccccctggccgagatggcatccctggacagcctggacttcccggaccccccggaccccccggacctcccggaccccctggcctcggaggaaactttgctccccagctgtcttatggctatgatgagaaatcaaccggaggaatttccgtgcctggccccatgggtccctctggtcctcgtggtctccctggcccccctggtgcacctggtccccaaggcttccaaggtccccctggtgagcctggcgagcctggagcttcaggtcccatgggtccccgaggtcccccaggtccccctggaaagaatggagatgatggggaagctggaaaacctggtcgtcctggtgagcgtgggcctcctgggcctcagggtgctcgaggattgcccggaacagctggcctccctggaatgaagggacacagaggtttcagtggtttggatggtgccaagggagatgctggtcctgctggtcctaagggtgagcctggcagccctggtgaaaatggagctcctggtcagatgggcccccgtggcctgcctggtgagagaggtcgccctggagcccctggccctgctggtgctcgtggaaatgatggtgctactggtgctgccgggccccctggtcccaccggccccgctggtcctcctggcttccctggtgctgttggtgctaagggtgaagctggtccccaagggccccgaggctctgaaggtccccagggtgtgcgtggtgagcctggcccccctggccctgctggtgctgctggccctgctggaaaccctggtgctgatggacagcctggtgctaaaggtgccaatggtgctcctggtattgctggtgctcctggcttccctggtgcccgaggcccctctggaccccagggccccggcggccctcctggtcccaagggtaacagcggtgaacctggtgctcctggcagcaaaggagacactggtgctaagggagagcctggccctgttggtgttcaaggaccccctggccctgctggagaggaaggaaagcgaggagctcgaggtgaacccggacccactggcctgcccggaccccctggcgagcgtggtggacctggtagccgtggtttccctggcgcagatggtgttgctggtcccaagggtcccgctggtgaacgtggttctcctggccctgctggccccaaaggatctcctggtgaagctggtcgtcccggtgaagctggtctgcctggtgccaagggtctgactggaagccctggcagccctggtcctgatggcaaaactggcccccctggtcccgccggtcaagatggtcgccccggacccccaggcccacctggtgcccgtggtcaggctggtgtgatgggattccctggacctaaaggtgctgctggagagcccggcaaggctggagagcgaggtgttcccggaccccctggcgctgtcggtcctgctggcaaagatggagaggctggagctcagggaccccctggccctgctggtcccgctggcgagagaggtgaacaaggccctgctggctcccccggattccagggtctccctggtcctgctggtcctccaggtgaagcaggcaaacctggtgaacagggtgttcctggagaccttggcgcccctggcccctctggagcaagaggcgagagaggtttccctggcgagcgtggtgtgcaaggtccccctggtcctgctggtccccgaggggccaacggtgctcccggcaacgatggtgctaagggtgatgctggtgcccctggagctcccggtagccagggcgcccctggccttcagggaatgcctggtgaacgtggtgcagctggtcttccagggcctaagggtgacagaggtgatgctggtcccaaaggtgctgatggctctcctggcaaagatggcgtccgtggtctgactggccccattggtcctcctggccctgctggtgcccctggtgacaagggtgaaagtggtcccagcggccctgctggtcccactggagctcgtggtgcccccggagaccgtggtgagcctggtccccccggccctgctggctttgctggcccccctggtgctgacggccaacctggtgctaaaggcgaacctggtgatgctggtgctaaaggcgatgctggtccccctggccctgccggacccgctggaccccctggccccattggtaatgttggtgctcctggagccaaaggtgctcgcggcagcgctggtccccctggtgctactggtttccctggtgctgctggccgagtcggtcctcctggcccctctggaaatgctggaccccctggccctcctggtcctgctggcaaagaaggcggcaaaggtccccgtggtgagactggccctgctggacgtcctggtgaagttggtccccctggtccccctggccctgctggcgagaaaggatcccctggtgctgatggtcctgctggtgctcctggtactcccgggcctcaaggtattgctggacagcgtggtgtggtcggcctgcctggtcagagaggagagagaggcttccctggtcttcctggcccctctggtgaacctggcaaacaaggtccctctggagcaagtggtgaacgtggtccccctggtcccatgggcccccctggattggctggaccccctggtgaatctggacgtgagggggctcctggtgccgaaggttcccctggacgagacggttctcctggcgccaagggtgaccgtggtgagaccggccccgctggaccccctggtgctcctggtgctcctggtgcccctggccccgttggccctgctggcaagagtggtgatcgtggtgagactggtcctgctggtcccaccggtcctgtcggccctgttggcgcccgtggccccgccggaccccaaggcccccgtggtgacaagggtgagacaggcgaacagggcgacagaggcataaagggtcaccgtggcttctctggcctccagggtccccctggccctcctggctctcctggtgaacaaggtccctctggagcctctggtcctgctggtccccgaggtccccctggctctgctggtgctcctggcaaagatggactcaacggtctccctggccccattgggccccctggtcctcgcggtcgcactggtgatgctggtcctgttggtccccccggccctcctggacctcctggtccccctggtcctcccagcgctggtttcgacttcagcttcctgccccagccacctcaagagaaggctcacgatggtggccgctactaccgggctgatgatgccaatgtggttcgtgaccgtgacctcgaggtggacaccaccctcaagagcctgagccagcagatcgagaacatccggagcccagagggcagccgcaagaaccccgcccgcacctgccgtgacctcaagatgtgccactctgactggaagagtggagagtactggattgaccccaaccaaggctgcaacctggatgccatcaaagtcttctgcaacatggagactggtgagacctgcgtgtaccccactcagcccagtgtggcccagaagaactggtacatcagcaagaaccccaaggacaagaggcatgtctggttcggcgagagcatgaccgatggattccagttcgagtatggcggccagggctccgaccctgccgatgtggccatccagctgaccttcctgcgcctgatgtccaccgaggcctcccagaacatcacctaccactgcaagaacagcgtggcctacatggaccagcagactggcaacctcaagaaggccctgctcctccagggctccaacgagatcgagatccgcgccgagggcaacagccgcttcacctacagcgtcactgtcgatggctgcacgagtcacaccggagcctggggcaagacagtgattgaatacaaaaccaccaagacctcccgcctgcccatcatcgatgtggcccccttggacgttggtgccccagaccaggaattcggcttcgacgttggccctgtctgcttcctgtaaactccctccatcccaacctggctccctcccacccaaccaactttccccccaacccggaaacagacaagcaacccaaactgaaccccctcaaaagccaaaaaatgggagacaatttcacatggactttggaaaatatttttttcctttgcattcatctctcaaacttagtttttatctttgaccaaccgaacatgaccaaaaaccaaaagtgcattcaaccttaccaaaaaaaaaaaaaaaaaaagaataaataaataactttttaaaaaaggaagcttggtccacttgcttgaagacccatgcgggggtaagtccctttctgcccgttgggcttatgaaaccccaatgctgccctttctgctcctttctccacaccccccttggggcctcccctccactccttcccaaatctgtctccccagaagacacaggaaacaatgtattgtctgcccagcaatcaaaggcaatgctcaaacacccaagtggcccccaccctcagcccgctcctgcccgcccagcacccccaggccctgggggacctggggttctcagactgccaaagaagccttgccatctggcgctcccatggctcttgcaacatctccccttcgtttttgagggggtcatgccgggggagccaccagcccctcactgggttcggaggagagtcaggaagggccacgacaaagcagaaacatcggatttggggaacgcgtgtcaatcccttgtgccgcagggctgggcgggagagactgttctgttccttgtgtaactgtgttgctgaaagactacctcgttcttgtcttgatgtgtcaccggggcaactgcctgggggcggggatgggggcagggtggaagcggctccccattttataccaaaggtgctacatctatgtgatgggtggggtggggagggaatcactggtgctatagaaattgagatgcccccccaggccagcaaatgttcctttttgttcaaagtctatttttattccttgatatttttctttttttttttttttttttgtggatggggacttgtgaatttttctaaaggtgctatttaacatgggaggagagcgtgtgcggctccagcccagcccgctgctcactttccaccctctctccacctgcctctggcttctcaggcctctgctctccgacctctctcctctgaaaccctcctccacagctgcagcccatcctcccggctccctcctagtctgtcctgcgtcctctgtccccgggtttcagagacaacttcccaaagcacaaagcagtttttccccctaggggtgggaggaagcaaaagactctgtacctattttgtatgtgtataataatttgagatgtttttaattattttgattgctggaataaagcatgtggaaatgacccaaacataatcgtcggagcagacgggagtttctcctcggggtcggagcaggaggcacgcggagtgtgaggccacgcatgagcggacgctaaccccctccccagccacaaagagtctacatgtctagggtctagacatgttcagctttgtggacctccggctcctgctcctcttagcggccaccgccctcctgacgcacggccaagaggaaggccaagtcgagggccaagacgaagacatcccaccaatcacctgcgtacagaacggcctcaggtaccatgaccgagacgtgtggaaacccgagccctgccggatctgcgtctgcgacaacggcaaggtgttgtgcgatgacgtgatctgtgacgagaccaagaactgccccggcgccgaagtccccgagggcgagtgctgtcccgtctgccccgacggctcagagtcacccaccgaccaagaaaccaccggcgtcgagggacccaagggagacactggcccccgaggcccaaggggacccgcaggcccccctggccgagatggcatccctggacagcctggacttcccggaccccccggaccccccggacctcccggaccccctggcctcggaggaaactttgctccccagctgtcttatggctatgatgagaaatcaaccggaggaatttccgtgcctggccccatgggtccctctggtcctcgtggtctccctggcccccctggtgcacctggtccccaaggcttccaaggtccccctggtgagcctggcgagcctggagcttcaggtcccatgggtccccgaggtcccccaggtccccctggaaagaatggagatgatggggaagctggaaaacctggtcgtcctggtgagcgtgggcctcctgggcctcagggtgctcgaggattgcccggaacagctggcctccctggaatgaagggacacagaggtttcagtggtttggatggtgccaagggagatgctggtcctgctggtcctaagggtgagcctggcagccctggtgaaaatggagctcctggtcagatgggcccccgtggcctgcctggtgagagaggtcgccctggagcccctggccctgctggtgctcgtggaaatgatggtgctactggtgctgccgggccccctggtcccaccggccccgctggtcctcctggcttccctggtgctgttggtgctaagggtgaagctggtccccaagggccccgaggctctgaaggtccccagggtgtgcgtggtgagcctggcccccctggccctgctggtgctgctggccctgctggaaaccctggtgctgatggacagcctggtgctaaaggtgccaatggtgctcctggtattgctggtgctcctggcttccctggtgcccgaggcccctctggaccccagggccccggcggccctcctggtcccaagggtaacagcggtgaacctggtgctcctggcagcaaaggagacactggtgctaagggagagcctggccctgttggtgttcaaggaccccctggccctgctggagaggaaggaaagcgaggagctcgaggtgaacccggacccactggcctgcccggaccccctggcgagcgtggtggacctggtagccgtggtttccctggcgcagatggtgttgctggtcccaagggtcccgctggtgaacgtggttctcctggccctgctggccccaaaggatctcctggtgaagctggtcgtcccggtgaagctggtctgcctggtgccaagggtctgactggaagccctggcagccctggtcctgatggcaaaactggcccccctggtcccgccggtcaagatggtcgccccggacccccaggcccacctggtgcccgtggtcaggctggtgtgatgggattccctggacctaaaggtgctgctggagagcccggcaaggctggagagcgaggtgttcccggaccccctggcgctgtcggtcctgctggcaaagatggagaggctggagctcagggaccccctggccctgctggtcccgctggcgagagaggtgaacaaggccctgctggctcccccggattccagggtctccctggtcctgctggtcctccaggtgaagcaggcaaacctggtgaacagggtgttcctggagaccttggcgcccctggcccctctggagcaagaggcgagagaggtttccctggcgagcgtggtgtgcaaggtccccctggtcctgctggtccccgaggggccaacggtgctcccggcaacgatggtgctaagggtgatgctggtgcccctggagctcccggtagccagggcgcccctggccttcagggaatgcctggtgaacgtggtgcagctggtcttccagggcctaagggtgacagaggtgatgctggtcccaaaggtgctgatggctctcctggcaaagatggcgtccgtggtctgactggccccattggtcctcctggccctgctggtgcccctggtgacaagggtgaaagtggtcccagcggccctgctggtcccactggagctcgtggtgcccccggagaccgtggtgagcctggtccccccggccctgctggctttgctggcccccctggtgctgacggccaacctggtgctaaaggcgaacctggtgatgctggtgctaaaggcgatgctggtccccctggccctgccggacccgctggaccccctggccccattggtaatgttggtgctcctggagccaaaggtgctcgcggcagcgctggtccccctggtgctactggtttccctggtgctgctggccgagtcggtcctcctggcccctctggaaatgctggaccccctggccctcctggtcctgctggcaaagaaggcggcaaaggtccccgtggtgagactggccctgctggacgtcctggtgaagttggtccccctggtccccctggccctgctggcgagaaaggatcccctggtgctgatggtcctgctggtgctcctggtactcccgggcctcaaggtattgctggacagcgtggtgtggtcggcctgcctggtcagagaggagagagaggcttccctggtcttcctggcccctctggtgaacctggcaaacaaggtccctctggagcaagtggtgaacgtggtccccctggtcccatgggcccccctggattggctggaccccctggtgaatctggacgtgagggggctcctggtgccgaaggttcccctggacgagacggttctcctggcgccaagggtgaccgtggtgagaccggccccgctggaccccctggtgctcctggtgctcctggtgcccctggccccgttggccctgctggcaagagtggtgatcgtggtgagactggtcctgctggtcccaccggtcctgtcggccctgttggcgcccgtggccccgccggaccccaaggcccccgtggtgacaagggtgagacaggcgaacagggcgacagaggcataaagggtcaccgtggcttctctggcctccagggtccccctggccctcctggctctcctggtgaacaaggtccctctggagcctctggtcctgctggtccccgaggtccccctggctctgctggtgctcctggcaaagatggactcaacggtctccctggccccattgggccccctggtcctcgcggtcgcactggtgatgctggtcctgttggtccccccggccctcctggacctcctggtccccctggtcctcccagcgctggtttcgacttcagcttcctgccccagccacctcaagagaaggctcacgatggtggccgctactaccgggctgatgatgccaatgtggttcgtgaccgtgacctcgaggtggacaccaccctcaagagcctgagccagcagatcgagaacatccggagcccagagggcagccgcaagaaccccgcccgcacctgccgtgacctcaagatgtgccactctgactggaagagtggagagtactggattgaccccaaccaaggctgcaacctggatgccatcaaagtcttctgcaacatggagactggtgagacctgcgtgtaccccactcagcccagtgtggcccagaagaactggtacatcagcaagaaccccaaggacaagaggcatgtctggttcggcgagagcatgaccgatggattccagttcgagtatggcggccagggctccgaccctgccgatgtggccatccagctgaccttcctgcgcctgatgtccaccgaggcctcccagaacatcacctaccactgcaagaacagcgtggcctacatggaccagcagactggcaacctcaagaaggccctgctcctccagggctccaacgagatcgagatccgcgccgagggcaacagccgcttcacctacagcgtcactgtcgatggctgcacgagtcacaccggagcctggggcaagacagtgattgaatacaaaaccaccaagacctcccgcctgcccatcatcgatgtggcccccttggacgttggtgccccagaccaggaattcggcttcgacgttggccctgtctgcttcctgtaaactccctccatcccaacctggctccctcccacccaaccaactttccccccaacccggaaacagacaagcaacccaaactgaaccccctcaaaagccaaaaaatgggagacaatttcacatggactttggaaaatatttttttcctttgcattcatctctcaaacttagtttttatctttgaccaaccgaacatgaccaaaaaccaaaagtgcattcaaccttaccaaaaaaaaaaaaaaaaaaagaataaataaataactttttaaaaaaggaagcttggtccacttgcttgaagacccatgcgggggtaagtccctttctgcccgttgggcttatgaaaccccaatgctgccctttctgctcctttctccacaccccccttggggcctcccctccactccttcccaaatctgtctccccagaagacacaggaaacaatgtattgtctgcccagcaatcaaaggcaatgctcaaacacccaagtggcccccaccctcagcccgctcctgcccgcccagcacccccaggccctgggggacctggggttctcagactgccaaagaagccttgccatctggcgctcccatggctcttgcaacatctccccttcgtttttgagggggtcatgccgggggagccaccagcccctcactgggttcggaggagagtcaggaagggccacgacaaagcagaaacatcggatttggggaacgcgtgtcaatcccttgtgccgcagggctgggcgggagagactgttctgttccttgtgtaactgtgttgctgaaagactacctcgttcttgtcttgatgtgtcaccggggcaactgcctgggggcggggatgggggcagggtggaagcggctccccattttataccaaaggtgctacatctatgtgatgggtggggtggggagggaatcactggtgctatagaaattgagatgcccccccaggccagcaaatgttcctttttgttcaaagtctatttttattccttgatatttttctttttttttttttttttttgtggatggggacttgtgaatttttctaaaggtgctatttaacatgggaggagagcgtgtgcggctccagcccagcccgctgctcactttccaccctctctccacctgcctctggcttctcaggcctctgctctccgacctctctcctctgaaaccctcctccacagctgcagcccatcctcccggctccctcctagtctgtcctgcgtcctctgtccccgggtttcagagacaacttcccaaagcacaaagcagtttttccccctaggggtgggaggaagcaaaagactctgtacctattttgtatgtgtataataatttgagatgtttttaattattttgattgctggaataaagcatgtggaaatgacccaaacataatcgtcggagcagacgggagtttctcctcggggtcggagcaggaggcacgcggagtgtgaggccacgcatgagcggacgctaaccccctccccagccacaaagagtctacatgtctagggtctagacatgttcagctttgtggacctccggctcctgctcctcttagcggccaccgccctcctgacgcacggccaagaggaaggccaagtcgagggccaagacgaagacatcccaccaatcacctgcgtacagaacggcctcaggtaccatgaccgagacgtgtggaaacccgagccctgccggatctgcgtctgcgacaacggcaaggtgttgtgcgatgacgtgatctgtgacgagaccaagaactgccccggcgccgaagtccccgagggcgagtgctgtcccgtctgccccgacggctcagagtcacccaccgaccaagaaaccaccggcgtcgagggacccaagggagacactggcccccgaggcccaaggggacccgcaggcccccctggccgagatggcatccctggacagcctggacttcccggaccccccggaccccccggacctcccggaccccctggcctcggaggaaactttgctccccagctgtcttatggctatgatgagaaatcaaccggaggaatttccgtgcctggccccatgggtccctctggtcctcgtggtctccctggcccccctggtgcacctggtccccaaggcttccaaggtccccctggtgagcctggcgagcctggagcttcaggtcccatgggtccccgaggtcccccaggtccccctggaaagaatggagatgatggggaagctggaaaacctggtcgtcctggtgagcgtgggcctcctgggcctcagggtgctcgaggattgcccggaacagctggcctccctggaatgaagggacacagaggtttcagtggtttggatggtgccaagggagatgctggtcctgctggtcctaagggtgagcctggcagccctggtgaaaatggagctcctggtcagatgggcccccgtggcctgcctggtgagagaggtcgccctggagcccctggccctgctggtgctcgtggaaatgatggtgctactggtgctgccgggccccctggtcccaccggccccgctggtcctcctggcttccctggtgctgttggtgctaagggtgaagctggtccccaagggccccgaggctctgaaggtccccagggtgtgcgtggtgagcctggcccccctggccctgctggtgctgctggccctgctggaaaccctggtgctgatggacagcctggtgctaaaggtgccaatggtgctcctggtattgctggtgctcctggcttccctggtgcccgaggcccctctggaccccagggccccggcggccctcctggtcccaagggtaacagcggtgaacctggtgctcctggcagcaaaggagacactggtgctaagggagagcctggccctgttggtgttcaaggaccccctggccctgctggagaggaaggaaagcgaggagctcgaggtgaacccggacccactggcctgcccggaccccctggcgagcgtggtggacctggtagccgtggtttccctggcgcagatggtgttgctggtcccaagggtcccgctggtgaacgtggttctcctggccctgctggccccaaaggatctcctggtgaagctggtcgtcccggtgaagctggtctgcctggtgccaagggtctgactggaagccctggcagccctggtcctgatggcaaaactggcccccctggtcccgccggtcaagatggtcgccccggacccccaggcccacctggtgcccgtggtcaggctggtgtgatgggattccctggacctaaaggtgctgctggagagcccggcaaggctggagagcgaggtgttcccggaccccctggcgctgtcggtcctgctggcaaagatggagaggctggagctcagggaccccctggccctgctggtcccgctggcgagagaggtgaacaaggccctgctggctcccccggattccagggtctccctggtcctgctggtcctccaggtgaagcaggcaaacctggtgaacagggtgttcctggagaccttggcgcccctggcccctctggagcaagaggcgagagaggtttccctggcgagcgtggtgtgcaaggtccccctggtcctgctggtccccgaggggccaacggtgctcccggcaacgatggtgctaagggtgatgctggtgcccctggagctcccggtagccagggcgcccctggccttcagggaatgcctggtgaacgtggtgcagctggtcttccagggcctaagggtgacagaggtgatgctggtcccaaaggtgctgatggctctcctggcaaagatggcgtccgtggtctgactggccccattggtcctcctggccctgctggtgcccctggtgacaagggtgaaagtggtcccagcggccctgctggtcccactggagctcgtggtgcccccggagaccgtggtgagcctggtccccccggccctgctggctttgctggcccccctggtgctgacggccaacctggtgctaaaggcgaacctggtgatgctggtgctaaaggcgatgctggtccccctggccctgccggacccgctggaccccctggccccattggtaatgttggtgctcctggagccaaaggtgctcgcggcagcgctggtccccctggtgctactggtttccctggtgctgctggccgagtcggtcctcctggcccctctggaaatgctggaccccctggccctcctggtcctgctggcaaagaaggcggcaaaggtccccgtggtgagactggccctgctggacgtcctggtgaagttggtccccctggtccccctggccctgctggcgagaaaggatcccctggtgctgatggtcctgctggtgctcctggtactcccgggcctcaaggtattgctggacagcgtggtgtggtcggcctgcctggtcagagaggagagagaggcttccctggtcttcctggcccctctggtgaacctggcaaacaaggtccctctggagcaagtggtgaacgtggtccccctggtcccatgggcccccctggattggctggaccccctggtgaatctggacgtgagggggctcctggtgccgaaggttcccctggacgagacggttctcctggcgccaagggtgaccgtggtgagaccggccccgctggaccccctggtgctcctggtgctcctggtgcccctggccccgttggccctgctggcaagagtggtgatcgtggtgagactggtcctgctggtcccaccggtcctgtcggccctgttggcgcccgtggccccgccggaccccaaggcccccgtggtgacaagggtgagacaggcgaacagggcgacagaggcataaagggtcaccgtggcttctctggcctccagggtccccctggccctcctggctctcctggtgaacaaggtccctctggagcctctggtcctgctggtccccgaggtccccctggctctgctggtgctcctggcaaagatggactcaacggtctccctggccccattgggccccctggtcctcgcggtcgcactggtgatgctggtcctgttggtccccccggccctcctggacctcctggtccccctggtcctcccagcgctggtttcgacttcagcttcctgccccagccacctcaagagaaggctcacgatggtggccgctactaccgggctgatgatgccaatgtggttcgtgaccgtgacctcgaggtggacaccaccctcaagagcctgagccagcagatcgagaacatccggagcccagagggcagccgcaagaaccccgcccgcacctgccgtgacctcaagatgtgccactctgactggaagagtggagagtactggattgaccccaaccaaggctgcaacctggatgccatcaaagtcttctgcaacatggagactggtgagacctgcgtgtaccccactcagcccagtgtggcccagaagaactggtacatcagcaagaaccccaaggacaagaggcatgtctggttcggcgagagcatgaccgatggattccagttcgagtatggcggccagggctccgaccctgccgatgtggccatccagctgaccttcctgcgcctgatgtccaccgaggcctcccagaacatcacctaccactgcaagaacagcgtggcctacatggaccagcagactggcaacctcaagaaggccctgctcctccagggctccaacgagatcgagatccgcgccgagggcaacagccgcttcacctacagcgtcactgtcgatggctgcacgagtcacaccggagcctggggcaagacagtgattgaatacaaaaccaccaagacctcccgcctgcccatcatcgatgtggcccccttggacgttggtgccccagaccaggaattcggcttcgacgttggccctgtctgcttcctgtaaactccctccatcccaacctggctccctcccacccaaccaactttccccccaacccggaaacagacaagcaacccaaactgaaccccctcaaaagccaaaaaatgggagacaatttcacatggactttggaaaatatttttttcctttgcattcatctctcaaacttagtttttatctttgaccaaccgaacatgaccaaaaaccaaaagtgcattcaaccttaccaaaaaaaaaaaaaaaaaaagaataaataaataactttttaaaaaaggaagcttggtccacttgcttgaagacccatgcgggggtaagtccctttctgcccgttgggcttatgaaaccccaatgctgccctttctgctcctttctccacaccccccttggggcctcccctccactccttcccaaatctgtctccccagaagacacaggaaacaatgtattgtctgcccagcaatcaaaggcaatgctcaaacacccaagtggcccccaccctcagcccgctcctgcccgcccagcacccccaggccctgggggacctggggttctcagactgccaaagaagccttgccatctggcgctcccatggctcttgcaacatctccccttcgtttttgagggggtcatgccgggggagccaccagcccctcactgggttcggaggagagtcaggaagggccacgacaaagcagaaacatcggatttggggaacgcgtgtcaatcccttgtgccgcagggctgggcgggagagactgttctgttccttgtgtaactgtgttgctgaaagactacctcgttcttgtcttgatgtgtcaccggggcaactgcctgggggcggggatgggggcagggtggaagcggctccccattttataccaaaggtgctacatctatgtgatgggtggggtggggagggaatcactggtgctatagaaattgagatgcccccccaggccagcaaatgttcctttttgttcaaagtctatttttattccttgatatttttctttttttttttttttttttgtggatggggacttgtgaatttttctaaaggtgctatttaacatgggaggagagcgtgtgcggctccagcccagcccgctgctcactttccaccctctctccacctgcctctggcttctcaggcctctgctctccgacctctctcctctgaaaccctcctccacagctgcagcccatcctcccggctccctcctagtctgtcctgcgtcctctgtccccgggtttcagagacaacttcccaaagcacaaagcagtttttccccctaggggtgggaggaagcaaaagactctgtacctattttgtatgtgtataataatttgagatgtttttaattattttgattgctggaataaagcatgtggaaatgacccaaacataatcgtcggagcagacgggagtttctcctcggggtcggagcaggaggcacgcggagtgtgaggccacgcatgagcggacgctaaccccctccccagccacaaagagtctacatgtctagggtctagacatgttcagctttgtggacctccggctcctgctcctcttagcggccaccgccctcctgacgcacggccaagaggaaggccaagtcgagggccaagacgaagacatcccaccaatcacctgcgtacagaacggcctcaggtaccatgaccgagacgtgtggaaacccgagccctgccggatctgcgtctgcgacaacggcaaggtgttgtgcgatgacgtgatctgtgacgagaccaagaactgccccggcgccgaagtccccgagggcgagtgctgtcccgtctgccccgacggctcagagtcacccaccgaccaagaaaccaccggcgtcgagggacccaagggagacactggcccccgaggcccaaggggacccgcaggcccccctggccgagatggcatccctggacagcctggacttcccggaccccccggaccccccggacctcccggaccccctggcctcggaggaaactttgctccccagctgtcttatggctatgatgagaaatcaaccggaggaatttccgtgcctggccccatgggtccctctggtcctcgtggtctccctggcccccctggtgcacctggtccccaaggcttccaaggtccccctggtgagcctggcgagcctggagcttcaggtcccatgggtccccgaggtcccccaggtccccctggaaagaatggagatgatggggaagctggaaaacctggtcgtcctggtgagcgtgggcctcctgggcctcagggtgctcgaggattgcccggaacagctggcctccctggaatgaagggacacagaggtttcagtggtttggatggtgccaagggagatgctggtcctgctggtcctaagggtgagcctggcagccctggtgaaaatggagctcctggtcagatgggcccccgtggcctgcctggtgagagaggtcgccctggagcccctggccctgctggtgctcgtggaaatgatggtgctactggtgctgccgggccccctggtcccaccggccccgctggtcctcctggcttccctggtgctgttggtgctaagggtgaagctggtccccaagggccccgaggctctgaaggtccccagggtgtgcgtggtgagcctggcccccctggccctgctggtgctgctggccctgctggaaaccctggtgctgatggacagcctggtgctaaaggtgccaatggtgctcctggtattgctggtgctcctggcttccctggtgcccgaggcccctctggaccccagggccccggcggccctcctggtcccaagggtaacagcggtgaacctggtgctcctggcagcaaaggagacactggtgctaagggagagcctggccctgttggtgttcaaggaccccctggccctgctggagaggaaggaaagcgaggagctcgaggtgaacccggacccactggcctgcccggaccccctggcgagcgtggtggacctggtagccgtggtttccctggcgcagatggtgttgctggtcccaagggtcccgctggtgaacgtggttctcctggccctgctggccccaaaggatctcctggtgaagctggtcgtcccggtgaagctggtctgcctggtgccaagggtctgactggaagccctggcagccctggtcctgatggcaaaactggcccccctggtcccgccggtcaagatggtcgccccggacccccaggcccacctggtgcccgtggtcaggctggtgtgatgggattccctggacctaaaggtgctgctggagagcccggcaaggctggagagcgaggtgttcccggaccccctggcgctgtcggtcctgctggcaaagatggagaggctggagctcagggaccccctggccctgctggtcccgctggcgagagaggtgaacaaggccctgctggctcccccggattccagggtctccctggtcctgctggtcctccaggtgaagcaggcaaacctggtgaacagggtgttcctggagaccttggcgcccctggcccctctggagcaagaggcgagagaggtttccctggcgagcgtggtgtgcaaggtccccctggtcctgctggtccccgaggggccaacggtgctcccggcaacgatggtgctaagggtgatgctggtgcccctggagctcccggtagccagggcgcccctggccttcagggaatgcctggtgaacgtggtgcagctggtcttccagggcctaagggtgacagaggtgatgctggtcccaaaggtgctgatggctctcctggcaaagatggcgtccgtggtctgactggccccattggtcctcctggccctgctggtgcccctggtgacaagggtgaaagtggtcccagcggccctgctggtcccactggagctcgtggtgcccccggagaccgtggtgagcctggtccccccggccctgctggctttgctggcccccctggtgctgacggccaacctggtgctaaaggcgaacctggtgatgctggtgctaaaggcgatgctggtccccctggccctgccggacccgctggaccccctggccccattggtaatgttggtgctcctggagccaaaggtgctcgcggcagcgctggtccccctggtgctactggtttccctggtgctgctggccgagtcggtcctcctggcccctctggaaatgctggaccccctggccctcctggtcctgctggcaaagaaggcggcaaaggtccccgtggtgagactggccctgctggacgtcctggtgaagttggtccccctggtccccctggccctgctggcgagaaaggatcccctggtgctgatggtcctgctggtgctcctggtactcccgggcctcaaggtattgctggacagcgtggtgtggtcggcctgcctggtcagagaggagagagaggcttccctggtcttcctggcccctctggtgaacctggcaaacaaggtccctctggagcaagtggtgaacgtggtccccctggtcccatgggcccccctggattggctggaccccctggtgaatctggacgtgagggggctcctggtgccgaaggttcccctggacgagacggttctcctggcgccaagggtgaccgtggtgagaccggccccgctggaccccctggtgctcctggtgctcctggtgcccctggccccgttggccctgctggcaagagtggtgatcgtggtgagactggtcctgctggtcccaccggtcctgtcggccctgttggcgcccgtggccccgccggaccccaaggcccccgtggtgacaagggtgagacaggcgaacagggcgacagaggcataaagggtcaccgtggcttctctggcctccagggtccccctggccctcctggctctcctggtgaacaaggtccctctggagcctctggtcctgctggtccccgaggtccccctggctctgctggtgctcctggcaaagatggactcaacggtctccctggccccattgggccccctggtcctcgcggtcgcactggtgatgctggtcctgttggtccccccggccctcctggacctcctggtccccctggtcctcccagcgctggtttcgacttcagcttcctgccccagccacctcaagagaaggctcacgatggtggccgctactaccgggctgatgatgccaatgtggttcgtgaccgtgacctcgaggtggacaccaccctcaagagcctgagccagcagatcgagaacatccggagcccagagggcagccgcaagaaccccgcccgcacctgccgtgacctcaagatgtgccactctgactggaagagtggagagtactggattgaccccaaccaaggctgcaacctggatgccatcaaagtcttctgcaacatggagactggtgagacctgcgtgtaccccactcagcccagtgtggcccagaagaactggtacatcagcaagaaccccaaggacaagaggcatgtctggttcggcgagagcatgaccgatggattccagttcgagtatggcggccagggctccgaccctgccgatgtggccatccagctgaccttcctgcgcctgatgtccaccgaggcctcccagaacatcacctaccactgcaagaacagcgtggcctacatggaccagcagactggcaacctcaagaaggccctgctcctccagggctccaacgagatcgagatccgcgccgagggcaacagccgcttcacctacagcgtcactgtcgatggctgcacgagtcacaccggagcctggggcaagacagtgattgaatacaaaaccaccaagacctcccgcctgcccatcatcgatgtggcccccttggacgttggtgccccagaccaggaattcggcttcgacgttggccctgtctgcttcctgtaaactccctccatcccaacctggctccctcccacccaaccaactttccccccaacccggaaacagacaagcaacccaaactgaaccccctcaaaagccaaaaaatgggagacaatttcacatggactttggaaaatatttttttcctttgcattcatctctcaaacttagtttttatctttgaccaaccgaacatgaccaaaaaccaaaagtgcattcaaccttaccaaaaaaaaaaaaaaaaaaagaataaataaataactttttaaaaaaggaagcttggtccacttgcttgaagacccatgcgggggtaagtccctttctgcccgttgggcttatgaaaccccaatgctgccctttctgctcctttctccacaccccccttggggcctcccctccactccttcccaaatctgtctccccagaagacacaggaaacaatgtattgtctgcccagcaatcaaaggcaatgctcaaacacccaagtggcccccaccctcagcccgctcctgcccgcccagcacccccaggccctgggggacctggggttctcagactgccaaagaagccttgccatctggcgctcccatggctcttgcaacatctccccttcgtttttgagggggtcatgccgggggagccaccagcccctcactgggttcggaggagagtcaggaagggccacgacaaagcagaaacatcggatttggggaacgcgtgtcaatcccttgtgccgcagggctgggcgggagagactgttctgttccttgtgtaactgtgttgctgaaagactacctcgttcttgtcttgatgtgtca

SEQ ID NO: 715 - DNA, 32765 bp, Homo sapiens; identical to SEQ ID NO: 714
  misc_feature (679)..(679): second gene starts at position 679

SEQ ID NO: 716 - DNA, 1076 bp, Homo sapiens
  misc_feature (758)..(758): second gene starts at position 758
atgtgtagcggcagtggccgccggcggagcagtctgagcccgacgatgaggccggggacgggagctgagcgtggaggcctcatgatggggcaccctggcatgcattatgccccaatgggaatgcaccctatgggtcagagagcgaatatgcctcctgtacctcatggaatgatgccgcagatgatgccccctatgggagggccaccaatgggacaaatgcctggaatgatgtcgtcagtaatgcctggaatgatgatgtctcatatgtctcaggcttccatgcagcctgccttaccgccaggagtaaatagtatggatgtagcagcaggtacagcatctggtgcaaaatcaatgtggactgaacataaatcacctgatggaaggacttactactacaacactgaaaccaaacagtctacctgggagaaaccagatgatcttaaaacacctgctgagcaactcttatctaaatgcccctggaaggaatacaaatcagattctggaaagccttactattataattctcaaacaaaagaatctcgctgggccaaacctaaagaacttgaggatcttgaaggataccagaataccattgttgctggaagtcttattacaaaatcaaacctgcatgcaatgatcaaagctgaagaaagcagtaagcaagaagagtgcaccacaacatcaacagccccagtccctacaacagaaattccgaccacaatgagcaccatggctgctgccgaagcagcagctgctggctgctgctgctaaagttccagcaaaaaagatcaccgccgcgagtaaaaaggctccagcccagaaggttcctgcccagaaagccacaggccagaaagcagcgcctgctccaaaagctcagaagggtcaaaaagctccagcccagaaagcacctgctccaaaggcatctggcaagaaagcataagtggcaatcataaaaagtaataaaggttctttttgacctgttgacaaatgtatttaagcctttggatttaaagcctgttgaggctggagttaggaggcagattgatagtaggattataataaacattaaataatca

SEQ ID NO: 717 - DNA, 1076 bp, Homo sapiens; identical to SEQ ID NO: 716
  misc_feature (758)..(758): second gene starts at position 758

SEQ ID NO: 718 - DNA, 3751 bp, Homo sapiens
  misc_feature (1432)..(1432): second gene starts at position 1432
atggacctaatgaacgggcaggcaagcagtgtcaatattgcagctactgcttctgagaaaagtagcagctctgaatccttaagtgacaaaggctctgaattgaagaaaagctttgatgctgtggtattcgatgttcttaaggttacaccagaagaatatgcgggtcagataacattaatggatgttccagtatttaaagctattcaaccagatgagctttcaagttgtggatggaataaaaaagaaaaatatagttctgcaccaaatgcagttgccttcacaagaagattcaatcatgtaagcttttgggttgttagagagattcttcatgctcaaacattaaaaattagagcagaagttttgagccactatattaaaactgctaagaaactgtatgagctgaataaccttcatgcacttatggcagtggtttctggcctacagagtgccccaattttcaggttgactaaaacatgggcgttattaagtcgaaaagacaaaactacctttgaaaaattagaatatgtaatgagtaaagaagataactacaaaagactcagagactatataagtagcttaaagatgacaccttgcattccctatttaggtatctatttgtcagatttaacatacatcgattcagcatacccatcaactggcagcattctagaaaatgagcaaagatcaaatttaatgaataatatccttcgaataatttctgatttacagcagtcttgtgaatatgatattcccatgttgcctcatgtccaaaaatatctcaactctgttcagtatatagaagaactacaaaaatttgtggaagacgataattacaagctttcattaaagatagaaccagggacaagcaccccacgttctgctgcttccagagaagatttagtaggtcctgaagtaggagcgtctccacagagtggacgaaaaagtgtggcagctgaaggagccttgctcccacagacaccgccatcccctcggaatctgattccacatggacataggaagtgccatagtttgggttataatttcattcataaaatgaacacagcagaatttaagagtgcaacgtttccaaatgcaggaccaagacatctgttagatgatagcgtcatggagccccatgcgccatctcgaggccaagctgaaagttctactctttctagtggaatatcaataggtagcagcgatggttctgaactaagtgaagagacctcatggcctgcttttgaaaggaacagattataccattctctcggcccggtgacaagagtggcacgaaatggctatcgaagtcacatgaaggccagcagttctgcagaatcagaagatttggcagtacatttatatccaggagctgttactattcaaggtgttctcaggagaaaaactttgttaaaagaaggcaaaaagcctacacctgtgactgtgatttccggggaacagagggcccgggctgcgacaaggcatcaggccgctgcctctgccgccctggcttgaccgggccccgctgtgaccagtgccagcgaggctactgtaatcgctacccggtgtgcgtggcctgccacccttgcttccagacctatgatgcggacctccgggagcaggccctgcgctttggtagactccgcaatgccaccgccagcctgtggtcagggcctgggctggaggaccgtggcctggcctcccggatcctagatgcaaagagtaagattgagcagatccgagcagttctcagcagccccgcagtcacagagcaggaggtggctcaggtggccagtgccatcctctccctcaggcgaactctccagggcctgcagctggatctgcccctggaggaggagacgttgtcccttccgagagacctggagagtcttgacagaagcttcaatggtctccttactatgtatcagaggaagagggagcagtttgaaaaaataagcagtgctgatccttcaggagccttccggatgctgagcacagcctacgagcagtcagcccaggctgctcagcaggtctccgacagctcgcgccttttggaccagctcagggacagccggagagaggcagagaggctggtgcggcaggcgggaggaggaggaggcaccggcagccccaagcttgtggccctgaggctggagatgtcttcgttgcctgacctgacacccaccttcaacaagctctgtggcaactccaggcagatggcttgcaccccaatatcatgccctggtgagctatgtccccaagacaatggcacagcctgtggctcccgctgcaggggtgtccttcccagggccggtggggccttcttgatggcggggcaggtggctgagcagctgcggggcttcaatgcccagctccagcggaccaggcagatgattagggcagccgaggaatctgcctcacagattcaatccagtgcccagcgcttggagacccaggtgagcgccagccgctcccagatggaggaagatgtcagacgcacacggctcctaatccagcaggtccgggacttcctaacagaccccgacactgatgcagccactatccaggaggtcagcgaggccgtgctggccctgtggctgcccacagactcagctactgttctgcagaagatgaatgagatccaggccattgcagccaggctccccaacgtggacttggtgctgtcccagaccaagcaggacattgcgcgtgcccgccggttgcaggctgaggctgaggaagccaggagccgagcccatgcagtggagggccaggtggaagatgtggttgggaacctgcggcaggggacagtggcactgcaggaagctcaggacaccatgcaaggcaccagccgctcccttcggcttatccaggacagggttgctgaggttcagcaggtactgcggccagcagaaaagctggtgacaagcatgaccaagcagctgggtgacttctggacacggatggaggagctccgccaccaagcccggcagcagggggcagaggcagtccaggcccagcagcttgcggaaggtgccagcgagcaggcattgagtgcccaagagggatttgagagaataaaacaaaagtatgctgagttgaaggaccggttgggtcagagttccatgctgggtgagcagggtgcccggatccagagtgtgaagacagaggcagaggagctgtttggggagaccatggagatgatggacaggatgaaagacatggagttggagctgctgcggggcagccaggccatcatgctgcgctcagcggacctgacaggactggagaagcgtgtggagcagatccgtgaccacatcaatgggcgcgtgctctactatgccacctgcaagtgatgctacagcttccagcccgttgccccactcatctgccgcctttgcttttggttgggggcagattgggttggaatgctttccatctccaggagactttcatgcagcctaaagtacagcctggaccacccctggtgtgtagctagtaagattaccctgagctgcagctgagcctgagccaatgggacagttacacttgacagacaaagatggtggagattggcatgccattgaaactaagagctctcaagtcaaggaagctgggctgggcagtatcccccgcctttagttctccactggggaggaatcctggaccaagcacaaaaacttaacaaaagtgatgtaaaaatgaaaagccaaataaaaatctttggaaaagagcctggaggttcaacgaggaa

SEQ ID NO: 719 - DNA, 3751 bp, Homo sapiens; identical to SEQ ID NO: 718
  misc_feature (1432)..(1432): second gene starts at position 1432

SEQ ID NO: 720 - DNA, 3751 bp, Homo sapiens; identical to SEQ ID NO: 718
  misc_feature (1432)..(1432): second gene starts at position 1432

SEQ ID NO: 721 - DNA, 6041 bp, Homo sapiens
  misc_feature (816)..(816): second gene starts at position 816
atgttcagctttgtggacctccggctcctgctcctcttagcggccaccgccctcctgacgcacggccaagaggaaggccaagtcgagggccaagacgaagacatcccaccaatcacctgcgtacagaacggcctcaggtaccatgaccgagacgtgtggaaacccgagccctgccggatctgcgtctgcgacaacggcaaggtgttgtgcgatgacgtgatctgtgacgagaccaagaactgccccggcgccgaagtccccgagggcgagtgctgtcccgtctgccccgacggctcagagtcacccaccgaccaagaaaccaccggcgtcgagggacccaagggagacactggcccccgaggcccaaggggacccgcaggcccccctggccgagatggcatccctggacagcctggacttcccggaccccccggaccccccggacctcccggaccccctggcctcggaggaaactttgctccccagctgtcttatggctatgatgagaaatcaaccggaggaatttccgtgcctggccccatgggtccctctggtcctcgtggtctccctggcccccctggtgcacctggtccccaaggcttccaaggtccccctggtgagcctggcgagcctggagcttcaggtcccatgggtccccgaggtcccccaggtccccctggaaagaatggagatgatggggaagctggaaaacctggtcgtcctggtgagcgtgggcctcctgggcctcagggtgctcgaggattgcccggaacagctggcctccctggaatgaagggacacagaggtttcagtggtttggatggtgccaagggagatgctggtcctgctggtcctaagggtgagcctggcagccctggtgaaaatggagctcctggtcagatgggcccccgtggcctgcctggtgagagaggtcgccctggagcccctggccctgctggtgctcgtggaaatgatggtgctactggtgctgccgggccccctggtcccaccggccccgctggtcctcctggcttccctggtgctgttggtgctaagggtgaagctggtccccaagggccccgaggctctgaaggtccccagggtgtgcgtggtgagcctggcccccctggccctgctggtgctgctggccctgctggaaaccctggtgctgatggacagcctggtgctaaaggtgccaatggtgctcctggtattgctggtgctcctggcttccctggtgcccgaggcccctctggaccccagggccccggcggccctcctggtcccaagggtaacagcggtgaacctggtgctcctggcagcaaaggagacactggtgctaagggagagcctggccctgttggtgttcaaggaccccctggccctgctggagaggaaggaaagcgaggagctcgaggtgaacccggacccactggcctgcccggaccccctggcgagcgtggtggacctggtagccgtggtttccctggcgcagatggtgttgctggtcccaagggtcccgctggtgaacgtggttctcctggccctgctggccccaaaggatctcctggtgaagctggtcgtcccggtgaagctggtctgcctggtgccaagggtctgactggaagccctggcagccctggtcctgatggcaaaactggcccccctggtcccgccggtcaagatggtcgccccggacccccaggcccacctggtgcccgtggtcaggctggtgtgatgggattccctggacctaaaggtgctgctggagagcccggcaaggctggagagcgaggtgttcccggaccccctggcgctgtcggtcctgctggcaaagatggagaggctggagctcagggaccccctggccctgctggtcccgctggcgagagaggtgaacaaggccctgctggctcccccggattccagggtctccctggtcctgctggtcctccaggtgaagcaggcaaacctggtgaacagggtgttcctggagaccttggcgcccctggcccctctggagcaagaggcgagagaggtttccctggcgagcgtggtgtgcaaggtccccctggtcctgctggtccccgaggggccaacggtgctcccggcaacgatggtgctaagggtgatgctggtgcccctggagctcccggtagccagggcgcccctggccttcagggaatgcctggtgaacgtggtgcagctggtcttccagggcctaagggtgacagaggtgatgctggtcccaaaggtgctgatggctctcctggcaaagatggcgtccgtggtctgactggccccattggtcctcctggccctgctggtgcccctggtgacaagggtgaaagtggtcccagcggccctgctggtcccactggagctcgtggtgcccccggagaccgtggtgagcctggtccccccggccctgctggctttgctggcccccctggtgctgacggccaacctggtgctaaaggcgaacctggtgatgctggtgctaaaggcgatgctggtccccctggccctgccggacccgctggaccccctggccccattggtaatgttggtgctcctggagccaaaggtgctcgcggcagcgctggtccccctggtgctactggtttccctggtgctgctggccgagtcggtcctcctggcccctctggaaatgctggaccccctggccctcctggtcctgctggcaaagaaggcggcaaaggtccccgtggtgagactggccctgctggacgtcctggtgaagttggtccccctggtccccctggccctgctggcgagaaaggatcccctggtgctgatggtcctgctggtgctcctggtactcccgggcctcaaggtattgctggacagcgtggtgtggtcggcctgcctggtcagagaggagagagaggcttccctggtcttcctggcccctctggtgaacctggcaaacaaggtccctctggagcaagtggtgaacgtggtccccctggtcccatgggcccccctggattggctggaccccctggtgaatctggacgtgagggggctcctggtgccgaaggttcccctggacgagacggttctcctggcgccaagggtgaccgtggtgagaccggccccgctggaccccctggtgctcctggtgctcctggtgcccctggccccgttggccctgctggcaagagtggtgatcgtggtgagactggtcctgctggtcccaccggtcctgtcggccctgttggcgcccgtggccccgccggaccccaaggcccccgtggtgacaagggtgagacaggcgaacagggcgacagaggcataaagggtcaccgtggcttctctggcctccagggtccccctggccctcctggctctcctggtgaacaaggtccctctggagcctctggtcctgctggtccccgaggtccccctggctctgctggtgctcctggcaaagatggactcaacggtctccctggccccattgggccccctggtcctcgcggtcgcactggtgatgctggtcctgttggtccccccggccctcctggacctcctggtccccctggtcctcccagcgctggtttcgacttcagcttcctgccccagccacctcaagagaaggctcacgatggtggccgctactaccgggctgatgatgccaatgtggttcgtgaccgtgacctcgaggtggacaccaccctcaagagcctgagccagcagatcgagaacatccggagcccagagggcagccgcaagaaccccgcccgcacctgccgtgacctcaagatgtgccactctgactggaagagtggtctccactcttccaggaggttctcactcgcatccagagcagcgaggcttcgggcagcctgaccctgcagcaccacatgctggaaccagtgcagagaattccacgttacgagctgctgctcaaggagtacatccagaagctgccagcccaggccccagaccaggccgatgcccagaaagccctggacatgatcttctcagctgcccagcactccaatgcagccatcactgagatggagcggctgcaggacctgtgggaggtgtaccagcgcctgggcctcgaggacgacatagtagacccctctaacaccctgctccgtgagggcccggtcctcaagatctccttccgccgcaacgaccccatggagcgctaccttttcttgttcaacaacatgctgctctactgtgtgcccagggtgatccaggtgggcgcccagttccaggtgaggacccgcatcgatgtggccgggatgaaggtgcgggagctgatggatgctgagtttccccactccttcctggtgtccgggaagcagcgcaccctggagctgcaagcccggtcccaggaggaaatgatttcctggatgcaggccttccaagcagccattgaccaaatcgagaagcggaatgaaaccttcaaggctgcggcccaggggcctgagggagacatccaggagcaggagctgcagtctgaggagctgggcctccgggcaccgcagtgggtccgggacaagatggtgaccatgtgcatgcgctgccaggagcccttcaacgctctgacgcgccgtcgccaccactgccgggcctgcggctatgtggtgtgtgccaggtgctccgactaccgggccgaactgaaatacgacgacaacaggcccaaccgagtctgcctccactgctacgcattcctcactggaaatgtgctgcctgaggccaaggaggacaagaggcggggcatcctggagaaagggtcctcagccacgcctgaccagagcctgatgtgcagcttcctgcagctcatcggggacaagtggggcaagagcggcccccggggctggtgtgtgatccctcgggatgaccccctcgtgctctatgtctatgctgcccctcaggacatgagggctcacacctccatccccctgctgggctaccaggtgactgttgggccccagggggaccctcgggtcttccagctacagcagtcaggccagctctacaccttcaaggccgagacggaggagctgaagggccgctgggtgaaggccatggagcgggcggccagtggctggagccccagctggcccaacgatggggacctgtccgactgagccactgccagccgctctcctgcccacctctccccaccctgaacccagctcctgccacagactgaccctgtggcctcagtgacccactgccccaagtggtgctttcagagaattgattcagccatctgcgcccaggccacgtgtcccgatctgggattagaaaatatgggtccattcctttctagaaaggggacaaccaagtgtctcagtttgccttgcggggagggggctcctgggccatgggacttccagtgctaaaactgggaaagccccaggtaaccccggactggtggtcaccatagtatggtttttcatttgtatctcctggggagcttttaaagagtactggtgaaaaacacatagtaaattaattttaaaaatgtaaaaaacaatgcctgtactgaagtaccaccaccgatttaaatgggctgagttgggggaggcatggggtctttttttttttttttttgagacagagtcttactctgtttcccaggctggagtgcacaaacatggctcactacagcctcgctctcccgggctccagtgatcctcccgcctcagcctcccaagtagctgggattataggtgtgtgccactgtgccaagctaatttttttattttttgtagagatgggatttcaccatgttactcaggctggtctcaaactcccagcctcaagcgatgctcccacctccacctcccaaagtgctgggattacaggcgtgagccaccatacctggcgcatgcatattttttaagagtacccactggagtctaatatatagcctgggttacctgggatgaagaataaagagagcaaactaccacaaccaatggttgagcccctgtcaagtgccagtcatgatagtagtaataataataataaacatctattggaccagg

SEQ ID NO: 722 - DNA, 3414 bp, Homo sapiens
  misc_feature (1789)..(1789): second gene starts at position 1789
atgcctgaggaagtgcaccatggagaggaggaggtggagacttttgcctttcaggcagaaattgcccaactcatgtccctcatcatcaataccttctattccaacaaggagattttccttcgggagttgatctctaatgcttctgatgccttggacaagattcgctatgagagcctgacagacccttcgaagttggacagtggtaaagagctgaaaattgacatcatccccaaccctcaggaacgtaccctgactttggtagacacaggcattggcatgaccaaagctgatctcataaataatttgggaaccattgccaagtctggtactaaagcattcatggaggctcttcaggctggtgcagacatctccatgattgggcagtttggtgttggcttttattctgcctacttggtggcagagaaagtggttgtgatcacaaagcacaacgatgatgaacagtatgcttgggagtcttctgctggaggttccttcactgtgcgtgctgaccatggtgagcccattggcaggggtaccaaagtgatcctccatcttaaagaagatcagacagagtacctagaagagaggcgggtcaaagaagtagtgaagaagcattctcagttcataggctatcccatcaccctttatttggagaaggaacgagagaaggaaattagtgatgatgaggcagaggaagagaaaggtgagaaagaagaggaagataaagatgatgaagaaaaacccaagatcgaagatgtgggttcagatgaggaggatgacagcggtaaggataagaagaagaaaactaagaagatcaaagagaaatacattgatcaggaagaactaaacaagaccaagcctatttggaccagaaaccctgatgacatcacccaagaggagtatggagaattctacaagagcctcactaatgactgggaagaccacttggcagtcaagcacttttctgtagaaggtcagttggaattcagggcattgctatttattcctcgtcgggctccctttgacctttttgagaacaagaagaaaaagaacaacatcaaactctatgtccgccgtgtgttcatcatggacagctgtgatgagttgataccagagtatctcaattttatccgtggtgtggttgactctgaggatctgcccctgaacatctcccgagaaatgctccagcagagcaaaatcttgaaagtcattcgcaaaaacattgttaagaagtgccttgagctcttctctgagctggcagaagacaaggagaattacaagaaattctatgaggcattctctaaaaatctcaagcttggaatccacgaagactccactaaccgccgccgcctgtctgagctgctgcgctatcatacctcccagtctggagatgagatgacatctctgtcagagtatgtttctcgcatgaaggagacacagaagtccatctattacatcactggtgagagcaaagagcaggtggccaactcagcttttgtggagcgagtgcggaaacggggcttcgaggtggtatatatgaccgagcccattgacgagtactgtgtgcagcagctcaaggaatttgatgggaagagcctggtctcagttaccaaggagggtctggagctgcctgaggatgaggaggagaagaagaagatggaagagagcaaggcaaagtttgagaacctctgcaagctcatgaaagaaatcttagataagaaggttgagaaggtgacaatctccaatagacttgtgtcttcaccttgctgcattgtgaccagcacctacgagggcaccaacaccagcggggcgtccgagtgtgagtcagtcagcgacaaggctcccagccctgccaccctgccagccacctcctcctccctgcccagcccagccaccccatcccatggctctcccagttcccatgggcctccagccacccaccctacctcccccactcccccttcgacagccagtggggccaccacagctgccaacgggggtagcttgaactgcctgcagacaccatcctccaccagcagggggcgcaagatgactgtcaacggcgctcccgtgccccccttaacttgaggccagggaccctctcccttcttccagccaagcctctccactccttccactttttctgggcccttttttccacctcttctactttccccagctcttcccaccttgggggtggggggcgggttttataaataaatatatatatatatgtacataggaaaaaccaaatatacatacttattttctatggaccaaccagattaatttaaatgccacaggaaacaaactttatgtgtgtgtgtatgtgtggaaaatggtgttcattttttttggggggggtcttgtgtaatttgctgtttttgggggtgcctggagatgaactggatgggccactggagtctcaataaagctctgcaccatcctcgctgtttcccaaggcaggtggtgtgttgggggccccttcagacccaaagctttaggcatgattccaactggctgcatataggagtcagttagaatcgtttctttctctccccgtttctctccccatcttggctgctgtcctgcctctgaccagtggccgccccccacgttgttgaatgtccagaaattgctaagaacagtgccttttacaaatgcagtttatccctggttctgaggagcaagtgcagggtggaggtggcacctgcatcacctcctcctcttgcagtggaaactttgtgcaaagaatagatagttctgcctctttttttttttttcctgtgtgtgtggcctttgcatcatttatcttgtggaaaagaagattcaggccctgagaggtctcagctcttggaggagggctaaggctttagcattgtgaagcgctgcacccccaccaaccttaccctcaccggggaaccctcactagcaggactggtggtggagtctcacctggggcctagagtggaagtgggggtgggttaacctcacacaagcacagatcccagactttgccagaggcaaacagccttccaattgcccctccacccccagctgaggcccggtcacctggtcaggacagagcaactgcatctaaaagcacaagaagacagaaacctgtaagctctgaccccacccccaccccttgagaggtcagcggaccacctccttagggacagaccctggcaggtcgctgcccaccgagatttcctcaagtgtgcatagatctgagaggagtcgggagtcgagactcgagattccatcatagcgtaggtgtgtggggttgggagccccctgatgggcttgtctgtgtttgcaccttgtcctgtgtctgaggtcctgtgactgtaccctcctttgccctgggacatctgtatctcttggctttgtaataaatgctgcatactttct

SEQ ID NO: 723 - DNA, 1146 bp, Homo sapiens
  misc_feature (130)..(130): second gene starts at position 130
atggcggatgacgccggtgcagcgggggggcccgggggccctggtggccctgggatggggaaccgcggtggcttccgcggaggtttcggcagtggcatccggggccggggtcgcggccgtggacggggcgtggggcaggagaccctgtaggaggaccccgggccgcaggcccctgaggagcgatgacggaatataagctggtggtggtgggcgccggcggtgtgggcaagagtgcgctgaccatccagctgatccagaaccattttgtggacgaatacgaccccactatagaggattcctaccggaagcaggtggtcattgatggggagacgtgcctgttggacatcctggataccgccggccaggaggagtacagcgccatgcgggaccagtacatgcgcaccggggagggcttcctgtgtgtgtttgccatcaacaacaccaagtcttttgaggacatccaccagtacagggagcagatcaaacgggtgaaggactcggatgacgtgcccatggtgctggtggggaacaagtgtgacctggctgcacgcactgtggaatctcggcaggctcaggacctcgcccgaagctacggcatcccctacatcgagacctcggccaagacccggcagggagtggaggatgccttctacacgttggtgcgtgagatccggcagcacaagctgcggaagctgaaccctcctgatgagagtggccccggctgcatgagctgcaagtgtgtgctctcctgacgcaggtgagggggactcccagggcggccgccacgcccaccggatgaccccggctccccgcccctgccggtctcctggcctgcggtcagcagcctcccttgtgccccgcccagcacaagctcaggacatggaggtgccggatgcaggaaggaggtgcagacggaaggaggaggaaggaaggacggaagcaaggaaggaaggaagggctgctggagcccagtcaccccgggaccgtgggccgaggtgactgcagaccctcccagggaggctgtgcacagactgtcttgaacatcccaaatgccaccggaaccccagcccttagctcccctcccaggcctctgtgggcccttgtcgggcacagatgggatcacagtaaattattggatggtcttga

SEQ ID NO: 724 - DNA, 1038 bp, Homo sapiens
  misc_feature (130)..(130): second gene starts at position 130
atggcggatgacgccggtgcagcgggggggcccgggggccctggtggccctgggatggggaaccgcggtggcttccgcggaggtttcggcagtggcatccggggccggggtcgcggccgtggacggggcgtggggcaggagaccctgtaggaggaccccgggccgcaggcccctgaggagcgatgacggaatataagctggtggtggtgggcgccggcggtgtgggcaagagtgcgctgaccatccagctgatccagaaccattttgtggacgaatacgaccccactatagaggattcctaccggaagcaggtggtcattgatggggagacgtgcctgttggacatcctggataccgccggccaggaggagtacagcgccatgcgggaccagtacatgcgcaccggggagggcttcctgtgtgtgtttgccatcaacaacaccaagtcttttgaggacatccaccagtacagggagcagatcaaacgggtgaaggactcggatgacgtgcccatggtgctggtggggaacaagtgtgacctggctgcacgcactgtggaatctcggcaggctcaggacctcgcccgaagctacggcatcccctacatcgagacctcggccaagacccggcagggagtggaggatgccttctacacgttggtgcgtgagatccggcagcacaagctgcggaagctgaaccctcctgatgagagtggccccggctgcatgagctgcaagtgtgtgctctcctgacgcagcacaagctcaggacatggaggtgccggatgcaggaaggaggtgcagacggaaggaggaggaaggaaggacggaagcaaggaaggaaggaagggctgctggagcccagtcaccccgggaccgtgggccgaggtgactgcagaccctcccagggaggctgtgcacagactgtcttgaacatcccaaatgccaccggaaccccagcccttagctcccctcccaggcctctgtgggcccttgtcgggcacagatgggatcacagtaaattattggatggtcttga

SEQ ID NO: 725 - DNA, 1228 bp, Homo sapiens
  misc_feature (130)..(130): second gene starts at position 130
atggcggatgacgccggtgcagcgggggggcccgggggccctggtggccctgggatggggaaccgcggtggcttccgcggaggtttcggcagtggcatccggggccggggtcgcggccgtggacggggcgtggggcaggagaccctgtaggaggaccccgggccgcaggcccctgaggagcgatgacggaatataagctggtggtggtgggcgccggcggtgtgggcaagagtgcgctgaccatccagctgatccagaaccattttgtggacgaatacgaccccactatagaggattcctaccggaagcaggtggtcattgatggggagacgtgcctgttggacatcctggataccgccggccaggaggagtacagcgccatgcgggaccagtacatgcgcaccggggagggcttcctgtgtgtgtttgccatcaacaacaccaagtcttttgaggacatccaccagtacagggagcagatcaaacgggtgaaggactcggatgacgtgcccatggtgctggtggggaacaagtgtgacctggctgcacgcactgtggaatctcggcaggctcaggacctcgcccgaagctacggcatcccctacatcgagacctcggccaagacccggcagggcagccgctctggctctagctccagctccgggaccctctgggaccccccgggacccatgtgacccagcggcccctcgcgctggagtggaggatgccttctacacgttggtgcgtgagatccggcagcacaagctgcggaagctgaaccctcctgatgagagtggccccggctgcatgagctgcaagtgtgtgctctcctgacgcaggtgagggggactcccagggcggccgccacgcccaccggatgaccccggctccccgcccctgccggtctcctggcctgcggtcagcagcctcccttgtgccccgcccagcacaagctcaggacatggaggtgccggatgcaggaaggaggtgcagacggaaggaggaggaaggaaggacggaagcaaggaaggaaggaagggctgctggagcccagtcaccccgggaccgtgggccgaggtgactgcagaccctcccagggaggctgtgcacagactgtcttgaacatcccaaatgccaccggaaccccagcccttagctcccctcccaggcctctgtgggcccttgtcgggcacagatgggatcacagtaaattattggatggtcttga

SEQ ID NO: 726 - DNA, 6942 bp, Homo sapiens
  misc_feature (743)..(743): second gene starts at position 743
ttttttttttttttcaaatgcccctttcattatgaaactcttttttaacttttaatttaagttcaggggtatgtgtgcagatttgttacataggtaaacttgtgtcatggggctttgttgtacagattgtttcatcacccaggtattattttattttcattttagttttttaaatttctttttagaggcggggtctcactgtgttttgcccaggctggtctcgaactcctcctggtctcaagcaatcctctcgcctctgcctccccaagtgttgggattataggcatgagctactgcactcagcccaccatttgttttaaaaagggtggatcctatttgtataaaaagccatgtgcattttctgtgtacttgtctacacattaatttccaggctgggcgtggtggctcacgcttgtaatcccagcactttgggaggccaaggggaggcagatcatgaggttaggagatcgaaaccatcctggctaacacggtgaaaccccgtctctactaaaaatacaaaaacaaaattagcagggtgttgtggcgggcgcctgtagtcccagctactcaggaggctgaggcaggagaatggcatgaacccgggaggtggagcttgcagtgagctgagattgcgccactgccctccagcctggacaacagagtgaggctccgtcttaaaggaaaaaaatttctggaatgatgtccaataaatcagagagagggactagaagactaatgaggacagaagcttttattcttaacacctatattttgctaccatttatattgtcatcatatgcatataacattttaacatttaaaaactagtttaaacagaaatggttgccctggaatgtggcctgtgttctttcaagggaggccagcagtttctacagtggctgagatggtaccttcatctcacacacctacgcaggagtgcatttgtgctttgatgtggttgtcccttgaagaaggaagcagttctctttttcttttttcccttttccattataggatcagtcacttcttggggcattagtagtctcatttccagtggcatcttcccttggcaaaaggaatcccagataggacctcatctttctaaacaaatgctgttttgggtcctaaccatcccatgtttgctttgaatatgtttaagttgcctggaattatcaacaaaagaattaaatttattgtaggtcagggcatcttttgactcattgtataaaacattcactttaaatgtataccgaaatgtcctttaggctgggattacaggcatgagccatgacacccggcctgtaattttctttaaagactgccactgggtggaacccactgggcccagtgagaactacggaaaagagacccattcttgccctcattgttagtgtccacatccggatttacctaaaccccacccaggtggcatttgcatagtaatgaaaaaccggtattttctagctgtgaatcacacttcaaatcctgagcggctgactgtcaggggtgcgtcaggcctgcttgctgggagaatggacgagctggttgtggagcgggcgggtcccgccacccgtgggctcagcactggactgctcccagaacattaaaggtctggctgatgttccatgccacatctggacatgaagacccatgtctgcccttctgtagaagggccaaagaagaaaggaggcatcacatgtttctgctgtggggggcccttccgagcagcagacaggagcaagacaaggagccccaaactgtctcacagtcctcaaccacccagtctgggtgacccggtcgagcatttatcagagacgtccgctgattctttggaagccatgtctgagggggatgctccaacccctttttccagaggcagccggactcgtgcgagccttcctgtggtgaggtcaaccaaccagacgaaagaaagatctctgggggttctctatctccagtatggagatgaaaccaagcagctcaggatgccgaatgaaatcacaagtgcagacacaatccgtgctctcttcgtaagtgcctttccacagcagctcaccatgaaaatgctggaatcgcccagtgtcgccatttacatcaaagatgaaagcagaaatgtctattatgaattaaatgatgtaaggaacattcaagacagatcactcctcaaagtgtacaacaaggatcctgcacatgcgtttaatcacacaccaaaaactatgaatggagacatgaggatgcagagagaacttgtttatgcaagaggagatggccctggggcccctcgccccggatctactgctcatccaccccatgcgattccaaattccccaccgtctactccagtgccccattccatgcccccctccccgtccagaattccttatgggggcacccgctccatggttgttcctggcaatgccaccatccccagggacagaatctccagcctgccagtctccagacccatctctccaagcccaagcgccattttagaaagaagagatgtcaagcctgatgaagacatgagtggcaaaaacattgcaatgtacagaaatgagggtttctatgctgatccttacctttatcacgagggacggatgagcatagcctcatcccatggtggacacccactggatgtccccgaccacatcattgcatatcaccgcaccgccatccggtcagcgagtgcttattgtaacccctcaatgcaagcggaaatgcatatggaacaatcactgtacagacagaaatcaaggaaatatccggatagccatttgcctacactgggctccaaaacaccccctgcctctcctcacagagtcagtgacctgaggatgatagacatgcacgctcactataatgcccacggcccccctcacaccatgcagccagaccgggcctctccgagccgccaggcctttaaaaaggagccaggcaccttggtgtatatagaaaagccacggagcgctgcaggattatccagccttgtagacctcggccctcctctaatggagaagcaagtttttgcctacagcacggcgacaatacccaaagacagagagaccagagagaggatgcaagccatggagaaacagattgccagtttaactggccttgttcagtctgcgctttttaaagggcccattacaagttatagcaaagatgcgtctagcgagaaaatgatgaaaaccacagccaacaggaaccacacagatagtgcaggaacgccccatgtgtctggtgggaagatgctcagtgctctggagtccacggtgcctcccagccagcctccacctgtgggcacctcagccatccacatgagcctgcttgagatgaggcggagcgtggcggaactcaggctccagctccagcagatgcggcagctccagctgcagaaccaggagttgctgagggcaatgatgaagaaggccgagctggaaatcagtggcaaagtgatggaaacaatgaagagactggaggatcccgtgcagcgacagcgcgtcctagtggagcaagagagacaaaaatatcttcatgaggaagagaagatcgtcaagaagttgtgcgagttggaagactttgttgaagacttgaagaaggactccacggcagccagccgattggttactctgaaagacgtggaagacggggctttcctcctgcgtcaagtgggagaggctgtagctaccctgaaaggagaatttccaaccttacaaaacaagatgcgagccatcctgcgcatagaagtggaggccgtgcggtttctgaaggaggagccacacaagctggacagtctcctgaagcgtgtgcgcagcatgacagacgtcctgaccatgctgcggagacatgtcactgatgggctcctgaaaggcacggacgcagcccaagccgcacagtacatggctatggaaaaggccacagccgcagaagtcctgaagagtcaggaggaggcagcccacacctccggccagcccttccacagcacaggtgcccctggcgatgcgaagtcggaagtggtgcctttgtccggcatgatggttcgccacgcgcagagctcccctgtggtcatccagccctcccagcactccgtggccctgctgaaccctgctcagaacttgcctcacgtggccagctccccagccgtcccccaggaagcaacctccactctgcagatgtcgcaggctccgcagtccccacagatacccatgaatgggtctgccatgcagagcttgttcattgaagaaatccacagtgtgagtgccaagaacagggcagtgtctatcgagaaagcagaaaagaaatgggaggaaaaaaggcaaaatctggatcactataatgggaaagagtttgagaagctcctagaagaagctcaggccaatatcatgaagtcaataccaaatctggagatgccgccagccacaggcccactgccaaggggagatgccccagtggacaaggtggaactttcagaagattctccaaattcggaacaggacttggaaaagctggggggaaagtcgccccctcctcctccgccacctcctcgtcgaagctacctgccaggatcgggactcaccaccacgaggtcaggcgatgtggtctacaccggcagaaaggagaacatcaccgctaaggcaagcagtgaagatgctggaccaagcccacagaccagagctacaaaatatccagcagaggagcctgcttcagcctggaccccatccccaccgcctgtcaccacctcctcctcaaaggatgaggaggaagaagaagaagaaggagacaaaataatggcagaactccagggctccagcggggccccacagacgagcaggatgcctgtccccatgagtgccaagaacagacccggaaccctggacaaacccggcaagcagtccaaactgcaggatccccgccaatatcgtcaggctaatggaagtgctaagaaatctggtggggactttaagcctacttccccctccttacctgcttctaagattccagccctttctcccagctctgggaaaagcagttctctgccctcttctagtggtgacagctctaacctccctaatccacctgctactaaaccatcgattgcttctaaccctctcagcccccaaacaggaccacctgctcactctgcctccctcatcccttctgtctctaatggctctttgaagtttcagagcctcactcatacaggtaaaggtcaccatctttcattctcaccgcagagtcaaaatggccgagcaccccctcctttgtcattttcctcctcccctccttctcctgcctcctccgtctcactgaatcaaggtgccaagggcaccaggaccatccatactcccagcctcaccagctacaaggcacagaatggaagttcaagcaaagccaccccatccacagcaaaagaaacctcttaaaggtcaaatcctattaggcacaagtcggagttacatttaaaaaaaattaacagtctacaacaactgttttcacaagagaatgtaacatattgctgtatcgtttgaggcttaatgctaaatatgtgctaaatactggattaatagatttcagtaaagctcgttcgttttgtttggttttctttttacctagttgctatagtgtctacagtctatactcaatacctataaaatgcagtaagcatgtgttacagaaagaggttctggtgggagagaaaggtgcgtgtgagacaggagaattgtcttaagcatataaaacatgtatgattccagaattttagtatgttttgtataaaactatttttcattacggagactagaagtgaacagagaattacacaagtgtgactatacaaattgtaaaacagatactataatatttccttttattttagtgttatttagctttattacagatttctatttttgtcaaaacttcatggttcctttcaagatcttttttgccaaaacattttgatactatagcattgtacatttgaaagtagtgttctagactataaaaccaatgaacttctacatgagccctacagacaggcatgtgtagaaggcaatttatcaaacctattgcactgccatgaaaagtgtgtataataatttgctagcccaagcaagctagttttctttgcttgcttcttttctttcttttttccttccttttttttttttttttcttttttaacatgttgagattctctagttgttttctttggcgtatctaaccccttcttttgttttctgagacctggtaacccacgctcttgcattgtggattttaaaatgtatactctgtacggttctgtaaaccgaaaaacttttgtaaatatataaatatacatagacataaaaatactgtatgtgacagcacatagagtagttttcccacaccaaagttaatttttatgcatgctttaaaagtatatatcgggaccggcagaaatggaagtatccatacatttttaaaaagcaacaagtttgcacagctagagtgtttttgtaaataaatgtatttgtataacacagtcatgtaatatacagaactataagcagagactttgcaaaactaaataaagggctgcatgcttattattttttgtaccttgtcactataactacttcctagtcaaagaacgaaatgtaactgttaccgagttaaatgtttttccgctttgagggatgtaaccacatccactcagaggacactacttttctgaaagctctggggtgactaatgatgagttcctaataaattaattgcaagtgtggtgccttggatgtggcctgttggctcgctttcttctctgtggcttatcaaggtgtagatgacagaaagcaaacctggatacagagtttccaccctcagttcctggaggggctcttattattttctctctttttaaaaaacttccagtagaagtaaagtggaaataaaatgtctttatca

SEQ ID NO: 727 - DNA, 6837 bp, Homo sapiens
  misc_feature (743)..(743): second gene starts at position 743
ttttttttttttttcaaatgcccctttcattatgaaactcttttttaacttttaatttaagttcaggggtatgtgtgcagatttgttacataggtaaacttgtgtcatggggctttgttgtacagattgtttcatcacccaggtattattttattttcattttagttttttaaatttctttttagaggcggggtctcactgtgttttgcccaggctggtctcgaactcctcctggtctcaagcaatcctctcgcctctgcctccccaagtgttgggattataggcatgagctactgcactcagcccaccatttgttttaaaaagggtggatcctatttgtataaaaagccatgtgcattttctgtgtacttgtctacacattaatttccaggctgggcgtggtggctcacgcttgtaatcccagcactttgggaggccaaggggaggcagatcatgaggttaggagatcgaaaccatcctggctaacacggtgaaaccccgtctctactaaaaatacaaaaacaaaattagcagggtgttgtggcgggcgcctgtagtcccagctactcaggaggctgaggcaggagaatggcatgaacccgggaggtggagcttgcagtgagctgagattgcgccactgccctccagcctggacaacagagtgaggctccgtcttaaaggaaaaaaatttctggaatgatgtccaataaatcagagagagggactagaagactaatgaggacagaagcttttattcttaacacctatattttgctaccatttatattgtcatcatatgcatataacattttaacatttaaaaactagtttaaacagaaatggttgccctggaatgtggcctgtgttctttcaagggaggccagcagtttctacagtggctgagatggtaccttcatctcacacacctacgcaggagtgcatttgtgctttgatgtggttgtcccttgaagaaggaagcagttctctttttcttttttcccttttccattataggatcagtcacttcttggggcattagtagtctcatttccagtggcatcttcccttggcaaaaggaatcccagataggacctcatctttctaaacaaatgctgttttgggtcctaaccatcccatgtttgctttgaatatgtttaagttgcctggaattatcaacaaaagaattaaatttattgtaggtcagggcatcttttgactcattgtataaaacattcactttaaatgtataccgaaatgtcctttaggctgggattacaggcatgagccatgacacccggcctgtaattttctttaaagactgccactgggtggaacccactgggcccagtgagaactacggaaaagagacccattcttgccctcattgttagtgtccacatccggatttacctaaaccccacccaggtggcatttgcatagtaatgaaaaaccggtattttctagctgtgaatcacacttcaaatcctgagcggctgactgtcaggggtgcgtcaggcctgcttgctgggagaatggacgagctggttgtggagcgggcgggtcccgccacccgtgggctcagcactggactgctcccagaacattaaaggtctggctgatgttccatgccacatctggacatgaagacccatgtctgcccttctgtagaagggccaaagaagaaaggaggcatcacatgtttctgctgtggggggcccttccgagcagcagacaggagcaagacaaggagccccaaactgtctcacagtcctcaaccacccagtctgggtgacccggtcgagcatttatcagagacgtccgctgattctttggaagccatgtctgagggggatgctccaacccctttttccagaggcagccggactcgtgcgagccttcctgtggtgaggtcaaccaaccagacgaaagaaagatctctgggggttctctatctccagtatggagatgaaaccaagcagctcaggatgccgaatgaaatcacaagtgcagacacaatccgtgctctcttcgtaagtgcctttccacagcagctcaccatgaaaatgctggaatcgcccagtgtcgccatttacatcaaagatgaaagcagaaatgtctattatgaattaaatgatgtaaggaacattcaagacagatcactcctcaaagtgtacaacaaggatcctgcacatgcgtttaatcacacaccaaaaactatgaatggagacatgaggatgcagagagaacttgtttatgcaagaggagatggccctggggcccctcgccccggatctactgctcatccaccccatgcgattccaaattccccaccgtctactccagtgccccattccatgcccccctccccgtccagaattccttatgggggcacccgctccatggttgttcctggcaatgccaccatccccagggacagaatctccagcctgccagtctccagacccatctctccaagcccaagcgccattttagaaagaagagatgtcaagcctgatgaagacatgagtggcaaaaacattgcaatgtacagaaatgagggtttctatgctgatccttacctttatcacgagggacggatgagcatagcctcatcccatggtggacacccactggatgtccccgaccacatcattgcatatcaccgcaccgccatccggtcagcgagtgcttattgtaacccctcaatgcaagcggaaatgcatatggaacaatcactgtacagacagaaatcaaggaaatatccggatagccatttgcctacactgggctccaaaacaccccctgcctctcctcacagagtcagtgacctgaggatgatagacatgcacgctcactataatgcccacggcccccctcacaccatgcagccagaccgggcctctccgagccgccaggcctttaaaaaggagccaggcaccttggtgtatatagaaaagccacggagcgctgcaggattatccagccttgtagacctcggccctcctctaatggagaagcaagtttttgcctacagcacggcgacaatacccaaagacagagagaccagcgagaaaatgatgaaaaccacagccaacaggaaccacacagatagtgcaggaacgccccatgtgtctggtgggaagatgctcagtgctctggagtccacggtgcctcccagccagcctccacctgtgggcacctcagccatccacatgagcctgcttgagatgaggcggagcgtggcggaactcaggctccagctccagcagatgcggcagctccagctgcagaaccaggagttgctgagggcaatgatgaagaaggccgagctggaaatcagtggcaaagtgatggaaacaatgaagagactggaggatcccgtgcagcgacagcgcgtcctagtggagcaagagagacaaaaatatcttcatgaggaagagaagatcgtcaagaagttgtgcgagttggaagactttgttgaagacttgaagaaggactccacggcagccagccgattggttactctgaaagacgtggaagacggggctttcctcctgcgtcaagtgggagaggctgtagctaccctgaaaggagaatttccaaccttacaaaacaagatgcgagccatcctgcgcatagaagtggaggccgtgcggtttctgaaggaggagccacacaagctggacagtctcctgaagcgtgtgcgcagcatgacagacgtcctgaccatgctgcggagacatgtcactgatgggctcctgaaaggcacggacgcagcccaagccgcacagtacatggctatggaaaaggccacagccgcagaagtcctgaagagtcaggaggaggcagcccacacctccggccagcccttccacagcacaggtgcccctggcgatgcgaagtcggaagtggtgcctttgtccggcatgatggttcgccacgcgcagagctcccctgtggtcatccagccctcccagcactccgtggccctgctgaaccctgctcagaacttgcctcacgtggccagctccccagccgtcccccaggaagcaacctccactctgcagatgtcgcaggctccgcagtccccacagatacccatgaatgggtctgccatgcagagcttgttcattgaagaaatccacagtgtgagtgccaagaacagggcagtgtctatcgagaaagcagaaaagaaatgggaggaaaaaaggcaaaatctggatcactataatgggaaagagtttgagaagctcctagaagaagctcaggccaatatcatgaagtcaataccaaatctggagatgccgccagccacaggcccactgccaaggggagatgccccagtggacaaggtggaactttcagaagattctccaaattcggaacaggacttggaaaagctggggggaaagtcgccccctcctcctccgccacctcctcgtcgaagctacctgccaggatcgggactcaccaccacgaggtcaggcgatgtggtctacaccggcagaaaggagaacatcaccgctaaggcaagcagtgaagatgctggaccaagcccacagaccagagctacaaaatatccagcagaggagcctgcttcagcctggaccccatccccaccgcctgtcaccacctcctcctcaaaggatgaggaggaagaagaagaagaaggagacaaaataatggcagaactccagggctccagcggggccccacagacgagcaggatgcctgtccccatgagtgccaagaacagacccggaaccctggacaaacccggcaagcagtccaaactgcaggatccccgccaatatcgtcaggctaatggaagtgctaagaaatctggtggggactttaagcctacttccccctccttacctgcttctaagattccagccctttctcccagctctgggaaaagcagttctctgccctcttctagtggtgacagctctaacctccctaatccacctgctactaaaccatcgattgcttctaaccctctcagcccccaaacaggaccacctgctcactctgcctccctcatcccttctgtctctaatggctctttgaagtttcagagcctcactcatacaggtaaaggtcaccatctttcattctcaccgcagagtcaaaatggccgagcaccccctcctttgtcattttcctcctcccctccttctcctgcctcctccgtctcactgaatcaaggtgccaagggcaccaggaccatccatactcccagcctcaccagctacaaggcacagaatggaagttcaagcaaagccaccccatccacagcaaaagaaacctcttaaaggtcaaatcctattaggcacaagtcggagttacatttaaaaaaaattaacagtctacaacaactgttttcacaagagaatgtaacatattgctgtatcgtttgaggcttaatgctaaatatgtgctaaatactggattaatagatttcagtaaagctcgttcgttttgtttggttttctttttacctagttgctatagtgtctacagtctatactcaatacctataaaatgcagtaagcatgtgttacagaaagaggttctggtgggagagaaaggtgcgtgtgagacaggagaattgtcttaagcatataaaacatgtatgattccagaattttagtatgttttgtataaaactatttttcattacggagactagaagtgaacagagaattacacaagtgtgactatacaaattgtaaaacagatactataatatttccttttattttagtgttatttagctttattacagatttctatttttgtcaaaacttcatggttcctttcaagatcttttttgccaaaacattttgatactatagcattgtacatttgaaagtagtgttctagactataaaaccaatgaacttctacatgagccctacagacaggcatgtgtagaaggcaatttatcaaacctattgcactgccatgaaaagtgtgtataataatttgctagcccaagcaagctagttttctttgcttgcttcttttctttcttttttccttccttttttttttttttttcttttttaacatgttgagattctctagttgttttctttggcgtatctaaccccttcttttgttttctgagacctggtaacccacgctcttgcattgtggattttaaaatgtatactctgtacggttctgtaaaccgaaaaacttttgtaaatatataaatatacatagacataaaaatactgtatgtgacagcacatagagtagttttcccacaccaaagttaatttttatgcatgctttaaaagtatatatcgggaccggcagaaatggaagtatccatacatttttaaaaagcaacaagtttgcacagctagagtgtttttgtaaataaatgtatttgtataacacagtcatgtaatatacagaactataagcagagactttgcaaaactaaataaagggctgcatgcttattattttttgtaccttgtcactataactacttcctagtcaaagaacgaaatgtaactgttaccgagttaaatgtttttccgctttgagggatgtaaccacatccactcagaggacactacttttctgaaagctctggggtgactaatgatgagttcctaataaattaattgcaagtgtggtgccttggatgtggcctgttggctcgctttcttctctgtggcttatcaaggtgtagatgacagaaagcaaacctggatacagagtttccaccctcagttcctggaggggctcttattattttctctctttttaaaaaacttccagtagaagtaaagtggaaataaaatgtctttatca

SEQ ID NO: 728 - DNA, 8739 bp, Homo sapiens
  misc_feature (743)..(743): second gene starts at position 743
ttttttttttttttcaaatgcccctttcattatgaaactcttttttaacttttaatttaagttcaggggtatgtgtgcagatttgttacataggtaaacttgtgtcatggggctttgttgtacagattgtttcatcacccaggtattattttattttcattttagttttttaaatttctttttagaggcggggtctcactgtgttttgcccaggctggtctcgaactcctcctggtctcaagcaatcctctcgcctctgcctccccaagtgttgggattataggcatgagctactgcactcagcccaccatttgttttaaaaagggtggatcctatttgtataaaaagccatgtgcattttctgtgtacttgtctacacattaatttccaggctgggcgtggtggctcacgcttgtaatcccagcactttgggaggccaaggggaggcagatcatgaggttaggagatcgaaaccatcctggctaacacggtgaaaccccgtctctactaaaaatacaaaaacaaaattagcagggtgttgtggcgggcgcctgtagtcccagctactcaggaggctgaggcaggagaatggcatgaacccgggaggtggagcttgcagtgagctgagattgcgccactgccctccagcctggacaacagagtgaggctccgtcttaaaggaaaaaaatttctggaatgatgtccaataaatcagagagagggactagaagactaatgaggacagaagcttttattcttaacacctatattttgctaccatttatattgtcatcatatgcatataacattttaacatttaaaaactagtttaaacagaaatggttgccctggaatgtggcctgtgttctttcaagggaggccagcagtttctacagtggctgagatggtaccttcatctcacacacctacgcaggagtgcatttgtgctttgatgtggttgtcccttgaagaaggaagcagttctctttttcttttttcccttttccattataggatcagtcacttcttggggcattagtagtctcatttccagtggcatcttcccttggcaaaaggaatcccagataggacctcatctttctaaacaaatgctgttttgggtcctaaccatcccatgtttgctttgaatatgtttaagttgcctggaattatcaacaaaagaattaaatttattgtaggtcagggcatcttttgactcattgtataaaacattcactttaaatgtataccgaaatgtcctttaggctgggattacaggcatgagccatgacacccggcctgtaattttctttaaagactgccactgggtggaacccactgggcccagtgagaactacggaaaagagacccattcttgccctcattgttagtgtccacatccggatttacctaaaccccacccaggtggcatttgcatagtaatgaaaaaccggtattttctagctgtgaatcacacttcaaatcctgagcggctgactgtcaggggtgcgtcaggcctgcttgctgggagaatggacgagctggttgtggagcgggcgggtcccgccacccgtgggctcagcactggactgctcccagaacattaaaggtctggctgatgttccatgccacatctggacatgaagacccatgtctgcccttctgtagaagggccaaagaagaaaggaggcatcacatgtttctgctgtggggggcccttccgagcagcagacaggagcaagacaaggagccccaaactgtctcacagtcctcaaccacccagtctgggtgacccggtcgagcatttatcagagacgtccgctgattctttggaagccatgtctgagggggatgctccaacccctttttccagaggcagccggactcgtgcgagccttcctgtggtgaggtcaaccaaccagacgaaagaaagatctctgggggttctctatctccagtatggagatgaaaccaagcagctcaggatgccgaatgaaatcacaagtgcagacacaatccgtgctctcttcgtaagtgcctttccacagcagctcaccatgaaaatgctggaatcgcccagtgtcgccatttacatcaaagatgaaagcagaaatgtctattatgaattaaatgatgtaaggaacattcaagacagatcactcctcaaagtgtacaacaaggatcctgcacatgcgtttaatcacacaccaaaaactatgaatggagacatgaggatgcagagagaacttgtttatgcaagaggagatggccctggggcccctcgccccggatctactgctcatccaccccatgcgattccaaattccccaccgtctactccagtgccccattccatgcccccctccccgtccagaattccttatgggggcacccgctccatggttgttcctggcaatgccaccatccccagggacagaatctccagcctgccagtctccagacccatctctccaagcccaagcgccattttagaaagaagagatgtcaagcctgatgaagacatgagtggcaaaaacattgcaatgtacagaaatgagggtttctatgctgatccttacctttatcacgagggacggatgagcatagcctcatcccatggtggacacccactggatgtccccgaccacatcattgcatatcaccgcaccgccatccggtcagcgagtgcttattgtaacccctcaatgcaagcggaaatgcatatggaacaatcactgtacagacagaaatcaaggaaatatccggatagccatttgcctacactgggctccaaaacaccccctgcctctcctcacagagtcagtgacctgaggatgatagacatgcacgctcactataatgcccacggcccccctcacaccatgcagccagaccgggcctctccgagccgccaggcctttaaaaaggagccaggcaccttggtgtatatagaaaagccacggagcgctgcaggattatccagccttgtagacctcggccctcctctaatggagaagcaagtttttgcctacagcacggcgacaatacccaaagacagagagaccagagagaggatgcaagccatggagaaacagattgccagtttaactggccttgttcagtctgcgctttttaaagggcccattacaagttatagcaaagatgcgtctagcgagaaaatgatgaaaaccacagccaacaggaaccacacagatagtgcaggaacgccccatgtgtctggtgggaagatgctcagtgctctggagtccacggtgcctcccagccagcctccacctgtgggcacctcagccatccacatgagcctgcttgagatgaggcggagcgtggcggaactcaggctccagctccagcagatgcggcagctccagctgcagaaccaggagttgctgagggcaatgatgaagaaggccgagctggaaatcagtggcaaagtgatggaaacaatgaagagactggaggatcccgtgcagcgacagcgcgtcctagtggagcaagagagacaaaaatatcttcatgaggaagagaagatcgtcaagaagttgtgcgagttggaagactttgttgaagacttgaagaaggactccacggcagccagccgattggttactctgaaagacgtggaagacggggctttcctcctgcgtcaagtgggagaggctgtagctaccctgaaaggagaatttccaaccttacaaaacaagatgcgagccatcctgcgcatagaagtggaggccgtgcggtttctgaaggaggagccacacaagctggacagtctcctgaagcgtgtgcgcagcatgacagacgtcctgaccatgctgcggagacatgtcactgatgggctcctgaaaggcacggacgcagcccaagccgcacagtacatggctatggaaaaggccacagccgcagaagtcctgaagagtcaggaggaggcagcccacacctccggccagcccttccacagcacaggtgcccctggcgatgcgaagtcggaagtggtgcctttgtccggcatgatggttcgccacgcgcagagctcccctgtggtcatccagccctcccagcactccgtggccctgctgaaccctgctcagaacttgcctcacgtggccagctccccagccgtcccccaggaagcaacctccactctgcagatgtcgcaggctccgcagtccccacagatacccatgaatgggtctgccatgcagagcttgttcattgaagaaatccacagtgtgagtgccaagaacagggcagtgtctatcgagaaagcagaaaagaaatgggaggaaaaaaggcaaaatctggatcactataatgggaaagagtttgagaagctcctagaagaagctcaggccaatatcatgaagtcaataccaaatctggagatgccgccagccacaggcccactgccaaggggagatgccccagtggacaaggtggaactttcagaagattctccaaattcggaacaggacttggaaaagctggggggaaagtcgccccctcctcctccgccacctcctcgtcgaagctacctgccaggatcgggactcaccaccacgaggtcaggcgatgtggtctacaccggcagaaaggagaacatcaccgctaaggcaagcagtgaagatgctggaccaagcccacagaccagagctacaaaatatccagcagaggagcctgcttcagcctggaccccatccccaccgcctgtcaccacctcctcctcaaaggatgaggaggaagaagaagaagaaggagacaaaataatggcagaactccaggcattccagaagtgttcctttatggatgtaaattcaaacagtcatgctgagccatcccgggctgacagtcacgttaaagacactaggtcgggcgccacagtgccacccaaggagaagaagaatttggaatttttccatgaagatgtacggaaatctgatgttgaatatgaaaatggcccccaaatggaattccaaaaggttaccacaggggctgtaagacctagtgaccctcctaagtgggaaagaggaatggagaatagtatttctgatgcatcaagaacatcagaatataaaactgagatcataatgaaggaaaattccatatccaatatgagtttactcagagacagtagaaactattcccaggaaactgtgcctaaggccagtttcggtttctctggcattagtccattagaagatgaaataaacaaagggtctaaaatctcaggcctgcaatactctatacctgacaccgagaaccagacgctgaattacggaaagacaaaggagatggaaaagcaaaatacggataagtgtcacgtttcctctcacactagactaacagaatcaagcgtgcatgattttaaaacagaagatcaagaggttatcacgacagattttggccaagttgttctaagacccaaggaggcaaggcatgctaacgtgaaccctaatgaggatggagaatcaagttcaagttctcccactgaagaaaatgcagccactgacaatattgccttcatgattaccgaaaccactgtccaggttctttccagtggggaggtgcatgatattgttagccaaaagggagaagacatacagacggttaatatcgatgccagaaaagagatgaccccccgacaagaagggactgacaatgaggatccagtcgtgtgcctggacaagaaaccagtgatcatcattttcgatgagcccatggacatccggtctgcctataagagactttcaactatctttgaggaatgtgatgaggaattagagagaatgatgatggaggaaaagatagaggaggaggaagaggaggaaaatggggattctgtagtccagaataataacacttcccagatgtctcataagaaggtggccccaggcaatcttagaaccggacaacaggtggaaacaaagtcacagccacactccctggccacagagaccagaaacccaggaggacaggaaatgaacagaacggagctgaacaagttcagccacgtggattctccaaattcggaatgcaagggtgaggacgcgaccgatgaccagtttgaaagccccaagaaaaagtttaaattcaaattccctaagaagcaactcgccgctctcactcaagccattcgcaccggaactaaaacagggaagaagactttgcaagtggtagtctatgaagaagaggaagaggatggcaccctgaaacagcacaaagaagccaagcgcttcgaaatcgctaggtctcaacctgaagacacccctgaaaacacagtgaggaggcaagagcagcccagcatcgagagtacatctccgatttcaagaactgatgaaattagaaaaaacacctacagaacattggatagcctggagcagaccattaaacagctcgaaaatacaatcagtgaaatgagtcccaaagccctagttgatacctcatgttcttccaacagagattctgttgcaagttcatcccacatagcccaagaggcctctccccgacccttgctagttccggatgaaggtcccactgccctagagccccctacgtcgataccttcagcttcacgtaagggctccagcggggccccacagacgagcaggatgcctgtccccatgagtgccaagaacagacccggaaccctggacaaacccggcaagcagtccaaactgcaggatccccgccaatatcgtcaggctaatggaagtgctaagaaatctggtggggactttaagcctacttccccctccttacctgcttctaagattccagccctttctcccagctctgggaaaagcagttctctgccctcttctagtggtgacagctctaacctccctaatccacctgctactaaaccatcgattgcttctaaccctctcagcccccaaacaggaccacctgctcactctgcctccctcatcccttctgtctctaatggctctttgaagtttcagagcctcactcatacaggtaaaggtcaccatctttcattctcaccgcagagtcaaaatggccgagcaccccctcctttgtcattttcctcctcccctccttctcctgcctcctccgtctcactgaatcaaggtgccaagggcaccaggaccatccatactcccagcctcaccagctacaaggcacagaatggaagttcaagcaaagccaccccatccacagcaaaagaaacctcttaaaggtcaaatcctattaggcacaagtcggagttacatttaaaaaaaattaacagtctacaacaactgttttcacaagagaatgtaacatattgctgtatcgtttgaggcttaatgctaaatatgtgctaaatactggattaatagatttcagtaaagctcgttcgttttgtttggttttctttttacctagttgctatagtgtctacagtctatactcaatacctataaaatgcagtaagcatgtgttacagaaagaggttctggtgggagagaaaggtgcgtgtgagacaggagaattgtcttaagcatataaaacatgtatgattccagaattttagtatgttttgtataaaactatttttcattacggagactagaagtgaacagagaattacacaagtgtgactatacaaattgtaaaacagatactataatatttccttttattttagtgttatttagctttattacagatttctatttttgtcaaaacttcatggttcctttcaagatcttttttgccaaaacattttgatactatagcattgtacatttgaaagtagtgttctagactataaaaccaatgaacttctacatgagccctacagacaggcatgtgtagaaggcaatttatcaaacctattgcactgccatgaaaagtgtgtataataatttgctagcccaagcaagctagttttctttgcttgcttcttttctttcttttttccttccttttttttttttttttcttttttaacatgttgagattctctagttgttttctttggcgtatctaaccccttcttttgttttctgagacctggtaacccacgctcttgcattgtggattttaaaatgtatactctgtacggttctgtaaaccgaaaaacttttgtaaatatataaatatacatagacataaaaatactgtatgtgacagcacatagagtagttttcccacaccaaagttaatttttatgcatgctttaaaagtatatatcgggaccggcagaaatggaagtatccatacatttttaaaaagcaacaagtttgcacagctagagtgtttttgtaaataaatgtatttgtataacacagtcatgtaatatacagaactataagcagagactttgcaaaactaaataaagggctgcatgcttattattttttgtaccttgtcactataactacttcctagtcaaagaacgaaatgtaactgttaccgagttaaatgtttttccgctttgagggatgtaaccacatccactcagaggacactacttttctgaaagctctggggtgactaatgatgagttcctaataaattaattgcaagtgtggtgccttggatgtggcctgttggctcgctttcttctctgtggcttatcaaggtgtagatgacagaaagcaaacctggatacagagtttccaccctcagttcctggaggggctcttattattttctctctttttaaaaaacttccagtagaagtaaagtggaaataaaatgtctttatca

SEQ ID NO: 729 - DNA, 7924 bp, Homo sapiens
  misc_feature (141)..(141): second gene starts at position 141
atgaccacctgcagccgccagttcacctcctccagctccatgaagggctcctgcggcatcgggggcggcatcgggggcggctccagccgcatctcctccgtcctggccggagggtcctgccgcgcccccagcacctacgggggcggcctgtctgtctcatcctcccgcttctcctctgggggagcctgcgggctggggggcggctatggcggtggcttcagcagcagcagcagcagctttggtagtggctttgggggaggatatggtggtggccttggtgctggcttgggtggtggctttggtggtggctttgctggtggtgatgggcttctggtgggcagtgagaaggtgaccatgcagaacctcaatgaccgcctggcctcctacctggacaaggtgcgtgctctggaggaggccaacgccgacctggaagtgaagatccgtgactggtaccagaggcagcggcctgctgagatcaaagactacagtccctacttcaagaccattgaggacctgaggaacaagattctcacagccacagtggacaatgccaatgtccttctgcagattgacaatgcccgtctggccgcggatgacttccgcaccaagtatgagacagagttgaacctgcgcatgagtgtggaagccgacatcaatggcctgcgcagggtgctggacgaactgaccctggccagagctgacctggagatgcagattgagagcctgaaggaggagctggcctacctgaagaagaaccacgaggaggagatgaatgccctgagaggccaggtgggtggagatgtcaatgtggagatggacgctgcacctggcgtggacctgagccgcattctgaacgagatgcgtgaccagtatgagaagatggcagagaagaaccgcaaggatgccgaggaatggttcttcaccaagacagaggagctgaaccgcgaggtggccaccaacagcgagctggtgcagagcggcaagagcgagatctcggagctccggcgcaccatgcagaacctggagattgagctgcagtcccagctcagcatgaaagcatccctggagaacagcctggaggagaccaaaggtcgctactgcatgcagctggcccagatccaggagatgattggcagcgtgctgggccaactgctcctccccacttccctgctgggattatatcaacaaccagtgtgatgagctgtgcaacacggtcgagtgcctgtttgacaactttgaatgccaggggaacagcaagacatgcaagtatgacaaatactgtgcagaccacttcaaagacaaccactgtgaccaggggtgcaacagtgaggagtgtggttgggatgggctggactgtgctgctgaccaacctgagaacctggcagaaggtaccctggttattgtggtattgatgccacctgaacaactgctccaggatgctcgcagcttcttgcgggcactgggtaccctgctccacaccaacctgcgcattaagcgggactcccagggggaactcatggtgtacccctattatggtgagaagtcagctgctatgaagaaacagaggatgacacgcagatcccttcctggtgaacaagaacaggaggtggctggctctaaagtctttctggaaattgacaaccgccagtgtgttcaagactcagaccactgcttcaagaacacggatgcagcagcagctctcctggcctctcacgccatacaggggaccctgtcataccctcttgtgtctgtcgtcagtgaatccctgactccagaacgcactcagctcctctatctccttgctgttgctgttgtcatcattctgtttattattctgctgggggtaatcatggcaaaacgaaagcgtaagcatggctctctctggctgcctgaaggtttcactcttcgccgagatgcaagcaatcacaagcgtcgtgagccagtgggacaggatgctgtggggctgaaaaatctctcagtgcaagtctcagaagctaacctaattggtactggaacaagtgaacactgggtcgatgatgaagggccccagccaaagaaagtaaaggctgaagatgaggccttactctcagaagaagatgaccccattgatcgacggccatggacacagcagcaccttgaagctgcagacatccgtaggacaccatcgctggctctcacccctcctcaggcagagcaggaggtggatgtgttagatgtgaatgtccgtggcccagatggctgcaccccattgatgttggcttctctccgaggaggcagctcagatttgagtgatgaagatgaagatgcagaggactcttctgctaacatcatcacagacttggtctaccagggtgccagcctccaggcccagacagaccggactggtgagatggccctgcaccttgcagcccgctactcacgggctgatgctgccaagcgtctcctggatgcaggtgcagatgccaatgcccaggacaacatgggccgctgtccactccatgctgcagtggcagctgatgcccaaggtgtcttccagattctgattcgcaaccgagtaactgatctagatgccaggatgaatgatggtactacacccctgatcctggctgcccgcctggctgtggagggaatggtggcagaactgatcaactgccaagcggatgtgaatgcagtggatgaccatggaaaatctgctcttcactgggcagctgctgtcaataatgtggaggcaactcttttgttgttgaaaaatggggccaaccgagacatgcaggacaacaaggaagagacacctctgtttcttgctgcccgggaggggagctatgaagcagccaagatcctgttagaccattttgccaatcgagacatcacagaccatatggatcgtcttccccgggatgtggctcgggatcgcatgcaccatgacattgtgcgccttctggatgaatacaatgtgaccccaagccctccaggcaccgtgttgacttctgctctctcacctgtcatctgtgggcccaacagatctttcctcagcctgaagcacaccccaatgggcaagaagtctagacggcccagtgccaagagtaccatgcctactagcctccctaaccttgccaaggaggcaaaggatgccaagggtagtaggaggaagaagtctctgagtgagaaggtccaactgtctgagagttcagtaactttatcccctgttgattccctagaatctcctcacacgtatgtttccgacaccacatcctctccaatgattacatcccctgggatcttacaggcctcacccaaccctatgttggccactgccgcccctcctgccccagtccatgcccagcatgcactatctttttctaaccttcatgaaatgcagcctttggcacatggggccagcactgtgcttccctcagtgagccagttgctatcccaccaccacattgtgtctccaggcagtggcagtgctggaagcttgagtaggctccatccagtcccagtcccagcagattggatgaaccgcatggaggtgaatgagacccagtacaatgagatgtttggtatggtcctggctccagctgagggcacccatcctggcatagctccccagagcaggccacctgaagggaagcacataaccacccctcgggagcccttgccccccattgtgactttccagctcatccctaaaggcagtattgcccaaccagcgggggctccccagcctcagtccacctgccctccagctgttgcgggccccctgcccaccatgtaccagattccagaaatggcccgtttgcccagtgtggctttccccactgccatgatgccccagcaggacgggcaggtagctcagaccattctcccagcctatcatcctttcccagcctctgtgggcaagtaccccacacccccttcacagcacagttatgcttcctcaaatgctgctgagcgaacacccagtcacagtggtcacctccagggtgagcatccctacctgacaccatccccagagtctcctgaccagtggtcaagttcatcaccccactctgcttctgactggtcagatgtgaccaccagccctacccctgggggtgctggaggaggtcagcggggacctgggacacacatgtctgagccaccacacaacaacatgcaggtttatgcgtgagagagtccacctccagtgtagagacataactgacttttgtaaatgctgctgaggaacaaatgaaggtcatccgggagagaaatgaagaaatctctggagccagcttctagaggtaggaaagagaagatgttcttattcagataatgcaagagaagcaattcgtcagtttcactgggtatctgcaaggcttattgattattctaatctaataagacaagtttgtggaaatgcaagatgaatacaagccttgggtccatgtttactctcttctatttggagaataagatggatgcttattgaagcccagacattcttgcagcttggactgcattttaagccctgcaggcttctgccatatccatgagaagattctacactagcgtcctgttgggaattatgccctggaattctgcctgaattgacctacgcatctcctcctccttggacattcttttgtcttcatttggtgcttttggttttgcacctctccgtgattgtagccctaccagcatgttatagggcaagacctttgtgcttttgatcattctggcccatgaaagcaactttggtctcctttcccctcctgtcttcccggtatcccttggagtctcacaaggtttactttggtatggttctcagcacaaacctttcaagtatgttgtttctttggaaaatggacatactgtattgtgttctcctgcatatatcattcctggagagagaaggggagaagaatacttttcttcaacaaattttgggggcaggagatcccttcaagaggctgcaccttaatttttcttgtctgtgtgcaggtcttcatataaactttaccaggaagaagggtgtgagtttgttgtttttctgtgtatgggcctggtcagtgtaaagttttatccttgatagtctagttactatgaccctccccacttttttaaaaccagaaaaaggtttggaatgttggaatgaccaagagacaagttaactcgtgcaagagccagttacccacccacaggtccccctacttcctgccaagcattccattgactgcctgtatggaacacatttgtcccagatctgagcattctaggcctgtttcactcactcacccagcatatgaaactagtcttaactgttgagcctttcctttcatatccacagaagacactgtctcaaatgttgtacccttgccatttaggactgaactttccttagcccaagggacccagtgacagttgtcttccgtttgtcagatgatcagtctctactgattatcttgctgcttaaaggcctgctcaccaatctttctttcacaccgtgtggtccgtgttactggtatacccagtatgttctcactgaagacatggactttatatgttcaagtgcaggaattggaaagttggacttgttttctatgatccaaaacagccctataagaaggttggaaaaggaggaactatatagcagcctttgctattttctgctaccatttcttttcctctgaagcggccatgacattccctttggcaactaacgtagaaactcaacagaacattttcctttcctagagtcaccttttagatgataatggacaactatagacttgctcattgttcagactgattgcccctcacctgaatccactctctgtattcatgctcttggcaatttctttgactttcttttaagggcagaagcattttagttaattgtagataaagaatagttttcttcctcttctccttgggccagttaataattggtccatggctacactgcaacttccgtccagtgctgtgatgcccatgacacctgcaaaataagttctgcctgggcattttgtagatattaacaggtgaattcccgactcttttggtttgaatgacagttctcattccttctatggctgcaagtatgcatcagtgcttcccacttacctgatttgtctgtcggtggccccatatggaaaccctgcgtgtctgttggcataatagtttacaaatggttttttcagtcctatccaaatttattgaaccaacaaaaataattacttctgccctgagataagcagattaagtttgttcattctctgctttattctctccatgtggcaacattctgtcagcctctttcatagtgtgcaaacattttatcattctaaatggtgactctctgcccttggacccatttattattcacagatggggagaacctatctgcatggacctctgtggaccacagcgtacctgcccctttctgccctcctgctccagccccacttctgaaagtatcagctactgatccagccactggatattttatatcctcccttttccttaagcacaatgtcagaccaaattgcttgtttctttttcttggactactttaatttggatcctttgggtttggagaaagggaatgtgaaagctgtcattacagacaacaggtttcagtgatgaggaggacaacactgcctttcaaactttttactgatctcttagattttaagaactcttgaattgtgtggtatctaataaaagggaaggtaagatggataatcactttctcatttgggttctgaattggagactcagtttttatgagacacatcttttatgccatgtatagatcctcccctgctatttttggtttatttttattgttataaatgctttctttctttgactcctcttctgcctgcctttggggataggtttttttgtttgtttatttgcttcctctgttttgttttaagcatcattttcttatgtgaggtggggaagggaaaggtatgagggaaagagagtctgagaattaaaatattttagtataagcaattggctgtgatgctcaaatccattgcatcctcttattgaatttgccaatttgtaatttttgcataataaagaaccaaaggtgtaatgttttgttgagaggtggtttagggattttggccctaaccaatacattgaatgtatgatgactatttgggaggacacatttatgtacccagaggcccccactaataagtggtactatggttacttccttgtgtacatttctcttaaaagtgatattatatctgtttgtatgagaaacccagtaaccaataaaatgaccgcatattcctgactaaacgtagtaaggaaaatgcacactttgtttttacttttccgtttcattctaaaggtagttaagatgaaatttatatgaaagcatttttatcacaaaataaaaaaggtttgccaagctcagtggtgttgtattttttattttccaatactgcatccatggcctggcagtgttacctcatgatgtcataatttgctgagagagcaaattttcttttctttctgaatcccacaaagcctagcaccaaacttctttttttcttcctttaattagatcataaataaatgatcctggggaaaaagcatctgtcaaataggaaacatcacaaaactgagcactcttctgtgcactagccatagctggtgacaaacagatggttgctcagggacaaggtgccttccaatggaaatgcgaagtagttgctatagcaagaattgggaactgggatataagtcataatattaattatgctgttatgtaaatgattggtttgtaacattccttaagtgaaatttgtgtagaacttaatatacaggattataaaataatattttgtgtataaatttgttataagttcacattcatacatttatttataaagtcagtgagatatttgaacatgaa

SEQ ID NO: 730 - DNA, 2695 bp, Homo sapiens
  misc_feature (79)..(79): second gene starts at position 79
atggcgtcggagctagagccagaggtgcaggccatcgaccggagcttgctggaatgttcggccgaggagattgcggggaggttattaaataatttgtttattgtacggcatttacaaagaaaacagacaatgccctcagtagaaagaataaaaatgtatttagggctttatttttaactgacagcaaatagaaatcctttagtgagatcgtggcaatttgacagtattataattaagctcaataaaggtacatggggtacctggaagatcaagatctacagctgcctatttccacatctttcaatccatctggctccttaaataggggaaaaagcccttatttggtggagaagcatttccaaaatgaagttacaggttctattaaaacttactgtcacatcaactgttaaaatagggccttttgtgttttgttatttcaccttaatatcaccagaattcctgtaattccacaattgtgattttactatgtagaagataattcagttctagtctattgctttagatgtaaaaacagctgaaaacccaaagtggattagaattgctgaaggatttccctgccgttgtttgatacaatctattctcttgattcttgataggtgcatagaaagcctaacttaaaattctttctacaggaacatgtctgatttcaggagtacccaatgaaggatccgatgaatggctggccagttactcagagtaatatgtttatgagttaaatggattgcataacggcaccacttttcctttgtcactgtggtggataaatgacaaagtagattccaatctcctgtatagaaaggtggttacccaatagcctcactggtggcttgctagcagagcctcaagttgcacctctgtggctttctgtaaattcgagtcctacagccacttcgagaacgctgcaatccccaaggcccacttggtccatgctgaagaagcggctgtgaccccaatcctgcctctcttttgctcttcagtattacttactggaggaatatgtaatattctaggtcaagtctaggagaggctcatcctaaaaaaaaaattgcaaagtcttttctcaattaaaacaaaaaagcctcaagtacatctcaatcatgtcaaaattatggttaaaaattgacattatgtagggaaatagcagcagagaatggctaatcttaaaaaataacgaaccaaccaaccaaaaaacaaaacaaaacaagaccaacaaaaaaaagtgccatcccacccctccccttggttctttcatttggggttatattaaagactcgagcctctgagaaaatcagaaaggcaaagccatagaggaaaactgcttcaaggccagaattttgggtaaggtaaagaaaaagctgtacatgaaagcaggggactgtttggaaaagaatcagaatctcaagatctatttttcttaaatgggaaagctctgaaacccagatctccgttctaccatcatcctgatcctttagttatggggcaataaactcaagtgcaatgagtaaagtgccagccatggatacaaaaacaaaaaataaaacaaaacaaccaaccaaaataactctggtcttagggtaatagaagacatacaggaaaggactgtttatagaacacctgaggttctcaagaaattactattcaatggttctgtttttgcttacattaaaaatcagactgaagattcaaagatcttaactattaaaggatgaaaggaatttgacagtgctttgaacagtgataaaatggtacccaaatttggtgttcatatagctatttaaaaaagacagtagcttaaaagttgcaggaaaaaatgtgaacacagagaacaacagaaacagtccaggaagatgatgcagcccggacacagcaagtttaatgtctctgctgtacatagaattaagaccctttccccctcctcatccttatgctggcaataggatatgcactagaaaatttgactcttagagtcaatgaataaaaggatgggctcatacaccttcatagctcttttcaaaaaggatgcttataatttaaaggatgtcctaatgggaaggaaaggtacagggcaagaggctgtttcacattttagtccattagtctttggcagagcccaaccaaggccaaattcacctaggatgcccaatggctgtggggatctccacagggtcaagtaagcaaacccaaatgaacatgttggattaaaaaaaaaacaagatctagaaactcttgaaggaagagcttcaccctgaaaagggaagaggaaaatgcttgaaggggaagggcggagggtcagtgtgtgatctctgctgtggtgctgggcaggggcttaggagttaagccaagggtgccggagacactcggcggcagtggctctcttctcagggatcagctccaacatgggcagtaagaaatctgtgaagccagctgcctcttcctgcgaccactcatacttctccactagaacctcaaaaaggccccaaggtttcagcttcgtgatatgtttcaggtcaccttttttggtgaaaaattccttggaatattttcctgccacaatgagcttgcgaggcaccttccccagaagttctatgatcaatgcaatgtgatcttcatctcgagtgtactcttcccctgaatgaggttcaaacaaatagtcacctgtggccagttcaaaggc

SEQ ID NO: 731 - DNA, 2695 bp, Homo sapiens
  misc_feature (79)..(79): second gene starts at postion 79
atggcgtcggagctagagccagaggtgcaggccatcgaccggagcttgctggaatgttcggccgaggagattgcgggggcctttgaactggccacaggtgactatttgtttgaacctcattcaggggaagagtacactcgagatgaagatcacattgcattgatcatagaacttctggggaaggtgcctcgcaagctcattgtggcaggaaaatattccaaggaatttttcaccaaaaaaggtgacctgaaacatatcacgaagctgaaaccttggggcctttttgaggttctagtggagaagtatgagtggtcgcaggaagaggcagctggcttcacagatttcttactgcccatgttggagctgatccctgagaagagagccactgccgccgagtgtctccggcacccttggcttaactcctaagcccctgcccagcaccacagcagagatcacacactgaccctccgcccttccccttcaagcattttcctcttcccttttcagggtgaagctcttccttcaagagtttctagatcttgttttttttttaatccaacatgttcatttgggtttgcttacttgaccctgtggagatccccacagccattgggcatcctaggtgaatttggccttggttgggctctgccaaagactaatggactaaaatgtgaaacagcctcttgccctgtacctttccttcccattaggacatcctttaaattataagcatcctttttgaaaagagctatgaaggtgtatgagcccatccttttattcattgactctaagagtcaaattttctagtgcatatcctattgccagcataaggatgaggagggggaaagggtcttaattctatgtacagcagagacattaaacttgctgtgtccgggctgcatcatcttcctggactgtttctgttgttctctgtgttcacattttttcctgcaacttttaagctactgtcttttttaaatagctatatgaacaccaaatttgggtaccattttatcactgttcaaagcactgtcaaattcctttcatcctttaatagttaagatctttgaatcttcagtctgatttttaatgtaagcaaaaacagaaccattgaatagtaatttcttgagaacctcaggtgttctataaacagtcctttcctgtatgtcttctattaccctaagaccagagttattttggttggttgttttgttttattttttgtttttgtatccatggctggcactttactcattgcacttgagtttattgccccataactaaaggatcaggatgatggtagaacggagatctgggtttcagagctttcccatttaagaaaaatagatcttgagattctgattcttttccaaacagtcccctgctttcatgtacagctttttctttaccttacccaaaattctggccttgaagcagttttcctctatggctttgcctttctgattttctcagaggctcgagtctttaatataaccccaaatgaaagaaccaaggggaggggtgggatggcacttttttttgttggtcttgttttgttttgttttttggttggttggttcgttattttttaagattagccattctctgctgctatttccctacataatgtcaatttttaaccataattttgacatgattgagatgtacttgaggcttttttgttttaattgagaaaagactttgcaattttttttttaggatgagcctctcctagacttgacctagaatattacatattcctccagtaagtaatactgaagagcaaaagagaggcaggattggggtcacagccgcttcttcagcatggaccaagtgggccttggggattgcagcgttctcgaagtggctgtaggactcgaatttacagaaagccacagaggtgcaacttgaggctctgctagcaagccaccagtgaggctattgggtaaccacctttctatacaggagattggaatctactttgtcatttatccaccacagtgacaaaggaaaagtggtgccgttatgcaatccatttaactcataaacatattactctgagtaactggccagccattcatcggatccttcattgggtactcctgaaatcagacatgttcctgtagaaagaattttaagttaggctttctatgcacctatcaagaatcaagagaatagattgtatcaaacaacggcagggaaatccttcagcaattctaatccactttgggttttcagctgtttttacatctaaagcaatagactagaactgaattatcttctacatagtaaaatcacaattgtggaattacaggaattctggtgatattaaggtgaaataacaaaacacaaaaggccctattttaacagttgatgtgacagtaagttttaatagaacctgtaacttcattttggaaatgcttctccaccaaataagggctttttcccctatttaaggagccagatggattgaaagatgtggaaataggcagctgtagatcttgatcttccaggtaccccatgtacctttattgagcttaattataatactgtcaaattgccacgatctcactaaaggatttctatttgctgtcagttaaaaataaagccctaaatacatttttattctttctactgagggcattgtctgttttctttgtaaatgccgtacaataaacaaattatttaataacct

SEQ ID NO: 732 - DNA, 2695 bp, Homo sapiens; identical to SEQ ID NO: 730
  misc_feature (79)..(79): second gene starts at position 79

SEQ ID NO: 733 - DNA, 2695 bp, Homo sapiens; identical to SEQ ID NO: 731
  misc_feature (79)..(79): second gene starts at position 79

SEQ ID NO: 734 - DNA, 4550 bp, Homo sapiens
  misc_feature (21)..(21): second gene starts at position 21
accagtagccgcggacctcggtttattcagtcaccatgaagctgctgctgctgcacccggccttccagagctgcctcctgctgaccctgcttggcttatggagaaccacccctgaggctcacgcttcatccctgggtgcaccagctatcagcgctgcctccttcctgcaggatctaatacatcggtatggcgagggtgacagcctcactctgcagcagctgaaggccctactcaaccacctggatgtgggagtgggccggggtaatgtcacccagcacgtgcaaggacacaggaacctctccacgtgctttagttctggagacctcttcactgcccacaatttcagcgagcagtcgcggattgggagcagcgagctccaggagttctgccccaccatcctccagcagctggattcccgggcctgcacctcggagaaccaggaaaacgaggagaatgagcagacggaggaggggcggccaagcgctgttgaagtgtggggctttggttttctcagtgtctcactgattaacctggcctctctcctgggagtcctcgtcctgccctgcacagagaaagcgtttttcagccgtgtgctcacttacttcatcgccctgtccattggaacgctgctgtctaacgcgctattccagctcatcccagaggcatttggtttcaaccctctggaagattattatgtctccaagtctgcagtggtgtttgggggcttttatcttttctttttcacagagaagatcttgaagattcttcttaagcagaaaaatgagcatcatcatggacacagccattatgcctctgagtcgcttccctccaagaaggaccaggaggagggggtgatggagaagctgcagaacggggacctggaccacatgattcctcagcactgcagcagtgagctggacggcaaggcgcccatggtggacgagaaggtcattgtgggctcgctctctgtgcaggacctgcaggcttcccagagtgcttgctactggctgaaaggtgtccgctactctgatatcggcactctggcctggatgatcactctgagcgacggcctccataatttcatcgatggcctggccatcggtgcttccttcactgtgtcagttttccaaggcatcagcacctcggtggccatcctctgtgaggagttcccacatgagctaggagactttgtcatcctgctcaacgctgggatgagcatccaacaagctctcttcttcaacttcctttctgcctgctgctgctacctgggtctggcctttggcatcctggccggcagccacttctctgccaactggatttttgcgctagctggaggaatgttcttgtatatttctctggctgatatgttccctgagatgaatgaggtctgtcaagaggatgaaaggaagggcagcatcttgattccatttatcatccagaacctgggcctcctgactggattcaccatcatggtggtcctcaccatgtattcaggacagatccagattgggtagggctctgccaagagcctgtgggactggaagtcgggccctgggctgcccgatcgccagcccgaggacttaccatccacaatgcaccacggaagaggccgttctatgaaaaactgacacagactgtattcctgcattcaaatgtcagccgtttgtaaaatgctgtatcctaggaataagctgccctggtaaccagtctctagctagtgcctcttgccctctcctcacctccttttctctcagtgactctggaacctgaatgcagcttacaagacaagcctgacttttttctctgattaccttggcctcctcttggaaccagtgctgaaaggttttgaatcctttacccaacaatgcaaaaatagagccaatggttataacttggctagaaatatcaagagttgaatccatagtgtggggcccatgactctagctgggcaccttggacctccagctggccaatagaagagacaggagacaggaagccttcccattttttcaaagtctgtttaattgcctattacttctctcaaagagaacctgaagtcagaacacatgagcagggtgagaggtgaggcaaggttcatcctgaatgggagaggaagtcgaaccactgctgtgtgtcttgtcaggatgctcacttgttcctactgagatgctggatattgattttgtaacagcacctggtgtttcacggctgtccgagtgagctaacgtggcggtgtggctgcctggacctcctctttcaggttaacgctgacagaatggaggctcaggctgtctgcaagaaaacagttggtttggctgtgattttgacctcctcttccccactgccatcttctaagagactttgtagctgcctcctagaagcacattctgagcacatttgagacctctgtgttagaggggagactgcacaaactatcctcccccaggttgagacgtctgcagagtggcaagctgacttgtagaaatggggtgccatttatgctctacttagacaagggtaatcagaaatggaatcagtgcaggcaaaatttaggatttgccgcttccataaatcaaagcatgactaatagggggtctctgaaatgtaagggcacaaacttcacttagggcatcgcagatgtttgcagaatggttggcctaatgattatgctacagatgggttttaaatgacccgtctaggttactgcttccttgcaaaaaaagtcgaatcctgcattgaattgaatatgaatttctctaactctctccagaaaatggatggagataacttgtctttaaaactgtaggccagccttagccactgtggagcccttgcctccgagctctggcttcaaggggagctcttctccaggttcactaggtgaattgatttattattatcatattgataatgtgagattctttagccactttggggagcctgtctctccagaagcctttcttagtggtgcccacagttggagcccaggggccatgtttgcaaactgattcatgtgcatggctgacaggagtactggttcactaccaatgcctgagcttttctcttacatagaaaaactgtccgctctcagtaatcacaagcagcatccgttttgttttctcttcttgggagacatctgtcaaaccaggaatattcttgaaaagaacgtgagcaggaaaaactgctggtgatactttttttaagttttgtttttatcttgcctgttggcttcaatacatttgagaatacgctgaagagggaaaatttcagtgatggagattctagattaaatatcaggactgatttcctggtgggattatggtccagttttaccaaagaaccaattccttgaatgttggaatctaactttttatattgtcattattattgttgtttttaaacggttctttgtcttttctgttttatttttctcaagctgctttcaggagctagcagaaaataactcaaagttgaagactctggaagattttgctttaacctaactcgcattgatgtattaaatttataattttagcattcccaatagatcctatcattccttaaacataataccctttgtcttggagtagaatactaagttagagttagtggatttctagtttaggagaggagctcaaaactataatctttaacaaattgaaaaatgaaatagggtgttttccctttttgtgcacacctatattaccttaagaaatttccttccatagacagctgcctcaaagggaaatcctctttaaaccgtagttggcgcagaggtcagtcctagtcggagcttaggaggggcggagacgctcacatcgtctgacttgagtcgccactgattgtggcaacagctttgcctcatgagtcaaaaattggcaatttcttttgatttttagttgttgaatttgctgtttcaagcatttgtacatattagaagtctaaggagtagcaagtcagtgggaggactttttcacccctggcattagcagcttcgacctcattttccagatgcaccagctcctattaataagttagcaaggaaagtgtatgtcacgtgcaggaacagtgaggcagggacaggggttctgctccttctcacttcaccaccggcacacagcttgcccctgtctttgcccccaaaggtattttgtgtctagtgtcaaattggagctattcttcactggtccttaaccttgggttttaaaaagaaggcttctctgtttgggtagcgtaagagctgagtatagtaagtcctcttccaaagagatggcaatatgctgggcatctactttaaaacaaagttgtctgatttttgcaagagaggttaggattttattgttcttatttccctttacagttctgcagttccatcacagtatttttttaaataactcaggtgtatgagaagaaattagaaaagaaaattaacttatgtggactgtaaatgttttatttgtaagattctataaataaagctatattctgtaattgttgagaatcccacgggtgatcatttgcaataaatgtggatgtaatgaaggctgttg

SEQ ID NO: 735 - DNA, 4550 bp, Homo sapiens
  misc_feature (21)..(21): second gene starts at position 21
accagtagccgcggacctcggtttattcagtcaccatgaagctgctgctgctgcacccggccttccagagctgcctcctgctgaccctgcttggcttatggagaaccacccctgaggctcacgcttcatccctgggtgcaccagctatcagcgctgcctccttcctgcaggatctaatacatcggtatggcgagggtgacagcctcactctgcagcagctgaaggccctactcaaccacctggatgtgggagtgggccggggtaatgtcacccagcacgtgcaaggacacaggaacctctccacgtgctttagttctggagacctcttcactgcccacaatttcagcgagcagtcgcggattgggagcagcgagctccaggagttctgccccaccatcctccagcagctggattcccgggcctgcacctcggagaaccaggaaaacgaggagaatgagcagacggaggaggggcggccaagcgctgttgaagtgtggggatacggtctcctctgtgtgaccgtcatctccctctgctccctcctgggggccagcgtggtgcccttcatgaagaagaccttttacaagaggctgctgctctacttcatagctctggcgattggaaccctctactccaacgccctcttccagctcatcccggaggcatttggtttcaaccctctggaagattattatgtctccaagtctgcagtggtgtttgggggcttttatcttttctttttcacagagaagatcttgaagattcttcttaagcagaaaaatgagcatcatcatggacacagccattatgcctctgagtcgcttccctccaagaaggaccaggaggagggggtgatggagaagctgcagaacggggacctggaccacatgattcctcagcactgcagcagtgagctggacggcaaggcgcccatggtggacgagaaggtcattgtgggctcgctctctgtgcaggacctgcaggcttcccagagtgcttgctactggctgaaaggtgtccgctactctgatatcggcactctggcctggatgatcactctgagcgacggcctccataatttcatcgatggcctggccatcggtgcttccttcactgtgtcagttttccaaggcatcagcacctcggtggccatcctctgtgaggagttcccacatgagctaggagactttgtcatcctgctcaacgctgggatgagcatccaacaagctctcttcttcaacttcctttctgcctgctgctgctacctgggtctggcctttggcatcctggccggcagccacttctctgccaactggatttttgcgctagctggaggaatgttcttgtatatttctctggctgatatgttccctgagatgaatgaggtctgtcaagaggatgaaaggaagggcagcatcttgattccatttatcatccagaacctgggcctcctgactggattcaccatcatggtggtcctcaccatgtattcaggacagatccagattgggtagggctctgccaagagcctgtgggactggaagtcgggccctgggctgcccgatcgccagcccgaggacttaccatccacaatgcaccacggaagaggccgttctatgaaaaactgacacagactgtattcctgcattcaaatgtcagccgtttgtaaaatgctgtatcctaggaataagctgccctggtaaccagtctctagctagtgcctcttgccctctcctcacctccttttctctcagtgactctggaacctgaatgcagcttacaagacaagcctgacttttttctctgattaccttggcctcctcttggaaccagtgctgaaaggttttgaatcctttacccaacaatgcaaaaatagagccaatggttataacttggctagaaatatcaagagttgaatccatagtgtggggcccatgactctagctgggcaccttggacctccagctggccaatagaagagacaggagacaggaagccttcccattttttcaaagtctgtttaattgcctattacttctctcaaagagaacctgaagtcagaacacatgagcagggtgagaggtgaggcaaggttcatcctgaatgggagaggaagtcgaaccactgctgtgtgtcttgtcaggatgctcacttgttcctactgagatgctggatattgattttgtaacagcacctggtgtttcacggctgtccgagtgagctaacgtggcggtgtggctgcctggacctcctctttcaggttaacgctgacagaatggaggctcaggctgtctgcaagaaaacagttggtttggctgtgattttgacctcctcttccccactgccatcttctaagagactttgtagctgcctcctagaagcacattctgagcacatttgagacctctgtgttagaggggagactgcacaaactatcctcccccaggttgagacgtctgcagagtggcaagctgacttgtagaaatggggtgccatttatgctctacttagacaagggtaatcagaaatggaatcagtgcaggcaaaatttaggatttgccgcttccataaatcaaagcatgactaatagggggtctctgaaatgtaagggcacaaacttcacttagggcatcgcagatgtttgcagaatggttggcctaatgattatgctacagatgggttttaaatgacccgtctaggttactgcttccttgcaaaaaaagtcgaatcctgcattgaattgaatatgaatttctctaactctctccagaaaatggatggagataacttgtctttaaaactgtaggccagccttagccactgtggagcccttgcctccgagctctggcttcaaggggagctcttctccaggttcactaggtgaattgatttattattatcatattgataatgtgagattctttagccactttggggagcctgtctctccagaagcctttcttagtggtgcccacagttggagcccaggggccatgtttgcaaactgattcatgtgcatggctgacaggagtactggttcactaccaatgcctgagcttttctcttacatagaaaaactgtccgctctcagtaatcacaagcagcatccgttttgttttctcttcttgggagacatctgtcaaaccaggaatattcttgaaaagaacgtgagcaggaaaaactgctggtgatactttttttaagttttgtttttatcttgcctgttggcttcaatacatttgagaatacgctgaagagggaaaatttcagtgatggagattctagattaaatatcaggactgatttcctggtgggattatggtccagttttaccaaagaaccaattccttgaatgttggaatctaactttttatattgtcattattattgttgtttttaaacggttctttgtcttttctgttttatttttctcaagctgctttcaggagctagcagaaaataactcaaagttgaagactctggaagattttgctttaacctaactcgcattgatgtattaaatttataattttagcattcccaatagatcctatcattccttaaacataataccctttgtcttggagtagaatactaagttagagttagtggatttctagtttaggagaggagctcaaaactataatctttaacaaattgaaaaatgaaatagggtgttttccctttttgtgcacacctatattaccttaagaaatttccttccatagacagctgcctcaaagggaaatcctctttaaaccgtagttggcgcagaggtcagtcctagtcggagcttaggaggggcggagacgctcacatcgtctgacttgagtcgccactgattgtggcaacagctttgcctcatgagtcaaaaattggcaatttcttttgatttttagttgttgaatttgctgtttcaagcatttgtacatattagaagtctaaggagtagcaagtcagtgggaggactttttcacccctggcattagcagcttcgacctcattttccagatgcaccagctcctattaataagttagcaaggaaagtgtatgtcacgtgcaggaacagtgaggcagggacaggggttctgctccttctcacttcaccaccggcacacagcttgcccctgtctttgcccccaaaggtattttgtgtctagtgtcaaattggagctattcttcactggtccttaaccttgggttttaaaaagaaggcttctctgtttgggtagcgtaagagctgagtatagtaagtcctcttccaaagagatggcaatatgctgggcatctactttaaaacaaagttgtctgatttttgcaagagaggttaggattttattgttcttatttccctttacagttctgcagttccatcacagtatttttttaaataactcaggtgtatgagaagaaattagaaaagaaaattaacttatgtggactgtaaatgttttatttgtaagattctataaataaagctatattctgtaattgttgagaatcccacgggtgatcatttgcaataaatgtggatgtaatgaaggctgttg

SEQ ID NO: 736 - DNA, 1602 bp, Homo sapiens
  misc_feature (21)..(21): second gene starts at position 21
accagtagccgcggacctcggtttattcagtcaccatgaagctgctgctgctgcacccggccttccagagctgcctcctgctgaccctgcttggcttatggagaaccacccctgaggctcacgcttcatccctgggtgcaccagctatcagcgctgcctccttcctgcaggatctaatacatcggtatggcgagggtgacagcctcactctgcagcagctgaaggccctactcaaccacctggatgtgggagtgggccggggtaatgtcacccagcacgtgcaaggacacaggaacctctccacgtgctttagttctggagacctcttcactgcccacaatttcagcgagcagtcgcggattgggagcagcgagctccaggagttctgccccaccatcctccagcagctggattcccgggcctgcacctcggagaaccaggaaaacgaggagaatgagcagacggaggaggggcggccaagcgctgttgaagtgtggggatacggtctcctctgtgtgaccgtcatctccctctgctccctcctgggggccagcgtggtgcccttcatgaagaagaccttttacaagaggctgctgctctacttcatagctctggcgattggaaccctctactccaacgccctcttccagctcatcccggaggcatttggtttcaaccctctggaagattattatgtctccaagtctgcagtggtgtttgggggcttttatcttttctttttcacagagaagatcttgaagattcttcttaagcagaaaaatgagcatcatcatggacacagccattatgcctctgagtcgcttccctccaagaaggaccaggaggagggggtgatggagaagctgcagaacggggacctggaccacatgattcctcagcactgcagcagtgagctggacggcaaggcgcccatggtggacgagaaggtcattgtgggctcgctctctgtgcaggacctgcaggcttcccagagtgcttgctactggctgaaaggtgtccgctactctgatatcggcactctggcctggatgatcactctgagcgacggcctccataatttcatcgatggcctggccatcggtgcttccttcactgtgtcagttttccaaggcatcagcacctcggtggccatcctctgtgaggagttcccacatgagctaggagactttgtcatcctgctcaacgctgggatgagcatccaacaagctctcttcttcaacttcctttctgcctgctgctgctacctgggtctggcctttggcatcctggccggcagccacttctctgccaactggatttttgcgctagctggaggaatgttcttgtatatttctctggctgatatgatggagttttgctctgttgcccaggctggagtgcaatggtgccatctcagctcactgcaacctctgccgcttgggttgaagcgattatcctgtctaagcctcccgagtaactgagccagccatgtttgttaataaaaatggggacaatactgtatatatatggttatattttagctttttcacttttcagtatctcctgaggcttttctcatgtcattaaatatttttctaattt

SEQ ID NO: 737 - DNA, 4550 bp, Homo sapiens; identical to SEQ ID NO: 735
  misc_feature (21)..(21): second gene starts at position 21

SEQ ID NO: 738 - DNA, 4550 bp, Homo sapiens
  misc_feature (21)..(21): second gene starts at position 21
ggacctcggtgagtacaagggtttattcagtcaccatgaagctgctgctgctgcacccggccttccagagctgcctcctgctgaccctgcttggcttatggagaaccacccctgaggctcacgcttcatccctgggtgcaccagctatcagcgctgcctccttcctgcaggatctaatacatcggtatggcgagggtgacagcctcactctgcagcagctgaaggccctactcaaccacctggatgtgggagtgggccggggtaatgtcacccagcacgtgcaaggacacaggaacctctccacgtgctttagttctggagacctcttcactgcccacaatttcagcgagcagtcgcggattgggagcagcgagctccaggagttctgccccaccatcctccagcagctggattcccgggcctgcacctcggagaaccaggaaaacgaggagaatgagcagacggaggaggggcggccaagcgctgttgaagtgtggggctttggttttctcagtgtctcactgattaacctggcctctctcctgggagtcctcgtcctgccctgcacagagaaagcgtttttcagccgtgtgctcacttacttcatcgccctgtccattggaacgctgctgtctaacgcgctattccagctcatcccagaggcatttggtttcaaccctctggaagattattatgtctccaagtctgcagtggtgtttgggggcttttatcttttctttttcacagagaagatcttgaagattcttcttaagcagaaaaatgagcatcatcatggacacagccattatgcctctgagtcgcttccctccaagaaggaccaggaggagggggtgatggagaagctgcagaacggggacctggaccacatgattcctcagcactgcagcagtgagctggacggcaaggcgcccatggtggacgagaaggtcattgtgggctcgctctctgtgcaggacctgcaggcttcccagagtgcttgctactggctgaaaggtgtccgctactctgatatcggcactctggcctggatgatcactctgagcgacggcctccataatttcatcgatggcctggccatcggtgcttccttcactgtgtcagttttccaaggcatcagcacctcggtggccatcctctgtgaggagttcccacatgagctaggagactttgtcatcctgctcaacgctgggatgagcatccaacaagctctcttcttcaacttcctttctgcctgctgctgctacctgggtctggcctttggcatcctggccggcagccacttctctgccaactggatttttgcgctagctggaggaatgttcttgtatatttctctggctgatatgttccctgagatgaatgaggtctgtcaagaggatgaaaggaagggcagcatcttgattccatttatcatccagaacctgggcctcctgactggattcaccatcatggtggtcctcaccatgtattcaggacagatccagattgggtagggctctgccaagagcctgtgggactggaagtcgggccctgggctgcccgatcgccagcccgaggacttaccatccacaatgcaccacggaagaggccgttctatgaaaaactgacacagactgtattcctgcattcaaatgtcagccgtttgtaaaatgctgtatcctaggaataagctgccctggtaaccagtctctagctagtgcctcttgccctctcctcacctccttttctctcagtgactctggaacctgaatgcagcttacaagacaagcctgacttttttctctgattaccttggcctcctcttggaaccagtgctgaaaggttttgaatcctttacccaacaatgcaaaaatagagccaatggttataacttggctagaaatatcaagagttgaatccatagtgtggggcccatgactctagctgggcaccttggacctccagctggccaatagaagagacaggagacaggaagccttcccattttttcaaagtctgtttaattgcctattacttctctcaaagagaacctgaagtcagaacacatgagcagggtgagaggtgaggcaaggttcatcctgaatgggagaggaagtcgaaccactgctgtgtgtcttgtcaggatgctcacttgttcctactgagatgctggatattgattttgtaacagcacctggtgtttcacggctgtccgagtgagctaacgtggcggtgtggctgcctggacctcctctttcaggttaacgctgacagaatggaggctcaggctgtctgcaagaaaacagttggtttggctgtgattttgacctcctcttccccactgccatcttctaagagactttgtagctgcctcctagaagcacattctgagcacatttgagacctctgtgttagaggggagactgcacaaactatcctcccccaggttgagacgtctgcagagtggcaagctgacttgtagaaatggggtgccatttatgctctacttagacaagggtaatcagaaatggaatcagtgcaggcaaaatttaggatttgccgcttccataaatcaaagcatgactaatagggggtctctgaaatgtaagggcacaaacttcacttagggcatcgcagatgtttgcagaatggttggcctaatgattatgctacagatgggttttaaatgacccgtctaggttactgcttccttgcaaaaaaagtcgaatcctgcattgaattgaatatgaatttctctaactctctccagaaaatggatggagataacttgtctttaaaactgtaggccagccttagccactgtggagcccttgcctccgagctctggcttcaaggggagctcttctccaggttcactaggtgaattgatttattattatcatattgataatgtgagattctttagccactttggggagcctgtctctccagaagcctttcttagtggtgcccacagttggagcccaggggccatgtttgcaaactgattcatgtgcatggctgacaggagtactggttcactaccaatgcctgagcttttctcttacatagaaaaactgtccgctctcagtaatcacaagcagcatccgttttgttttctcttcttgggagacatctgtcaaaccaggaatattcttgaaaagaacgtgagcaggaaaaactgctggtgatactttttttaagttttgtttttatcttgcctgttggcttcaatacatttgagaatacgctgaagagggaaaatttcagtgatggagattctagattaaatatcaggactgatttcctggtgggattatggtccagttttaccaaagaaccaattccttgaatgttggaatctaactttttatattgtcattattattgttgtttttaaacggttctttgtcttttctgttttatttttctcaagctgctttcaggagctagcagaaaataactcaaagttgaagactctggaagattttgctttaacctaactcgcattgatgtattaaatttataattttagcattcccaatagatcctatcattccttaaacataataccctttgtcttggagtagaatactaagttagagttagtggatttctagtttaggagaggagctcaaaactataatctttaacaaattgaaaaatgaaatagggtgttttccctttttgtgcacacctatattaccttaagaaatttccttccatagacagctgcctcaaagggaaatcctctttaaaccgtagttggcgcagaggtcagtcctagtcggagcttaggaggggcggagacgctcacatcgtctgacttgagtcgccactgattgtggcaacagctttgcctcatgagtcaaaaattggcaatttcttttgatttttagttgttgaatttgctgtttcaagcatttgtacatattagaagtctaaggagtagcaagtcagtgggaggactttttcacccctggcattagcagcttcgacctcattttccagatgcaccagctcctattaataagttagcaaggaaagtgtatgtcacgtgcaggaacagtgaggcagggacaggggttctgctccttctcacttcaccaccggcacacagcttgcccctgtctttgcccccaaaggtattttgtgtctagtgtcaaattggagctattcttcactggtccttaaccttgggttttaaaaagaaggcttctctgtttgggtagcgtaagagctgagtatagtaagtcctcttccaaagagatggcaatatgctgggcatctactttaaaacaaagttgtctgatttttgcaagagaggttaggattttattgttcttatttccctttacagttctgcagttccatcacagtatttttttaaataactcaggtgtatgagaagaaattagaaaagaaaattaacttatgtggactgtaaatgttttatttgtaagattctataaataaagctatattctgtaattgttgagaatcccacgggtgatcatttgcaataaatgtggatgtaatgaaggctgttg

SEQ ID NO: 739 - DNA, 4550 bp, Homo sapiens
  misc_feature (21)..(21): second gene starts at position 21
ggacctcggtgagtacaagggtttattcagtcaccatgaagctgctgctgctgcacccggccttccagagctgcctcctgctgaccctgcttggcttatggagaaccacccctgaggctcacgcttcatccctgggtgcaccagctatcagcgctgcctccttcctgcaggatctaatacatcggtatggcgagggtgacagcctcactctgcagcagctgaaggccctactcaaccacctggatgtgggagtgggccggggtaatgtcacccagcacgtgcaaggacacaggaacctctccacgtgctttagttctggagacctcttcactgcccacaatttcagcgagcagtcgcggattgggagcagcgagctccaggagttctgccccaccatcctccagcagctggattcccgggcctgcacctcggagaaccaggaaaacgaggagaatgagcagacggaggaggggcggccaagcgctgttgaagtgtggggatacggtctcctctgtgtgaccgtcatctccctctgctccctcctgggggccagcgtggtgcccttcatgaagaagaccttttacaagaggctgctgctctacttcatagctctggcgattggaaccctctactccaacgccctcttccagctcatcccggaggcatttggtttcaaccctctggaagattattatgtctccaagtctgcagtggtgtttgggggcttttatcttttctttttcacagagaagatcttgaagattcttcttaagcagaaaaatgagcatcatcatggacacagccattatgcctctgagtcgcttccctccaagaaggaccaggaggagggggtgatggagaagctgcagaacggggacctggaccacatgattcctcagcactgcagcagtgagctggacggcaaggcgcccatggtggacgagaaggtcattgtgggctcgctctctgtgcaggacctgcaggcttcccagagtgcttgctactggctgaaaggtgtccgctactctgatatcggcactctggcctggatgatcactctgagcgacggcctccataatttcatcgatggcctggccatcggtgcttccttcactgtgtcagttttccaaggcatcagcacctcggtggccatcctctgtgaggagttcccacatgagctaggagactttgtcatcctgctcaacgctgggatgagcatccaacaagctctcttcttcaacttcctttctgcctgctgctgctacctgggtctggcctttggcatcctggccggcagccacttctctgccaactggatttttgcgctagctggaggaatgttcttgtatatttctctggctgatatgttccctgagatgaatgaggtctgtcaagaggatgaaaggaagggcagcatcttgattccatttatcatccagaacctgggcctcctgactggattcaccatcatggtggtcctcaccatgtattcaggacagatccagattgggtagggctctgccaagagcctgtgggactggaagtcgggccctgggctgcccgatcgccagcccgaggacttaccatccacaatgcaccacggaagaggccgttctatgaaaaactgacacagactgtattcctgcattcaaatgtcagccgtttgtaaaatgctgtatcctaggaataagctgccctggtaaccagtctctagctagtgcctcttgccctctcctcacctccttttctctcagtgactctggaacctgaatgcagcttacaagacaagcctgacttttttctctgattaccttggcctcctcttggaaccagtgctgaaaggttttgaatcctttacccaacaatgcaaaaatagagccaatggttataacttggctagaaatatcaagagttgaatccatagtgtggggcccatgactctagctgggcaccttggacctccagctggccaatagaagagacaggagacaggaagccttcccattttttcaaagtctgtttaattgcctattacttctctcaaagagaacctgaagtcagaacacatgagcagggtgagaggtgaggcaaggttcatcctgaatgggagaggaagtcgaaccactgctgtgtgtcttgtcaggatgctcacttgttcctactgagatgctggatattgattttgtaacagcacctggtgtttcacggctgtccgagtgagctaacgtggcggtgtggctgcctggacctcctctttcaggttaacgctgacagaatggaggctcaggctgtctgcaagaaaacagttggtttggctgtgattttgacctcctcttccccactgccatcttctaagagactttgtagctgcctcctagaagcacattctgagcacatttgagacctctgtgttagaggggagactgcacaaactatcctcccccaggttgagacgtctgcagagtggcaagctgacttgtagaaatggggtgccatttatgctctacttagacaagggtaatcagaaatggaatcagtgcaggcaaaatttaggatttgccgcttccataaatcaaagcatgactaatagggggtctctgaaatgtaagggcacaaacttcacttagggcatcgcagatgtttgcagaatggttggcctaatgattatgctacagatgggttttaaatgacccgtctaggttactgcttccttgcaaaaaaagtcgaatcctgcattgaattgaatatgaatttctctaactctctccagaaaatggatggagataacttgtctttaaaactgtaggccagccttagccactgtggagcccttgcctccgagctctggcttcaaggggagctcttctccaggttcactaggtgaattgatttattattatcatattgataatgtgagattctttagccactttggggagcctgtctctccagaagcctttcttagtggtgcccacagttggagcccaggggccatgtttgcaaactgattcatgtgcatggctgacaggagtactggttcactaccaatgcctgagcttttctcttacatagaaaaactgtccgctctcagtaatcacaagcagcatccgttttgttttctcttcttgggagacatctgtcaaaccaggaatattcttgaaaagaacgtgagcaggaaaaactgctggtgatactttttttaagttttgtttttatcttgcctgttggcttcaatacatttgagaatacgctgaagagggaaaatttcagtgatggagattctagattaaatatcaggactgatttcctggtgggattatggtccagttttaccaaagaaccaattccttgaatgttggaatctaactttttatattgtcattattattgttgtttttaaacggttctttgtcttttctgttttatttttctcaagctgctttcaggagctagcagaaaataactcaaagttgaagactctggaagattttgctttaacctaactcgcattgatgtattaaatttataattttagcattcccaatagatcctatcattccttaaacataataccctttgtcttggagtagaatactaagttagagttagtggatttctagtttaggagaggagctcaaaactataatctttaacaaattgaaaaatgaaatagggtgttttccctttttgtgcacacctatattaccttaagaaatttccttccatagacagctgcctcaaagggaaatcctctttaaaccgtagttggcgcagaggtcagtcctagtcggagcttaggaggggcggagacgctcacatcgtctgacttgagtcgccactgattgtggcaacagctttgcctcatgagtcaaaaattggcaatttcttttgatttttagttgttgaatttgctgtttcaagcatttgtacatattagaagtctaaggagtagcaagtcagtgggaggactttttcacccctggcattagcagcttcgacctcattttccagatgcaccagctcctattaataagttagcaaggaaagtgtatgtcacgtgcaggaacagtgaggcagggacaggggttctgctccttctcacttcaccaccggcacacagcttgcccctgtctttgcccccaaaggtattttgtgtctagtgtcaaattggagctattcttcactggtccttaaccttgggttttaaaaagaaggcttctctgtttgggtagcgtaagagctgagtatagtaagtcctcttccaaagagatggcaatatgctgggcatctactttaaaacaaagttgtctgatttttgcaagagaggttaggattttattgttcttatttccctttacagttctgcagttccatcacagtatttttttaaataactcaggtgtatgagaagaaattagaaaagaaaattaacttatgtggactgtaaatgttttatttgtaagattctataaataaagctatattctgtaattgttgagaatcccacgggtgatcatttgcaataaatgtggatgtaatgaaggctgttg

SEQ ID NO: 740 - DNA, 1602 bp, Homo sapiens
  misc_feature (21)..(21): second gene starts at position 21
ggacctcggtgagtacaagggtttattcagtcaccatgaagctgctgctgctgcacccggccttccagagctgcctcctgctgaccctgcttggcttatggagaaccacccctgaggctcacgcttcatccctgggtgcaccagctatcagcgctgcctccttcctgcaggatctaatacatcggtatggcgagggtgacagcctcactctgcagcagctgaaggccctactcaaccacctggatgtgggagtgggccggggtaatgtcacccagcacgtgcaaggacacaggaacctctccacgtgctttagttctggagacctcttcactgcccacaatttcagcgagcagtcgcggattgggagcagcgagctccaggagttctgccccaccatcctccagcagctggattcccgggcctgcacctcggagaaccaggaaaacgaggagaatgagcagacggaggaggggcggccaagcgctgttgaagtgtggggatacggtctcctctgtgtgaccgtcatctccctctgctccctcctgggggccagcgtggtgcccttcatgaagaagaccttttacaagaggctgctgctctacttcatagctctggcgattggaaccctctactccaacgccctcttccagctcatcccggaggcatttggtttcaaccctctggaagattattatgtctccaagtctgcagtggtgtttgggggcttttatcttttctttttcacagagaagatcttgaagattcttcttaagcagaaaaatgagcatcatcatggacacagccattatgcctctgagtcgcttccctccaagaaggaccaggaggagggggtgatggagaagctgcagaacggggacctggaccacatgattcctcagcactgcagcagtgagctggacggcaaggcgcccatggtggacgagaaggtcattgtgggctcgctctctgtgcaggacctgcaggcttcccagagtgcttgctactggctgaaaggtgtccgctactctgatatcggcactctggcctggatgatcactctgagcgacggcctccataatttcatcgatggcctggccatcggtgcttccttcactgtgtcagttttccaaggcatcagcacctcggtggccatcctctgtgaggagttcccacatgagctaggagactttgtcatcctgctcaacgctgggatgagcatccaacaagctctcttcttcaacttcctttctgcctgctgctgctacctgggtctggcctttggcatcctggccggcagccacttctctgccaactggatttttgcgctagctggaggaatgttcttgtatatttctctggctgatatgatggagttttgctctgttgcccaggctggagtgcaatggtgccatctcagctcactgcaacctctgccgcttgggttgaagcgattatcctgtctaagcctcccgagtaactgagccagccatgtttgttaataaaaatggggacaatactgtatatatatggttatattttagctttttcacttttcagtatctcctgaggcttttctcatgtcattaaatatttttctaattt

SEQ ID NO: 741 - DNA, 4550 bp, Homo sapiens; identical to SEQ ID NO: 739
  misc_feature (21)..(21): second gene starts at position 21

SEQ ID NO: 742 - DNA, 4673 bp, Homo sapiens
  misc_feature (144)..(144): second gene starts at position 144
accagtagccgcggacctcggtctggcggcttctctgttgacaactcagctggttccacaccctggcaattgtgaagagttggccaaatgtttgtccactgagctgatctcctctctggagcaccggggccaccaggagggaggtttattcagtcaccatgaagctgctgctgctgcacccggccttccagagctgcctcctgctgaccctgcttggcttatggagaaccacccctgaggctcacgcttcatccctgggtgcaccagctatcagcgctgcctccttcctgcaggatctaatacatcggtatggcgagggtgacagcctcactctgcagcagctgaaggccctactcaaccacctggatgtgggagtgggccggggtaatgtcacccagcacgtgcaaggacacaggaacctctccacgtgctttagttctggagacctcttcactgcccacaatttcagcgagcagtcgcggattgggagcagcgagctccaggagttctgccccaccatcctccagcagctggattcccgggcctgcacctcggagaaccaggaaaacgaggagaatgagcagacggaggaggggcggccaagcgctgttgaagtgtggggctttggttttctcagtgtctcactgattaacctggcctctctcctgggagtcctcgtcctgccctgcacagagaaagcgtttttcagccgtgtgctcacttacttcatcgccctgtccattggaacgctgctgtctaacgcgctattccagctcatcccagaggcatttggtttcaaccctctggaagattattatgtctccaagtctgcagtggtgtttgggggcttttatcttttctttttcacagagaagatcttgaagattcttcttaagcagaaaaatgagcatcatcatggacacagccattatgcctctgagtcgcttccctccaagaaggaccaggaggagggggtgatggagaagctgcagaacggggacctggaccacatgattcctcagcactgcagcagtgagctggacggcaaggcgcccatggtggacgagaaggtcattgtgggctcgctctctgtgcaggacctgcaggcttcccagagtgcttgctactggctgaaaggtgtccgctactctgatatcggcactctggcctggatgatcactctgagcgacggcctccataatttcatcgatggcctggccatcggtgcttccttcactgtgtcagttttccaaggcatcagcacctcggtggccatcctctgtgaggagttcccacatgagctaggagactttgtcatcctgctcaacgctgggatgagcatccaacaagctctcttcttcaacttcctttctgcctgctgctgctacctgggtctggcctttggcatcctggccggcagccacttctctgccaactggatttttgcgctagctggaggaatgttcttgtatatttctctggctgatatgttccctgagatgaatgaggtctgtcaagaggatgaaaggaagggcagcatcttgattccatttatcatccagaacctgggcctcctgactggattcaccatcatggtggtcctcaccatgtattcaggacagatccagattgggtagggctctgccaagagcctgtgggactggaagtcgggccctgggctgcccgatcgccagcccgaggacttaccatccacaatgcaccacggaagaggccgttctatgaaaaactgacacagactgtattcctgcattcaaatgtcagccgtttgtaaaatgctgtatcctaggaataagctgccctggtaaccagtctctagctagtgcctcttgccctctcctcacctccttttctctcagtgactctggaacctgaatgcagcttacaagacaagcctgacttttttctctgattaccttggcctcctcttggaaccagtgctgaaaggttttgaatcctttacccaacaatgcaaaaatagagccaatggttataacttggctagaaatatcaagagttgaatccatagtgtggggcccatgactctagctgggcaccttggacctccagctggccaatagaagagacaggagacaggaagccttcccattttttcaaagtctgtttaattgcctattacttctctcaaagagaacctgaagtcagaacacatgagcagggtgagaggtgaggcaaggttcatcctgaatgggagaggaagtcgaaccactgctgtgtgtcttgtcaggatgctcacttgttcctactgagatgctggatattgattttgtaacagcacctggtgtttcacggctgtccgagtgagctaacgtggcggtgtggctgcctggacctcctctttcaggttaacgctgacagaatggaggctcaggctgtctgcaagaaaacagttggtttggctgtgattttgacctcctcttccccactgccatcttctaagagactttgtagctgcctcctagaagcacattctgagcacatttgagacctctgtgttagaggggagactgcacaaactatcctcccccaggttgagacgtctgcagagtggcaagctgacttgtagaaatggggtgccatttatgctctacttagacaagggtaatcagaaatggaatcagtgcaggcaaaatttaggatttgccgcttccataaatcaaagcatgactaatagggggtctctgaaatgtaagggcacaaacttcacttagggcatcgcagatgtttgcagaatggttggcctaatgattatgctacagatgggttttaaatgacccgtctaggttactgcttccttgcaaaaaaagtcgaatcctgcattgaattgaatatgaatttctctaactctctccagaaaatggatggagataacttgtctttaaaactgtaggccagccttagccactgtggagcccttgcctccgagctctggcttcaaggggagctcttctccaggttcactaggtgaattgatttattattatcatattgataatgtgagattctttagccactttggggagcctgtctctccagaagcctttcttagtggtgcccacagttggagcccaggggccatgtttgcaaactgattcatgtgcatggctgacaggagtactggttcactaccaatgcctgagcttttctcttacatagaaaaactgtccgctctcagtaatcacaagcagcatccgttttgttttctcttcttgggagacatctgtcaaaccaggaatattcttgaaaagaacgtgagcaggaaaaactgctggtgatactttttttaagttttgtttttatcttgcctgttggcttcaatacatttgagaatacgctgaagagggaaaatttcagtgatggagattctagattaaatatcaggactgatttcctggtgggattatggtccagttttaccaaagaaccaattccttgaatgttggaatctaactttttatattgtcattattattgttgtttttaaacggttctttgtcttttctgttttatttttctcaagctgctttcaggagctagcagaaaataactcaaagttgaagactctggaagattttgctttaacctaactcgcattgatgtattaaatttataattttagcattcccaatagatcctatcattccttaaacataataccctttgtcttggagtagaatactaagttagagttagtggatttctagtttaggagaggagctcaaaactataatctttaacaaattgaaaaatgaaatagggtgttttccctttttgtgcacacctatattaccttaagaaatttccttccatagacagctgcctcaaagggaaatcctctttaaaccgtagttggcgcagaggtcagtcctagtcggagcttaggaggggcggagacgctcacatcgtctgacttgagtcgccactgattgtggcaacagctttgcctcatgagtcaaaaattggcaatttcttttgatttttagttgttgaatttgctgtttcaagcatttgtacatattagaagtctaaggagtagcaagtcagtgggaggactttttcacccctggcattagcagcttcgacctcattttccagatgcaccagctcctattaataagttagcaaggaaagtgtatgtcacgtgcaggaacagtgaggcagggacaggggttctgctccttctcacttcaccaccggcacacagcttgcccctgtctttgcccccaaaggtattttgtgtctagtgtcaaattggagctattcttcactggtccttaaccttgggttttaaaaagaaggcttctctgtttgggtagcgtaagagctgagtatagtaagtcctcttccaaagagatggcaatatgctgggcatctactttaaaacaaagttgtctgatttttgcaagagaggttaggattttattgttcttatttccctttacagttctgcagttccatcacagtatttttttaaataactcaggtgtatgagaagaaattagaaaagaaaattaacttatgtggactgtaaatgttttatttgtaagattctataaataaagctatattctgtaattgttgagaatcccacgggtgatcatttgcaataaatgtggatgtaatgaaggctgttg

SEQ ID NO: 743 - DNA, 4673 bp, Homo sapiens
  misc_feature (144)..(144): second gene starts at position 144
accagtagccgcggacctcggtctggcggcttctctgttgacaactcagctggttccacaccctggcaattgtgaagagttggccaaatgtttgtccactgagctgatctcctctctggagcaccggggccaccaggagggaggtttattcagtcaccatgaagctgctgctgctgcacccggccttccagagctgcctcctgctgaccctgcttggcttatggagaaccacccctgaggctcacgcttcatccctgggtgcaccagctatcagcgctgcctccttcctgcaggatctaatacatcggtatggcgagggtgacagcctcactctgcagcagctgaaggccctactcaaccacctggatgtgggagtgggccggggtaatgtcacccagcacgtgcaaggacacaggaacctctccacgtgctttagttctggagacctcttcactgcccacaatttcagcgagcagtcgcggattgggagcagcgagctccaggagttctgccccaccatcctccagcagctggattcccgggcctgcacctcggagaaccaggaaaacgaggagaatgagcagacggaggaggggcggccaagcgctgttgaagtgtggggatacggtctcctctgtgtgaccgtcatctccctctgctccctcctgggggccagcgtggtgcccttcatgaagaagaccttttacaagaggctgctgctctacttcatagctctggcgattggaaccctctactccaacgccctcttccagctcatcccggaggcatttggtttcaaccctctggaagattattatgtctccaagtctgcagtggtgtttgggggcttttatcttttctttttcacagagaagatcttgaagattcttcttaagcagaaaaatgagcatcatcatggacacagccattatgcctctgagtcgcttccctccaagaaggaccaggaggagggggtgatggagaagctgcagaacggggacctggaccacatgattcctcagcactgcagcagtgagctggacggcaaggcgcccatggtggacgagaaggtcattgtgggctcgctctctgtgcaggacctgcaggcttcccagagtgcttgctactggctgaaaggtgtccgctactctgatatcggcactctggcctggatgatcactctgagcgacggcctccataatttcatcgatggcctggccatcggtgcttccttcactgtgtcagttttccaaggcatcagcacctcggtggccatcctctgtgaggagttcccacatgagctaggagactttgtcatcctgctcaacgctgggatgagcatccaacaagctctcttcttcaacttcctttctgcctgctgctgctacctgggtctggcctttggcatcctggccggcagccacttctctgccaactggatttttgcgctagctggaggaatgttcttgtatatttctctggctgatatgttccctgagatgaatgaggtctgtcaagaggatgaaaggaagggcagcatcttgattccatttatcatccagaacctgggcctcctgactggattcaccatcatggtggtcctcaccatgtattcaggacagatccagattgggtagggctctgccaagagcctgtgggactggaagtcgggccctgggctgcccgatcgccagcccgaggacttaccatccacaatgcaccacggaagaggccgttctatgaaaaactgacacagactgtattcctgcattcaaatgtcagccgtttgtaaaatgctgtatcctaggaataagctgccctggtaaccagtctctagctagtgcctcttgccctctcctcacctccttttctctcagtgactctggaacctgaatgcagcttacaagacaagcctgacttttttctctgattaccttggcctcctcttggaaccagtgctgaaaggttttgaatcctttacccaacaatgcaaaaatagagccaatggttataacttggctagaaatatcaagagttgaatccatagtgtggggcccatgactctagctgggcaccttggacctccagctggccaatagaagagacaggagacaggaagccttcccattttttcaaagtctgtttaattgcctattacttctctcaaagagaacctgaagtcagaacacatgagcagggtgagaggtgaggcaaggttcatcctgaatgggagaggaagtcgaaccactgctgtgtgtcttgtcaggatgctcacttgttcctactgagatgctggatattgattttgtaacagcacctggtgtttcacggctgtccgagtgagctaacgtggcggtgtggctgcctggacctcctctttcaggttaacgctgacagaatggaggctcaggctgtctgcaagaaaacagttggtttggctgtgattttgacctcctcttccccactgccatcttctaagagactttgtagctgcctcctagaagcacattctgagcacatttgagacctctgtgttagaggggagactgcacaaactatcctcccccaggttgagacgtctgcagagtggcaagctgacttgtagaaatggggtgccatttatgctctacttagacaagggtaatcagaaatggaatcagtgcaggcaaaatttaggatttgccgcttccataaatcaaagcatgactaatagggggtctctgaaatgtaagggcacaaacttcacttagggcatcgcagatgtttgcagaatggttggcctaatgattatgctacagatgggttttaaatgacccgtctaggttactgcttccttgcaaaaaaagtcgaatcctgcattgaattgaatatgaatttctctaactctctccagaaaatggatggagataacttgtctttaaaactgtaggccagccttagccactgtggagcccttgcctccgagctctggcttcaaggggagctcttctccaggttcactaggtgaattgatttattattatcatattgataatgtgagattctttagccactttggggagcctgtctctccagaagcctttcttagtggtgcccacagttggagcccaggggccatgtttgcaaactgattcatgtgcatggctgacaggagtactggttcactaccaatgcctgagcttttctcttacatagaaaaactgtccgctctcagtaatcacaagcagcatccgttttgttttctcttcttgggagacatctgtcaaaccaggaatattcttgaaaagaacgtgagcaggaaaaactgctggtgatactttttttaagttttgtttttatcttgcctgttggcttcaatacatttgagaatacgctgaagagggaaaatttcagtgatggagattctagattaaatatcaggactgatttcctggtgggattatggtccagttttaccaaagaaccaattccttgaatgttggaatctaactttttatattgtcattattattgttgtttttaaacggttctttgtcttttctgttttatttttctcaagctgctttcaggagctagcagaaaataactcaaagttgaagactctggaagattttgctttaacctaactcgcattgatgtattaaatttataattttagcattcccaatagatcctatcattccttaaacataataccctttgtcttggagtagaatactaagttagagttagtggatttctagtttaggagaggagctcaaaactataatctttaacaaattgaaaaatgaaatagggtgttttccctttttgtgcacacctatattaccttaagaaatttccttccatagacagctgcctcaaagggaaatcctctttaaaccgtagttggcgcagaggtcagtcctagtcggagcttaggaggggcggagacgctcacatcgtctgacttgagtcgccactgattgtggcaacagctttgcctcatgagtcaaaaattggcaatttcttttgatttttagttgttgaatttgctgtttcaagcatttgtacatattagaagtctaaggagtagcaagtcagtgggaggactttttcacccctggcattagcagcttcgacctcattttccagatgcaccagctcctattaataagttagcaaggaaagtgtatgtcacgtgcaggaacagtgaggcagggacaggggttctgctccttctcacttcaccaccggcacacagcttgcccctgtctttgcccccaaaggtattttgtgtctagtgtcaaattggagctattcttcactggtccttaaccttgggttttaaaaagaaggcttctctgtttgggtagcgtaagagctgagtatagtaagtcctcttccaaagagatggcaatatgctgggcatctactttaaaacaaagttgtctgatttttgcaagagaggttaggattttattgttcttatttccctttacagttctgcagttccatcacagtatttttttaaataactcaggtgtatgagaagaaattagaaaagaaaattaacttatgtggactgtaaatgttttatttgtaagattctataaataaagctatattctgtaattgttgagaatcccacgggtgatcatttgcaataaatgtggatgtaatgaaggctgttg

SEQ ID NO: 744 - DNA, 1725 bp, Homo sapiens
  misc_feature (144)..(144): second gene starts at position 144
accagtagccgcggacctcggtctggcggcttctctgttgacaactcagctggttccacaccctggcaattgtgaagagttggccaaatgtttgtccactgagctgatctcctctctggagcaccggggccaccaggagggaggtttattcagtcaccatgaagctgctgctgctgcacccggccttccagagctgcctcctgctgaccctgcttggcttatggagaaccacccctgaggctcacgcttcatccctgggtgcaccagctatcagcgctgcctccttcctgcaggatctaatacatcggtatggcgagggtgacagcctcactctgcagcagctgaaggccctactcaaccacctggatgtgggagtgggccggggtaatgtcacccagcacgtgcaaggacacaggaacctctccacgtgctttagttctggagacctcttcactgcccacaatttcagcgagcagtcgcggattgggagcagcgagctccaggagttctgccccaccatcctccagcagctggattcccgggcctgcacctcggagaaccaggaaaacgaggagaatgagcagacggaggaggggcggccaagcgctgttgaagtgtggggatacggtctcctctgtgtgaccgtcatctccctctgctccctcctgggggccagcgtggtgcccttcatgaagaagaccttttacaagaggctgctgctctacttcatagctctggcgattggaaccctctactccaacgccctcttccagctcatcccggaggcatttggtttcaaccctctggaagattattatgtctccaagtctgcagtggtgtttgggggcttttatcttttctttttcacagagaagatcttgaagattcttcttaagcagaaaaatgagcatcatcatggacacagccattatgcctctgagtcgcttccctccaagaaggaccaggaggagggggtgatggagaagctgcagaacggggacctggaccacatgattcctcagcactgcagcagtgagctggacggcaaggcgcccatggtggacgagaaggtcattgtgggctcgctctctgtgcaggacctgcaggcttcccagagtgcttgctactggctgaaaggtgtccgctactctgatatcggcactctggcctggatgatcactctgagcgacggcctccataatttcatcgatggcctggccatcggtgcttccttcactgtgtcagttttccaaggcatcagcacctcggtggccatcctctgtgaggagttcccacatgagctaggagactttgtcatcctgctcaacgctgggatgagcatccaacaagctctcttcttcaacttcctttctgcctgctgctgctacctgggtctggcctttggcatcctggccggcagccacttctctgccaactggatttttgcgctagctggaggaatgttcttgtatatttctctggctgatatgatggagttttgctctgttgcccaggctggagtgcaatggtgccatctcagctcactgcaacctctgccgcttgggttgaagcgattatcctgtctaagcctcccgagtaactgagccagccatgtttgttaataaaaatggggacaatactgtatatatatggttatattttagctttttcacttttcagtatctcctgaggcttttctcatgtcattaaatatttttctaattt

SEQ ID NO: 745 - DNA, 4673 bp, Homo sapiens; identical to SEQ ID NO: 743
  misc_feature (144)..(144): second gene starts at position 144

SEQ ID NO: 746 - DNA, 4759 bp, Homo sapiens
  misc_feature (230)..(230): second gene starts at position 230
ggacctcggtgagtacaaggtggtggggggtcgccagcaggttccctctccccggccccagctctggacgctcaccccagtgcaacgccctgagtgacggaaagaggtctggcggcttctctgttgacaactcagctggttccacaccctggcaattgtgaagagttggccaaatgtttgtccactgagctgatctcctctctggagcaccggggccaccaggagggaggtttattcagtcaccatgaagctgctgctgctgcacccggccttccagagctgcctcctgctgaccctgcttggcttatggagaaccacccctgaggctcacgcttcatccctgggtgcaccagctatcagcgctgcctccttcctgcaggatctaatacatcggtatggcgagggtgacagcctcactctgcagcagctgaaggccctactcaaccacctggatgtgggagtgggccggggtaatgtcacccagcacgtgcaaggacacaggaacctctccacgtgctttagttctggagacctcttcactgcccacaatttcagcgagcagtcgcggattgggagcagcgagctccaggagttctgccccaccatcctccagcagctggattcccgggcctgcacctcggagaaccaggaaaacgaggagaatgagcagacggaggaggggcggccaagcgctgttgaagtgtggggctttggttttctcagtgtctcactgattaacctggcctctctcctgggagtcctcgtcctgccctgcacagagaaagcgtttttcagccgtgtgctcacttacttcatcgccctgtccattggaacgctgctgtctaacgcgctattccagctcatcccagaggcatttggtttcaaccctctggaagattattatgtctccaagtctgcagtggtgtttgggggcttttatcttttctttttcacagagaagatcttgaagattcttcttaagcagaaaaatgagcatcatcatggacacagccattatgcctctgagtcgcttccctccaagaaggaccaggaggagggggtgatggagaagctgcagaacggggacctggaccacatgattcctcagcactgcagcagtgagctggacggcaaggcgcccatggtggacgagaaggtcattgtgggctcgctctctgtgcaggacctgcaggcttcccagagtgcttgctactggctgaaaggtgtccgctactctgatatcggcactctggcctggatgatcactctgagcgacggcctccataatttcatcgatggcctggccatcggtgcttccttcactgtgtcagttttccaaggcatcagcacctcggtggccatcctctgtgaggagttcccacatgagctaggagactttgtcatcctgctcaacgctgggatgagcatccaacaagctctcttcttcaacttcctttctgcctgctgctgctacctgggtctggcctttggcatcctggccggcagccacttctctgccaactggatttttgcgctagctggaggaatgttcttgtatatttctctggctgatatgttccctgagatgaatgaggtctgtcaagaggatgaaaggaagggcagcatcttgattccatttatcatccagaacctgggcctcctgactggattcaccatcatggtggtcctcaccatgtattcaggacagatccagattgggtagggctctgccaagagcctgtgggactggaagtcgggccctgggctgcccgatcgccagcccgaggacttaccatccacaatgcaccacggaagaggccgttctatgaaaaactgacacagactgtattcctgcattcaaatgtcagccgtttgtaaaatgctgtatcctaggaataagctgccctggtaaccagtctctagctagtgcctcttgccctctcctcacctccttttctctcagtgactctggaacctgaatgcagcttacaagacaagcctgacttttttctctgattaccttggcctcctcttggaaccagtgctgaaaggttttgaatcctttacccaacaatgcaaaaatagagccaatggttataacttggctagaaatatcaagagttgaatccatagtgtggggcccatgactctagctgggcaccttggacctccagctggccaatagaagagacaggagacaggaagccttcccattttttcaaagtctgtttaattgcctattacttctctcaaagagaacctgaagtcagaacacatgagcagggtgagaggtgaggcaaggttcatcctgaatgggagaggaagtcgaaccactgctgtgtgtcttgtcaggatgctcacttgttcctactgagatgctggatattgattttgtaacagcacctggtgtttcacggctgtccgagtgagctaacgtggcggtgtggctgcctggacctcctctttcaggttaacgctgacagaatggaggctcaggctgtctgcaagaaaacagttggtttggctgtgattttgacctcctcttccccactgccatcttctaagagactttgtagctgcctcctagaagcacattctgagcacatttgagacctctgtgttagaggggagactgcacaaactatcctcccccaggttgagacgtctgcagagtggcaagctgacttgtagaaatggggtgccatttatgctctacttagacaagggtaatcagaaatggaatcagtgcaggcaaaatttaggatttgccgcttccataaatcaaagcatgactaatagggggtctctgaaatgtaagggcacaaacttcacttagggcatcgcagatgtttgcagaatggttggcctaatgattatgctacagatgggttttaaatgacccgtctaggttactgcttccttgcaaaaaaagtcgaatcctgcattgaattgaatatgaatttctctaactctctccagaaaatggatggagataacttgtctttaaaactgtaggccagccttagccactgtggagcccttgcctccgagctctggcttcaaggggagctcttctccaggttcactaggtgaattgatttattattatcatattgataatgtgagattctttagccactttggggagcctgtctctccagaagcctttcttagtggtgcccacagttggagcccaggggccatgtttgcaaactgattcatgtgcatggctgacaggagtactggttcactaccaatgcctgagcttttctcttacatagaaaaactgtccgctctcagtaatcacaagcagcatccgttttgttttctcttcttgggagacatctgtcaaaccaggaatattcttgaaaagaacgtgagcaggaaaaactgctggtgatactttttttaagttttgtttttatcttgcctgttggcttcaatacatttgagaatacgctgaagagggaaaatttcagtgatggagattctagattaaatatcaggactgatttcctggtgggattatggtccagttttaccaaagaaccaattccttgaatgttggaatctaactttttatattgtcattattattgttgtttttaaacggttctttgtcttttctgttttatttttctcaagctgctttcaggagctagcagaaaataactcaaagttgaagactctggaagattttgctttaacctaactcgcattgatgtattaaatttataattttagcattcccaatagatcctatcattccttaaacataataccctttgtcttggagtagaatactaagttagagttagtggatttctagtttaggagaggagctcaaaactataatctttaacaaattgaaaaatgaaatagggtgttttccctttttgtgcacacctatattaccttaagaaatttccttccatagacagctgcctcaaagggaaatcctctttaaaccgtagttggcgcagaggtcagtcctagtcggagcttaggaggggcggagacgctcacatcgtctgacttgagtcgccactgattgtggcaacagctttgcctcatgagtcaaaaattggcaatttcttttgatttttagttgttgaatttgctgtttcaagcatttgtacatattagaagtctaaggagtagcaagtcagtgggaggactttttcacccctggcattagcagcttcgacctcattttccagatgcaccagctcctattaataagttagcaaggaaagtgtatgtcacgtgcaggaacagtgaggcagggacaggggttctgctccttctcacttcaccaccggcacacagcttgcccctgtctttgcccccaaaggtattttgtgtctagtgtcaaattggagctattcttcactggtccttaaccttgggttttaaaaagaaggcttctctgtttgggtagcgtaagagctgagtatagtaagtcctcttccaaagagatggcaatatgctgggcatctactttaaaacaaagttgtctgatttttgcaagagaggttaggattttattgttcttatttccctttacagttctgcagttccatcacagtatttttttaaataactcaggtgtatgagaagaaattagaaaagaaaattaacttatgtggactgtaaatgttttatttgtaagattctataaataaagctatattctgtaattgttgagaatcccacgggtgatcatttgcaataaatgtggatgtaatgaaggctgttg

SEQ ID NO: 747 - DNA, 4759 bp, Homo sapiens
  misc_feature (230)..(230): second gene starts at position 230
ggacctcggtgagtacaaggtggtggggggtcgccagcaggttccctctccccggccccagctctggacgctcaccccagtgcaacgccctgagtgacggaaagaggtctggcggcttctctgttgacaactcagctggttccacaccctggcaattgtgaagagttggccaaatgtttgtccactgagctgatctcctctctggagcaccggggccaccaggagggaggtttattcagtcaccatgaagctgctgctgctgcacccggccttccagagctgcctcctgctgaccctgcttggcttatggagaaccacccctgaggctcacgcttcatccctgggtgcaccagctatcagcgctgcctccttcctgcaggatctaatacatcggtatggcgagggtgacagcctcactctgcagcagctgaaggccctactcaaccacctggatgtgggagtgggccggggtaatgtcacccagcacgtgcaaggacacaggaacctctccacgtgctttagttctggagacctcttcactgcccacaatttcagcgagcagtcgcggattgggagcagcgagctccaggagttctgccccaccatcctccagcagctggattcccgggcctgcacctcggagaaccaggaaaacgaggagaatgagcagacggaggaggggcggccaagcgctgttgaagtgtggggatacggtctcctctgtgtgaccgtcatctccctctgctccctcctgggggccagcgtggtgcccttcatgaagaagaccttttacaagaggctgctgctctacttcatagctctggcgattggaaccctctactccaacgccctcttccagctcatcccggaggcatttggtttcaaccctctggaagattattatgtctccaagtctgcagtggtgtttgggggcttttatcttttctttttcacagagaagatcttgaagattcttcttaagcagaaaaatgagcatcatcatggacacagccattatgcctctgagtcgcttccctccaagaaggaccaggaggagggggtgatggagaagctgcagaacggggacctggaccacatgattcctcagcactgcagcagtgagctggacggcaaggcgcccatggtggacgagaaggtcattgtgggctcgctctctgtgcaggacctgcaggcttcccagagtgcttgctactggctgaaaggtgtccgctactctgatatcggcactctggcctggatgatcactctgagcgacggcctccataatttcatcgatggcctggccatcggtgcttccttcactgtgtcagttttccaaggcatcagcacctcggtggccatcctctgtgaggagttcccacatgagctaggagactttgtcatcctgctcaacgctgggatgagcatccaacaagctctcttcttcaacttcctttctgcctgctgctgctacctgggtctggcctttggcatcctggccggcagccacttctctgccaactggatttttgcgctagctggaggaatgttcttgtatatttctctggctgatatgttccctgagatgaatgaggtctgtcaagaggatgaaaggaagggcagcatcttgattccatttatcatccagaacctgggcctcctgactggattcaccatcatggtggtcctcaccatgtattcaggacagatccagattgggtagggctctgccaagagcctgtgggactggaagtcgggccctgggctgcccgatcgccagcccgaggacttaccatccacaatgcaccacggaagaggccgttctatgaaaaactgacacagactgtattcctgcattcaaatgtcagccgtttgtaaaatgctgtatcctaggaataagctgccctggtaaccagtctctagctagtgcctcttgccctctcctcacctccttttctctcagtgactctggaacctgaatgcagcttacaagacaagcctgacttttttctctgattaccttggcctcctcttggaaccagtgctgaaaggttttgaatcctttacccaacaatgcaaaaatagagccaatggttataacttggctagaaatatcaagagttgaatccatagtgtggggcccatgactctagctgggcaccttggacctccagctggccaatagaagagacaggagacaggaagccttcccattttttcaaagtctgtttaattgcctattacttctctcaaagagaacctgaagtcagaacacatgagcagggtgagaggtgaggcaaggttcatcctgaatgggagaggaagtcgaaccactgctgtgtgtcttgtcaggatgctcacttgttcctactgagatgctggatattgattttgtaacagcacctggtgtttcacggctgtccgagtgagctaacgtggcggtgtggctgcctggacctcctctttcaggttaacgctgacagaatggaggctcaggctgtctgcaagaaaacagttggtttggctgtgattttgacctcctcttccccactgccatcttctaagagactttgtagctgcctcctagaagcacattctgagcacatttgagacctctgtgttagaggggagactgcacaaactatcctcccccaggttgagacgtctgcagagtggcaagctgacttgtagaaatggggtgccatttatgctctacttagacaagggtaatcagaaatggaatcagtgcaggcaaaatttaggatttgccgcttccataaatcaaagcatgactaatagggggtctctgaaatgtaagggcacaaacttcacttagggcatcgcagatgtttgcagaatggttggcctaatgattatgctacagatgggttttaaatgacccgtctaggttactgcttccttgcaaaaaaagtcgaatcctgcattgaattgaatatgaatttctctaactctctccagaaaatggatggagataacttgtctttaaaactgtaggccagccttagccactgtggagcccttgcctccgagctctggcttcaaggggagctcttctccaggttcactaggtgaattgatttattattatcatattgataatgtgagattctttagccactttggggagcctgtctctccagaagcctttcttagtggtgcccacagttggagcccaggggccatgtttgcaaactgattcatgtgcatggctgacaggagtactggttcactaccaatgcctgagcttttctcttacatagaaaaactgtccgctctcagtaatcacaagcagcatccgttttgttttctcttcttgggagacatctgtcaaaccaggaatattcttgaaaagaacgtgagcaggaaaaactgctggtgatactttttttaagttttgtttttatcttgcctgttggcttcaatacatttgagaatacgctgaagagggaaaatttcagtgatggagattctagattaaatatcaggactgatttcctggtgggattatggtccagttttaccaaagaaccaattccttgaatgttggaatctaactttttatattgtcattattattgttgtttttaaacggttctttgtcttttctgttttatttttctcaagctgctttcaggagctagcagaaaataactcaaagttgaagactctggaagattttgctttaacctaactcgcattgatgtattaaatttataattttagcattcccaatagatcctatcattccttaaacataataccctttgtcttggagtagaatactaagttagagttagtggatttctagtttaggagaggagctcaaaactataatctttaacaaattgaaaaatgaaatagggtgttttccctttttgtgcacacctatattaccttaagaaatttccttccatagacagctgcctcaaagggaaatcctctttaaaccgtagttggcgcagaggtcagtcctagtcggagcttaggaggggcggagacgctcacatcgtctgacttgagtcgccactgattgtggcaacagctttgcctcatgagtcaaaaattggcaatttcttttgatttttagttgttgaatttgctgtttcaagcatttgtacatattagaagtctaaggagtagcaagtcagtgggaggactttttcacccctggcattagcagcttcgacctcattttccagatgcaccagctcctattaataagttagcaaggaaagtgtatgtcacgtgcaggaacagtgaggcagggacaggggttctgctccttctcacttcaccaccggcacacagcttgcccctgtctttgcccccaaaggtattttgtgtctagtgtcaaattggagctattcttcactggtccttaaccttgggttttaaaaagaaggcttctctgtttgggtagcgtaagagctgagtatagtaagtcctcttccaaagagatggcaatatgctgggcatctactttaaaacaaagttgtctgatttttgcaagagaggttaggattttattgttcttatttccctttacagttctgcagttccatcacagtatttttttaaataactcaggtgtatgagaagaaattagaaaagaaaattaacttatgtggactgtaaatgttttatttgtaagattctataaataaagctatattctgtaattgttgagaatcccacgggtgatcatttgcaataaatgtggatgtaatgaaggctgttg

SEQ ID NO: 748 - DNA, 1811 bp, Homo sapiens
  misc_feature (230)..(230): second gene starts at position 230
ggacctcggtgagtacaaggtggtggggggtcgccagcaggttccctctccccggccccagctctggacgctcaccccagtgcaacgccctgagtgacggaaagaggtctggcggcttctctgttgacaactcagctggttccacaccctggcaattgtgaagagttggccaaatgtttgtccactgagctgatctcctctctggagcaccggggccaccaggagggaggtttattcagtcaccatgaagctgctgctgctgcacccggccttccagagctgcctcctgctgaccctgcttggcttatggagaaccacccctgaggctcacgcttcatccctgggtgcaccagctatcagcgctgcctccttcctgcaggatctaatacatcggtatggcgagggtgacagcctcactctgcagcagctgaaggccctactcaaccacctggatgtgggagtgggccggggtaatgtcacccagcacgtgcaaggacacaggaacctctccacgtgctttagttctggagacctcttcactgcccacaatttcagcgagcagtcgcggattgggagcagcgagctccaggagttctgccccaccatcctccagcagctggattcccgggcctgcacctcggagaaccaggaaaacgaggagaatgagcagacggaggaggggcggccaagcgctgttgaagtgtggggatacggtctcctctgtgtgaccgtcatctccctctgctccctcctgggggccagcgtggtgcccttcatgaagaagaccttttacaagaggctgctgctctacttcatagctctggcgattggaaccctctactccaacgccctcttccagctcatcccggaggcatttggtttcaaccctctggaagattattatgtctccaagtctgcagtggtgtttgggggcttttatcttttctttttcacagagaagatcttgaagattcttcttaagcagaaaaatgagcatcatcatggacacagccattatgcctctgagtcgcttccctccaagaaggaccaggaggagggggtgatggagaagctgcagaacggggacctggaccacatgattcctcagcactgcagcagtgagctggacggcaaggcgcccatggtggacgagaaggtcattgtgggctcgctctctgtgcaggacctgcaggcttcccagagtgcttgctactggctgaaaggtgtccgctactctgatatcggcactctggcctggatgatcactctgagcgacggcctccataatttcatcgatggcctggccatcggtgcttccttcactgtgtcagttttccaaggcatcagcacctcggtggccatcctctgtgaggagttcccacatgagctaggagactttgtcatcctgctcaacgctgggatgagcatccaacaagctctcttcttcaacttcctttctgcctgctgctgctacctgggtctggcctttggcatcctggccggcagccacttctctgccaactggatttttgcgctagctggaggaatgttcttgtatatttctctggctgatatgatggagttttgctctgttgcccaggctggagtgcaatggtgccatctcagctcactgcaacctctgccgcttgggttgaagcgattatcctgtctaagcctcccgagtaactgagccagccatgtttgttaataaaaatggggacaatactgtatatatatggttatattttagctttttcacttttcagtatctcctgaggcttttctcatgtcattaaatatttttctaattt

SEQ ID NO: 749 - DNA, 4759 bp, Homo sapiens; identical to SEQ ID NO: 747
  misc_feature (230)..(230): second gene starts at position 230

SEQ ID NO: 750 - DNA, 2885 bp, Homo sapiens
  misc_feature (102)..(102): second gene starts at position 102
atggcagacaaaccagacatgggggaaatcgccagcttcgataaggccaagctgaagaaaacggagacgcaggagaagaacaccctgccgaccaaagagaccaatggtctcatcaaggtgaacgggcggcccctggagatgattgagccgcgcacgctacagtacaagctgctggagccagttctgcttctcggcaaggagcgatttgctggtgtagacatccgtgtccgtgtaaagggtggtggtcacgtggcccagatttatgctatccgtcagtccatctccaaagccctggtggcctattaccagaaatatgtggatgaggcttccaagaaggagatcaaagacatcctcatccagtatgaccggaccctgctggtagctgaccctcgtcgctgcgagtccaaaaagtttggaggccctggtgcccgcgctcgctaccagaaatcctaccgataagcccatcgtgactcaaaactcacttgtataataaacagtttttgagggattttaaagtttcaagaagaaaagcggccagggtggcccctagctttccttttccggttgcggcgccgcgcggtgaggttgtctagtccacgctcggagccatgccgtccaagggcccgctgcagtctgtgcaggtcttcggacgcaagaagacagcgacagctgtggcgcactgcaaacgcggcaatggtctcatcaaggtgaacgggcggcccctggagatgattgagccgcgcacgctacagtacaagctgctggagccagttctgcttctcggcaaggagcgatttgctggtgtagacatccgtgtccgtgtaaagggtggtggtcacgtggcccagatttatgctatccgtcagtccatctccaaagccctggtggcctattaccagaaatatgtggatgaggcttccaagaaggagatcaaagacatcctcatccagtatgaccggaccctgctggtagctgaccctcgtcgctgcgagtccaaaaagtttggaggccctggtgcccgcgctcgctaccagaaatcctaccgataagcccatcgtgactcaaaactcacttgtataataaacagtttttgagggattttaaagtttcaagaagaaaagcggccagggtggcccctagctttccttttccggttgcggcgccgcgcggtgaggttgtctagtccacgctcggagccatgccgtccaagggcccgctgcagtctgtgcaggtcttcggacgcaagaagacagcgacagctgtggcgcactgcaaacgcggcaatggtctcatcaaggtgaacgggcggcccctggagatgattgagccgcgcacgctacagtacaagctgctggagccagttctgcttctcggcaaggagcgatttgctggtgtagacatccgtgtccgtgtaaagggtggtggtcacgtggcccagatttatgctatccgtcagtccatctccaaagccctggtggcctattaccagaaatatgtggatgaggcttccaagaaggagatcaaagacatcctcatccagtatgaccggaccctgctggtagctgaccctcgtcgctgcgagtccaaaaagtttggaggccctggtgcccgcgctcgctaccagaaatcctaccgataagcccatcgtgactcaaaactcacttgtataataaacagtttttgagggattttaaagtttcaagaagaaaagcggccagggtggcccctagctttccttttccggttgcggcgccgcgcggtgaggttgtctagtccacgctcggagccatgccgtccaagggcccgctgcagtctgtgcaggtcttcggacgcaagaagacagcgacagctgtggcgcactgcaaacgcggcaatggtctcatcaaggtgaacgggcggcccctggagatgattgagccgcgcacgctacagtacaagctgctggagccagttctgcttctcggcaaggagcgatttgctggtgtagacatccgtgtccgtgtaaagggtggtggtcacgtggcccagatttatgctatccgtcagtccatctccaaagccctggtggcctattaccagaaatatgtggatgaggcttccaagaaggagatcaaagacatcctcatccagtatgaccggaccctgctggtagctgaccctcgtcgctgcgagtccaaaaagtttggaggccctggtgcccgcgctcgctaccagaaatcctaccgataagcccatcgtgactcaaaactcacttgtataataaacagtttttgagggattttaaagtttcaagaagaaaagcggccagggtggcccctagctttccttttccggttgcggcgccgcgcggtgaggttgtctagtccacgctcggagccatgccgtccaagggcccgctgcagtctgtgcaggtcttcggacgcaagaagacagcgacagctgtggcgcactgcaaacgcggcaatggtctcatcaaggtgaacgggcggcccctggagatgattgagccgcgcacgctacagtacaagctgctggagccagttctgcttctcggcaaggagcgatttgctggtgtagacatccgtgtccgtgtaaagggtggtggtcacgtggcccagatttatgctatccgtcagtccatctccaaagccctggtggcctattaccagaaatatgtggatgaggcttccaagaaggagatcaaagacatcctcatccagtatgaccggaccctgctggtagctgaccctcgtcgctgcgagtccaaaaagtttggaggccctggtgcccgcgctcgctaccagaaatcctaccgataagcccatcgtgactcaaaactcacttgtataataaacagtttttgagggattttaaagtttcaagaa

SEQ ID NO: 751 - DNA, 32765 bp, Homo sapiens
  misc_feature (284)..(284): second gene starts at position 284
atgagcgcgctggcctcccgctccgcccccgccatgcagtcctccggctccttcaactacgcgcgccccaagcagttcatcgccgcgcagaacctcgggcccgcgtcgggccacggcacgccggcctccagccccagctcgtccagcctcccgtcgcccatgtccccgacgccgaggcagttcggccgcgcccccgtgccgcccttcgcgcagcccttcggcgctgagcccgaggccccgtggggctcctcctcgccgtcgcccccgcccccgccacccccgggtggtggtggcttcggcagggtcagccttgcgggtgcttgtggagtgggtggctatggcagccggagcctctacaacctggggggctccaagaggatatccatcagcactagtggtggcagcttcaggaaccggtttggtgctggtgctggaggcggctatggctttggaggtggtgccggtagtggatttggtttcggcggtggagctggtggtggctttgggctcggtggcggagctggctttggaggtggcttcggtggccctggctttcctgtctgccctcctggaggtatccaagaggtcactgtcaaccagagtctcctgactcccctcaacctgcaaatcgaccccagcatccagagggtgaggaccgaggagcgcgagcagatcaagaccctcaacaataagtttgcctccttcatcgacaaggtgcggttcctggagcagcagaacaaggttctggacaccaagtggaccctgctgcaggagcagggcaccaagactgtgaggcagaacctggagccgttgttcgagcagtacatcaacaacctcaggaggcagctggacagcatcgtgggggaacggggccgcctggactcagagctgagaaacatgcaggacctggtggaagacttcaagaacaagtatgaggatgaaatcaacaagcgtaccactgctgagaatgagtttgtgatgctgaagaaggatgtagatgctgcctacatgaacaaggtggagctggaggccaaggttgatgcactgatggatgagattaacttcatgaagatgttctttgatgcggagctgtcccagatgcagacgcatgtctctgacacctcagtggtcctctccatggacaacaaccgcaacctggacctggatagcatcatcgctgaggtcaaggcccagtatgaggagattgccaaccgcagccggacagaagccgagtcctggtatcagaccaagtatgaggagctgcagcagacagctggccggcatggcgatgacctccgcaacaccaagcatgagatctctgagatgaaccggatgatccagaggctgagagccgagattgacaatgtcaagaaacagtgcgccaatctgcagaacgccattgcggatgccgagcagcgtggggagctggccctcaaggatgccaggaacaagctggccgagctggaggaggccctgcagaaggccaagcaggacatggcccggctgctgcgtgagtaccaggagctcatgaacaccaagctggccctggacgtggagatcgccacttaccgcaagctgctggagggcgaggaatgcagactcagtggagaaggagttggaccagtcaacatctctgttgtcacaagcagtgtttcctctggatatggcagtggcagtggctatggcggtggcctcggtggaggtcttggcggcggcctcggtggaggtcttgccggaggtagcagtggaagctactactccagcagcagtgggggtgtcggcctaggtggtgggctcagtgtggggggctctggcttcagtgcaagcagtggccgagggctgggggtgggctttggcagtggcgggggtagcagctccagcgtcaaatttgtctccaccacctcctcctcccggaagagcttcaagagctaagaacctgctgcaagtcactgccttccaagtgcagcaacccagcccatggagattgcctcttctaggcagttgctcaagccatgttttatccttttctggagagtagtctagaccaagccaattgcagaaccacattctttggttcccaggagagccccattcccagcccctggtctcccgtgccgcagttctatattctgcttcaaatcagccttcaggtttcccacagcatggcccctgctgacacgagaacccaaagttttcccaaatctaaatcatcaaaacagaatccccaccccaatcccaaattttgttttggttctaactacctccagaatgtgttcaataaaatgcttttataatataatcgacagctctctcgcccagcccagttctggaagggataaaaagggggcatcaccgttcctgggtaacagagccaccttctgcgtcctgctgagctctgttctctccagcacctcccaacccactagtgcctggttctcttgctccaccaggaacaagccaccatgtctcgccagtcaagtgtgtccttccggagcgggggcagtcgtagcttcagcaccgcctctgccatcaccccgtctgtctcccgcaccagcttcacctccgtgtcccggtccgggggtggcggtggtggtggcttcggcagggtcagccttgcgggtgcttgtggagtgggtggctatggcagccggagcctctacaacctggggggctccaagaggatatccatcagcactagtggtggcagcttcaggaaccggtttggtgctggtgctggaggcggctatggctttggaggtggtgccggtagtggatttggtttcggcggtggagctggtggtggctttgggctcggtggcggagctggctttggaggtggcttcggtggccctggctttcctgtctgccctcctggaggtatccaagaggtcactgtcaaccagagtctcctgactcccctcaacctgcaaatcgaccccagcatccagagggtgaggaccgaggagcgcgagcagatcaagaccctcaacaataagtttgcctccttcatcgacaaggtgcggttcctggagcagcagaacaaggttctggacaccaagtggaccctgctgcaggagcagggcaccaagactgtgaggcagaacctggagccgttgttcgagcagtacatcaacaacctcaggaggcagctggacagcatcgtgggggaacggggccgcctggactcagagctgagaaacatgcaggacctggtggaagacttcaagaacaagtatgaggatgaaatcaacaagcgtaccactgctgagaatgagtttgtgatgctgaagaaggatgtagatgctgcctacatgaacaaggtggagctggaggccaaggttgatgcactgatggatgagattaacttcatgaagatgttctttgatgcggagctgtcccagatgcagacgcatgtctctgacacctcagtggtcctctccatggacaacaaccgcaacctggacctggatagcatcatcgctgaggtcaaggcccagtatgaggagattgccaaccgcagccggacagaagccgagtcctggtatcagaccaagtatgaggagctgcagcagacagctggccggcatggcgatgacctccgcaacaccaagcatgagatctctgagatgaaccggatgatccagaggctgagagccgagattgacaatgtcaagaaacagtgcgccaatctgcagaacgccattgcggatgccgagcagcgtggggagctggccctcaaggatgccaggaacaagctggccgagctggaggaggccctgcagaaggccaagcaggacatggcccggctgctgcgtgagtaccaggagctcatgaacaccaagctggccctggacgtggagatcgccacttaccgcaagctgctggagggcgaggaatgcagactcagtggagaaggagttggaccagtcaacatctctgttgtcacaagcagtgtttcctctggatatggcagtggcagtggctatggcggtggcctcggtggaggtcttggcggcggcctcggtggaggtcttgccggaggtagcagtggaagctactactccagcagcagtgggggtgtcggcctaggtggtgggctcagtgtggggggctctggcttcagtgcaagcagtggccgagggctgggggtgggctttggcagtggcgggggtagcagctccagcgtcaaatttgtctccaccacctcctcctcccggaagagcttcaagagctaagaacctgctgcaagtcactgccttccaagtgcagcaacccagcccatggagattgcctcttctaggcagttgctcaagccatgttttatccttttctggagagtagtctagaccaagccaattgcagaaccacattctttggttcccaggagagccccattcccagcccctggtctcccgtgccgcagttctatattctgcttcaaatcagccttcaggtttcccacagcatggcccctgctgacacgagaacccaaagttttcccaaatctaaatcatcaaaacagaatccccaccccaatcccaaattttgttttggttctaactacctccagaatgtgttcaataaaatgcttttataatataatcgacagctctctcgcccagcccagttctggaagggataaaaagggggcatcaccgttcctgggtaacagagccaccttctgcgtcctgctgagctctgttctctccagcacctcccaacccactagtgcctggttctcttgctccaccaggaacaagccaccatgtctcgccagtcaagtgtgtccttccggagcgggggcagtcgtagcttcagcaccgcctctgccatcaccccgtctgtctcccgcaccagcttcacctccgtgtcccggtccgggggtggcggtggtggtggcttcggcagggtcagccttgcgggtgcttgtggagtgggtggctatggcagccggagcctctacaacctggggggctccaagaggatatccatcagcactagtggtggcagcttcaggaaccggtttggtgctggtgctggaggcggctatggctttggaggtggtgccggtagtggatttggtttcggcggtggagctggtggtggctttgggctcggtggcggagctggctttggaggtggcttcggtggccctggctttcctgtctgccctcctggaggtatccaagaggtcactgtcaaccagagtctcctgactcccctcaacctgcaaatcgaccccagcatccagagggtgaggaccgaggagcgcgagcagatcaagaccctcaacaataagtttgcctccttcatcgacaaggtgcggttcctggagcagcagaacaaggttctggacaccaagtggaccctgctgcaggagcagggcaccaagactgtgaggcagaacctggagccgttgttcgagcagtacatcaacaacctcaggaggcagctggacagcatcgtgggggaacggggccgcctggactcagagctgagaaacatgcaggacctggtggaagacttcaagaacaagtatgaggatgaaatcaacaagcgtaccactgctgagaatgagtttgtgatgctgaagaaggatgtagatgctgcctacatgaacaaggtggagctggaggccaaggttgatgcactgatggatgagattaacttcatgaagatgttctttgatgcggagctgtcccagatgcagacgcatgtctctgacacctcagtggtcctctccatggacaacaaccgcaacctggacctggatagcatcatcgctgaggtcaaggcccagtatgaggagattgccaaccgcagccggacagaagccgagtcctggtatcagaccaagtatgaggagctgcagcagacagctggccggcatggcgatgacctccgcaacaccaagcatgagatctctgagatgaaccggatgatccagaggctgagagccgagattgacaatgtcaagaaacagtgcgccaatctgcagaacgccattgcggatgccgagcagcgtggggagctggccctcaaggatgccaggaacaagctggccgagctggaggaggccctgcagaaggccaagcaggacatggcccggctgctgcgtgagtaccaggagctcatgaacaccaagctggccctggacgtggagatcgccacttaccgcaagctgctggagggcgaggaatgcagactcagtggagaaggagttggaccagtcaacatctctgttgtcacaagcagtgtttcctctggatatggcagtggcagtggctatggcggtggcctcggtggaggtcttggcggcggcctcggtggaggtcttgccggaggtagcagtggaagctactactccagcagcagtgggggtgtcggcctaggtggtgggctcagtgtggggggctctggcttcagtgcaagcagtggccgagggctgggggtgggctttggcagtggcgggggtagcagctccagcgtcaaatttgtctccaccacctcctcctcccggaagagcttcaagagctaagaacctgctgcaagtcactgccttccaagtgcagcaacccagcccatggagattgcctcttctaggcagttgctcaagccatgttttatccttttctggagagtagtctagaccaagccaattgcagaaccacattctttggttcccaggagagccccattcccagcccctggtctcccgtgccgcagttctatattctgcttcaaatcagccttcaggtttcccacagcatggcccctgctgacacgagaacccaaagttttcccaaatctaaatcatcaaaacagaatccccaccccaatcccaaattttgttttggttctaactacctccagaatgtgttcaataaaatgcttttataatataatcgacagctctctcgcccagcccagttctggaagggataaaaagggggcatcaccgttcctgggtaacagagccaccttctgcgtcctgctgagctctgttctctccagcacctcccaacccactagtgcctggttctcttgctccaccaggaacaagccaccatgtctcgccagtcaagtgtgtccttccggagcgggggcagtcgtagcttcagcaccgcctctgccatcaccccgtctgtctcccgcaccagcttcacctccgtgtcccggtccgggggtggcggtggtggtggcttcggcagggtcagccttgcgggtgcttgtggagtgggtggctatggcagccggagcctctacaacctggggggctccaagaggatatccatcagcactagtggtggcagcttcaggaaccggtttggtgctggtgctggaggcggctatggctttggaggtggtgccggtagtggatttggtttcggcggtggagctggtggtggctttgggctcggtggcggagctggctttggaggtggcttcggtggccctggctttcctgtctgccctcctggaggtatccaagaggtcactgtcaaccagagtctcctgactcccctcaacctgcaaatcgaccccagcatccagagggtgaggaccgaggagcgcgagcagatcaagaccctcaacaataagtttgcctccttcatcgacaaggtgcggttcctggagcagcagaacaaggttctggacaccaagtggaccctgctgcaggagcagggcaccaagactgtgaggcagaacctggagccgttgttcgagcagtacatcaacaacctcaggaggcagctggacagcatcgtgggggaacggggccgcctggactcagagctgagaaacatgcaggacctggtggaagacttcaagaacaagtatgaggatgaaatcaacaagcgtaccactgctgagaatgagtttgtgatgctgaagaaggatgtagatgctgcctacatgaacaaggtggagctggaggccaaggttgatgcactgatggatgagattaacttcatgaagatgttctttgatgcggagctgtcccagatgcagacgcatgtctctgacacctcagtggtcctctccatggacaacaaccgcaacctggacctggatagcatcatcgctgaggtcaaggcccagtatgaggagattgccaaccgcagccggacagaagccgagtcctggtatcagaccaagtatgaggagctgcagcagacagctggccggcatggcgatgacctccgcaacaccaagcatgagatctctgagatgaaccggatgatccagaggctgagagccgagattgacaatgtcaagaaacagtgcgccaatctgcagaacgccattgcggatgccgagcagcgtggggagctggccctcaaggatgccaggaacaagctggccgagctggaggaggccctgcagaaggccaagcaggacatggcccggctgctgcgtgagtaccaggagctcatgaacaccaagctggccctggacgtggagatcgccacttaccgcaagctgctggagggcgaggaatgcagactcagtggagaaggagttggaccagtcaacatctctgttgtcacaagcagtgtttcctctggatatggcagtggcagtggctatggcggtggcctcggtggaggtcttggcggcggcctcggtggaggtcttgccggaggtagcagtggaagctactactccagcagcagtgggggtgtcggcctaggtggtgggctcagtgtggggggctctggcttcagtgcaagcagtggccgagggctgggggtgggctttggcagtggcgggggtagcagctccagcgtcaaatttgtctccaccacctcctcctcccggaagagcttcaagagctaagaacctgctgcaagtcactgccttccaagtgcagcaacccagcccatggagattgcctcttctaggcagttgctcaagccatgttttatccttttctggagagtagtctagaccaagccaattgcagaaccacattctttggttcccaggagagccccattcccagcccctggtctcccgtgccgcagttctatattctgcttcaaatcagccttcaggtttcccacagcatggcccctgctgacacgagaacccaaagttttcccaaatctaaatcatcaaaacagaatccccaccccaatcccaaattttgttttggttctaactacctccagaatgtgttcaataaaatgcttttataatataatcgacagctctctcgcccagcccagttctggaagggataaaaagggggcatcaccgttcctgggtaacagagccaccttctgcgtcctgctgagctctgttctctccagcacctcccaacccactagtgcctggttctcttgctccaccaggaacaagccaccatgtctcgccagtcaagtgtgtccttccggagcgggggcagtcgtagcttcagcaccgcctctgccatcaccccgtctgtctcccgcaccagcttcacctccgtgtcccggtccgggggtggcggtggtggtggcttcggcagggtcagccttgcgggtgcttgtggagtgggtggctatggcagccggagcctctacaacctggggggctccaagaggatatccatcagcactagtggtggcagcttcaggaaccggtttggtgctggtgctggaggcggctatggctttggaggtggtgccggtagtggatttggtttcggcggtggagctggtggtggctttgggctcggtggcggagctggctttggaggtggcttcggtggccctggctttcctgtctgccctcctggaggtatccaagaggtcactgtcaaccagagtctcctgactcccctcaacctgcaaatcgaccccagcatccagagggtgaggaccgaggagcgcgagcagatcaagaccctcaacaataagtttgcctccttcatcgacaaggtgcggttcctggagcagcagaacaaggttctggacaccaagtggaccctgctgcaggagcagggcaccaagactgtgaggcagaacctggagccgttgttcgagcagtacatcaacaacctcaggaggcagctggacagcatcgtgggggaacggggccgcctggactcagagctgagaaacatgcaggacctggtggaagacttcaagaacaagtatgaggatgaaatcaacaagcgtaccactgctgagaatgagtttgtgatgctgaagaaggatgtagatgctgcctacatgaacaaggtggagctggaggccaaggttgatgcactgatggatgagattaacttcatgaagatgttctttgatgcggagctgtcccagatgcagacgcatgtctctgacacctcagtggtcctctccatggacaacaaccgcaacctggacctggatagcatcatcgctgaggtcaaggcccagtatgaggagattgccaaccgcagccggacagaagccgagtcctggtatcagaccaagtatgaggagctgcagcagacagctggccggcatggcgatgacctccgcaacaccaagcatgagatctctgagatgaaccggatgatccagaggctgagagccgagattgacaatgtcaagaaacagtgcgccaatctgcagaacgccattgcggatgccgagcagcgtggggagctggccctcaaggatgccaggaacaagctggccgagctggaggaggccctgcagaaggccaagcaggacatggcccggctgctgcgtgagtaccaggagctcatgaacaccaagctggccctggacgtggagatcgccacttaccgcaagctgctggagggcgaggaatgcagactcagtggagaaggagttggaccagtcaacatctctgttgtcacaagcagtgtttcctctggatatggcagtggcagtggctatggcggtggcctcggtggaggtcttggcggcggcctcggtggaggtcttgccggaggtagcagtggaagctactactccagcagcagtgggggtgtcggcctaggtggtgggctcagtgtggggggctctggcttcagtgcaagcagtggccgagggctgggggtgggctttggcagtggcgggggtagcagctccagcgtcaaatttgtctccaccacctcctcctcccggaagagcttcaagagctaagaacctgctgcaagtcactgccttccaagtgcagcaacccagcccatggagattgcctcttctaggcagttgctcaagccatgttttatccttttctggagagtagtctagaccaagccaattgcagaaccacattctttggttcccaggagagccccattcccagcccctggtctcccgtgccgcagttctatattctgcttcaaatcagccttcaggtttcccacagcatggcccctgctgacacgagaacccaaagttttcccaaatctaaatcatcaaaacagaatccccaccccaatcccaaattttgttttggttctaactacctccagaatgtgttcaataaaatgcttttataatataatcgacagctctctcgcccagcccagttctggaagggataaaaagggggcatcaccgttcctgggtaacagagccaccttctgcgtcctgctgagctctgttctctccagcacctcccaacccactagtgcctggttctcttgctccaccaggaacaagccaccatgtctcgccagtcaagtgtgtccttccggagcgggggcagtcgtagcttcagcaccgcctctgccatcaccccgtctgtctcccgcaccagcttcacctccgtgtcccggtccgggggtggcggtggtggtggcttcggcagggtcagccttgcgggtgcttgtggagtgggtggctatggcagccggagcctctacaacctggggggctccaagaggatatccatcagcactagtggtggcagcttcaggaaccggtttggtgctggtgctggaggcggctatggctttggaggtggtgccggtagtggatttggtttcggcggtggagctggtggtggctttgggctcggtggcggagctggctttggaggtggcttcggtggccctggctttcctgtctgccctcctggaggtatccaagaggtcactgtcaaccagagtctcctgactcccctcaacctgcaaatcgaccccagcatccagagggtgaggaccgaggagcgcgagcagatcaagaccctcaacaataagtttgcctccttcatcgacaaggtgcggttcctggagcagcagaacaaggttctggacaccaagtggaccctgctgcaggagcagggcaccaagactgtgaggcagaacctggagccgttgttcgagcagtacatcaacaacctcaggaggcagctggacagcatcgtgggggaacggggccgcctggactcagagctgagaaacatgcaggacctggtggaagacttcaagaacaagtatgaggatgaaatcaacaagcgtaccactgctgagaatgagtttgtgatgctgaagaaggatgtagatgctgcctacatgaacaaggtggagctggaggccaaggttgatgcactgatggatgagattaacttcatgaagatgttctttgatgcggagctgtcccagatgcagacgcatgtctctgacacctcagtggtcctctccatggacaacaaccgcaacctggacctggatagcatcatcgctgaggtcaaggcccagtatgaggagattgccaaccgcagccggacagaagccgagtcctggtatcagaccaagtatgaggagctgcagcagacagctggccggcatggcgatgacctccgcaacaccaagcatgagatctctgagatgaaccggatgatccagaggctgagagccgagattgacaatgtcaagaaacagtgcgccaatctgcagaacgccattgcggatgccgagcagcgtggggagctggccctcaaggatgccaggaacaagctggccgagctggaggaggccctgcagaaggccaagcaggacatggcccggctgctgcgtgagtaccaggagctcatgaacaccaagctggccctggacgtggagatcgccacttaccgcaagctgctggagggcgaggaatgcagactcagtggagaaggagttggaccagtcaacatctctgttgtcacaagcagtgtttcctctggatatggcagtggcagtggctatggcggtggcctcggtggaggtcttggcggcggcctcggtggaggtcttgccggaggtagcagtggaagctactactccagcagcagtgggggtgtcggcctaggtggtgggctcagtgtggggggctctggcttcagtgcaagcagtggccgagggctgggggtgggctttggcagtggcgggggtagcagctccagcgtcaaatttgtctccaccacctcctcctcccggaagagcttcaagagctaagaacctgctgcaagtcactgccttccaagtgcagcaacccagcccatggagattgcctcttctaggcagttgctcaagccatgttttatccttttctggagagtagtctagaccaagccaattgcagaaccacattctttggttcccaggagagccccattcccagcccctggtctcccgtgccgcagttctatattctgcttcaaatcagccttcaggtttcccacagcatggcccctgctgacacgagaacccaaagttttcccaaatctaaatcatcaaaacagaatccccaccccaatcccaaattttgttttggttctaactacctccagaatgtgttcaataaaatgcttttataatataatcgacagctctctcgcccagcccagttctggaagggataaaaagggggcatcaccgttcctgggtaacagagccaccttctgcgtcctgctgagctctgttctctccagcacctcccaacccactagtgcctggttctcttgctccaccaggaacaagccaccatgtctcgccagtcaagtgtgtccttccggagcgggggcagtcgtagcttcagcaccgcctctgccatcaccccgtctgtctcccgcaccagcttcacctccgtgtcccggtccgggggtggcggtggtggtggcttcggcagggtcagccttgcgggtgcttgtggagtgggtggctatggcagccggagcctctacaacctggggggctccaagaggatatccatcagcactagtggtggcagcttcaggaaccggtttggtgctggtgctggaggcggctatggctttggaggtggtgccggtagtggatttggtttcggcggtggagctggtggtggctttgggctcggtggcggagctggctttggaggtggcttcggtggccctggctttcctgtctgccctcctggaggtatccaagaggtcactgtcaaccagagtctcctgactcccctcaacctgcaaatcgaccccagcatccagagggtgaggaccgaggagcgcgagcagatcaagaccctcaacaataagtttgcctccttcatcgacaaggtgcggttcctggagcagcagaacaaggttctggacaccaagtggaccctgctgcaggagcagggcaccaagactgtgaggcagaacctggagccgttgttcgagcagtacatcaacaacctcaggaggcagctggacagcatcgtgggggaacggggccgcctggactcagagctgagaaacatgcaggacctggtggaagacttcaagaacaagtatgaggatgaaatcaacaagcgtaccactgctgagaatgagtttgtgatgctgaagaaggatgtagatgctgcctacatgaacaaggtggagctggaggccaaggttgatgcactgatggatgagattaacttcatgaagatgttctttgatgcggagctgtcccagatgcagacgcatgtctctgacacctcagtggtcctctccatggacaacaaccgcaacctggacctggatagcatcatcgctgaggtcaaggcccagtatgaggagattgccaaccgcagccggacagaagccgagtcctggtatcagaccaagtatgaggagctgcagcagacagctggccggcatggcgatgacctccgcaacaccaagcatgagatctctgagatgaaccggatgatccagaggctgagagccgagattgacaatgtcaagaaacagtgcgccaatctgcagaacgccattgcggatgccgagcagcgtggggagctggccctcaaggatgccaggaacaagctggccgagctggaggaggccctgcagaaggccaagcaggacatggcccggctgctgcgtgagtaccaggagctcatgaacaccaagctggccctggacgtggagatcgccacttaccgcaagctgctggagggcgaggaatgcagactcagtggagaaggagttggaccagtcaacatctctgttgtcacaagcagtgtttcctctggatatggcagtggcagtggctatggcggtggcctcggtggaggtcttggcggcggcctcggtggaggtcttgccggaggtagcagtggaagctactactccagcagcagtgggggtgtcggcctaggtggtgggctcagtgtggggggctctggcttcagtgcaagcagtggccgagggctgggggtgggctttggcagtggcgggggtagcagctccagcgtcaaatttgtctccaccacctcctcctcccggaagagcttcaagagctaagaacctgctgcaagtcactgccttccaagtgcagcaacccagcccatggagattgcctcttctaggcagttgctcaagccatgttttatccttttctggagagtagtctagaccaagccaattgcagaaccacattctttggttcccaggagagccccattcccagcccctggtctcccgtgccgcagttctatattctgcttcaaatcagccttcaggtttcccacagcatggcccctgctgacacgagaacccaaagttttcccaaatctaaatcatcaaaacagaatccccaccccaatcccaaattttgttttggttctaactacctccagaatgtgttcaataaaatgcttttataatataatcgacagctctctcgcccagcccagttctggaagggataaaaagggggcatcaccgttcctgggtaacagagccaccttctgcgtcctgctgagctctgttctctccagcacctcccaacccactagtgcctggttctcttgctccaccaggaacaagccaccatgtctcgccagtcaagtgtgtccttccggagcgggggcagtcgtagcttcagcaccgcctctgccatcaccccgtctgtctcccgcaccagcttcacctccgtgtcccggtccgggggtggcggtggtggtggcttcggcagggtcagccttgcgggtgcttgtggagtgggtggctatggcagccggagcctctacaacctggggggctccaagaggatatccatcagcactagtggtggcagcttcaggaaccggtttggtgctggtgctggaggcggctatggctttggaggtggtgccggtagtggatttggtttcggcggtggagctggtggtggctttgggctcggtggcggagctggctttggaggtggcttcggtggccctggctttcctgtctgccctcctggaggtatccaagaggtcactgtcaaccagagtctcctgactcccctcaacctgcaaatcgaccccagcatccagagggtgaggaccgaggagcgcgagcagatcaagaccctcaacaataagtttgcctccttcatcgacaaggtgcggttcctggagcagcagaacaaggttctggacaccaagtggaccctgctgcaggagcagggcaccaagactgtgaggcagaacctggagccgttgttcgagcagtacatcaacaacctcaggaggcagctggacagcatcgtgggggaacggggccgcctggactcagagctgagaaacatgcaggacctggtggaagacttcaagaacaagtatgaggatgaaatcaacaagcgtaccactgctgagaatgagtttgtgatgctgaagaaggatgtagatgctgcctacatgaacaaggtggagctggaggccaaggttgatgcactgatggatgagattaacttcatgaagatgttctttgatgcggagctgtcccagatgcagacgcatgtctctgacacctcagtggtcctctccatggacaacaaccgcaacctggacctggatagcatcatcgctgaggtcaaggcccagtatgaggagattgccaaccgcagccggacagaagccgagtcctggtatcagaccaagtatgaggagctgcagcagacagctggccggcatggcgatgacctccgcaacaccaagcatgagatctctgagatgaaccggatgatccagaggctgagagccgagattgacaatgtcaagaaacagtgcgccaatctgcagaacgccattgcggatgccgagcagcgtggggagctggccctcaaggatgccaggaacaagctggccgagctggaggaggccctgcagaaggccaagcaggacatggcccggctgctgcgtgagtaccaggagctcatgaacaccaagctggccctggacgtggagatcgccacttaccgcaagctgctggagggcgaggaatgcagactcagtggagaaggagttggaccagtcaacatctctgttgtcacaagcagtgtttcctctggatatggcagtggcagtggctatggcggtggcctcggtggaggtcttggcggcggcctcggtggaggtcttgccggaggtagcagtggaagctactactccagcagcagtgggggtgtcggcctaggtggtgggctcagtgtggggggctctggcttcagtgcaagcagtggccgagggctgggggtgggctttggcagtggcgggggtagcagctccagcgtcaaatttgtctccaccacctcctcctcccggaagagcttcaagagctaagaacctgctgcaagtcactgccttccaagtgcagcaacccagcccatggagattgcctcttctaggcagttgctcaagccatgttttatccttttctggagagtagtctagaccaagccaattgcagaaccacattctttggttcccaggagagccccattcccagcccctggtctcccgtgccgcagttctatattctgcttcaaatcagccttcaggtttcccacagcatggcccctgctgacacgagaacccaaagttttcccaaatctaaatcatcaaaacagaatccccaccccaatcccaaattttgttttggttctaactacctccagaatgtgttcaataaaatgcttttataatataatcgacagctctctcgcccagcccagttctggaagggataaaaagggggcatcaccgttcctgggtaacagagccaccttctgcgtcctgctgagctctgttctctccagcacctcccaacccactagtgcctggttctcttgctccaccaggaacaagccaccatgtctcgccagtcaagtgtgtccttccggagcgggggcagtcgtagcttcagcaccgcctctgccatcaccccgtctgtctcccgcaccagcttcacctccgtgtcccggtccgggggtggcggtggtggtggcttcggcagggtcagccttgcgggtgcttgtggagtgggtggctatggcagccggagcctctacaacctggggggctccaagaggatatccatcagcactagtggtggcagcttcaggaaccggtttggtgctggtgctggaggcggctatggctttggaggtggtgccggtagtggatttggtttcggcggtggagctggtggtggctttgggctcggtggcggagctggctttggaggtggcttcggtggccctggctttcctgtctgccctcctggaggtatccaagaggtcactgtcaaccagagtctcctgactcccctcaacctgcaaatcgaccccagcatccagagggtgaggaccgaggagcgcgagcagatcaagaccctcaacaataagtttgcctccttcatcgacaaggtgcggttcctggagcagcagaacaaggttctggacaccaagtggaccctgctgcaggagcagggcaccaagactgtgaggcagaacctggagccgttgttcgagcagtacatcaacaacctcaggaggcagctggacagcatcgtgggggaacggggccgcctggactcagagctgagaaacatgcaggacctggtggaagacttcaagaacaagtatgaggatgaaatcaacaagcgtaccactgctgagaatgagtttgtgatgctgaagaaggatgtagatgctgcctacatgaacaaggtggagctggaggccaaggttgatgcactgatggatgagattaacttcatgaagatgttctttgatgcggagctgtcccagatgcagacgcatgtctctgacacctcagtggtcctctccatggacaacaaccgcaacctggacctggatagcatcatcgctgaggtcaaggcccagtatgaggagattgccaaccgcagccggacagaagccgagtcctggtatcagaccaagtatgaggagctgcagcagacagctggccggcatggcgatgacctccgcaacaccaagcatgagatctctgagatgaaccggatgatccagaggctgagagccgagattgacaatgtcaagaaacagtgcgccaatctgcagaacgccattgcggatgccgagcagcgtggggagctggccctcaaggatgccaggaacaagctggccgagctggaggaggccctgcagaaggccaagcaggacatggcccggctgctgcgtgagtaccaggagctcatgaacaccaagctggccctggacgtggagatcgccacttaccgcaagctgctggagggcgaggaatgcagactcagtggagaaggagttggaccagtcaacatctctgttgtcacaagcagtgtttcctctggatatggcagtggcagtggctatggcggtggcctcggtggaggtcttggcggcggcctcggtggaggtcttgccggaggtagcagtggaagctactactccagcagcagtgggggtgtcggcctaggtggtgggctcagtgtggggggctctggcttcagtgcaagcagtggccgagggctgggggtgggctttggcagtggcgggggtagcagctccagcgtcaaatttgtctccaccacctcctcctcccggaagagcttcaagagctaagaacctgctgcaagtcactgccttccaagtgcagcaacccagcccatggagattgcctcttctaggcagttgctcaagccatgttttatccttttctggagagtagtctagaccaagccaattgcagaaccacattctttggttcccaggagagccccattcccagcccctggtctcccgtgccgcagttctatattctgcttcaaatcagccttcaggtttcccacagcatggcccctgctgacacgagaacccaaagttttcccaaatctaaatcatcaaaacagaatccccaccccaatcccaaattttgttttggttctaactacctccagaatgtgttcaataaaatgcttttataatataatcgacagctctctcgcccagcccagttctggaagggataaaaagggggcatcaccgttcctgggtaacagagccaccttctgcgtcctgctgagctctgttctctccagcacctcccaacccactagtgcctggttctcttgctccaccaggaacaagccaccatgtctcgccagtcaagtgtgtccttccggagcgggggcagtcgtagcttcagcaccgcctctgccatcaccccgtctgtctcccgcaccagcttcacctccgtgtcccggtccgggggtggcggtggtggtggcttcggcagggtcagccttgcgggtgcttgtggagtgggtggctatggcagccggagcctctacaacctggggggctccaagaggatatccatcagcactagtggtggcagcttcaggaaccggtttggtgctggtgctggaggcggctatggctttggaggtggtgccggtagtggatttggtttcggcggtggagctggtggtggctttgggctcggtggcggagctggctttggaggtggcttcggtggccctggctttcctgtctgccctcctggaggtatccaagaggtcactgtcaaccagagtctcctgactcccctcaacctgcaaatcgaccccagcatccagagggtgaggaccgaggagcgcgagcagatcaagaccctcaacaataagtttgcctccttcatcgacaaggtgcggttcctggagcagcagaacaaggttctggacaccaagtggaccctgctgcaggagcagggcaccaagactgtgaggcagaacctggagccgttgttcgagcagtacatcaacaacctcaggaggcagctggacagcatcgtgggggaacggggccgcctggactcagagctgagaaacatgcaggacctggtggaagacttcaagaacaagtatgaggatgaaatcaacaagcgtaccactgctgagaatgagtttgtgatgctgaagaaggatgtagatgctgcctacatgaacaaggtggagctggaggccaaggttgatgcactgatggatgagattaacttcatgaagatgttctttgatgcggagctgtcccagatgcagacgcatgtctctgacacctcagtggtcctctccatggacaacaaccgcaacctggacctggatagcatcatcgctgaggtcaaggcccagtatgaggagattgccaaccgcagccggacagaagccgagtcctggtatcagaccaagtatgaggagctgcagcagacagctggccggcatggcgatgacctccgcaacaccaagcatgagatctctgagatgaaccggatgatccagaggctgagagccgagattgacaatgtcaagaaacagtgcgccaatctgcagaacgccattgcggatgccgagcagcgtggggagctggccctcaaggatgccaggaacaagctggccgagctggaggaggccctgcagaaggccaagcaggacatggcccggctgctgcgtgagtaccaggagctcatgaacaccaagctggccctggacgtggagatcgccacttaccgcaagctgctggagggcgaggaatgcagactcagtggagaaggagttggaccagtcaacatctctgttgtcacaagcagtgtttcctctggatatggcagtggcagtggctatggcggtggcctcggtggaggtcttggcggcggcctcggtggaggtcttgccggaggtagcagtggaagctactactccagcagcagtgggggtgtcggcctaggtggtgggctcagtgtggggggctctggcttcagtgcaagcagtggccgagggctgggggtgggctttggcagtggcgggggtagcagctccagcgtcaaatttgtctccaccacctcctcctcccggaagagcttcaagagctaagaacctgctgcaagtcactgccttccaagtgcagcaacccagcccatggagattgcctcttctaggcagttgctcaagccatgttttatccttttctggagagtagtctagaccaagccaattgcagaaccacattctttggttcccaggagagccccattcccagcccctggtctcccgtgccgcagttctatattctgcttcaaatcagccttcaggtttcccacagcatggcccctgctgacacgagaacccaaagttttcccaaatctaaatcatcaaaacagaatccccaccccaatcccaaattttgttttggttctaactacctccagaatgtgttcaataaaatgcttttataatataatcgacagctctctcgcccagcccagttctggaagggataaaaagggggcatcaccgttcctgggtaacagagccaccttctgcgtcctgctgagctctgttctctccagcacctcccaacccactagtgcctggttctcttgctccaccaggaacaagccaccatgtctcgccagtcaagtgtgtccttccggagcgggggcagtcgtagcttcagcaccgcctctgccatcaccccgtctgtctcccgcaccagcttcacctccgtgtcccggtccgggggtggcggtggtggtggcttcggcagggtcagccttgcgggtgcttgtggagtgggtggctatggcagccggagcctctacaacctggggggctccaagaggatatccatcagcactagtggtggcagcttcaggaaccggtttggtgctggtgctggaggcggctatggctttggaggtggtgccggtagtggatttggtttcggcggtggagctggtggtggctttgggctcggtggcggagctggctttggaggtggcttcggtggccctggctttcctgtctgccctcctggaggtatccaagaggtcactgtcaaccagagtctcctgactcccctcaacctgcaaatcgaccccagcatccagagggtgaggaccgaggagcgcgagcagatcaagaccctcaacaataagtttgcctccttcatcgacaaggtgcggttcctggagcagcagaacaaggttctggacaccaagtggaccctgctgcaggagcagggcaccaagactgtgaggcagaacctggagccgttgttcgagcagtacatcaacaacctcaggaggcagctggacagcatcgtgggggaacggggccgcctggactcagagctgagaaacatgcaggacctggtggaagacttcaagaacaagtatgaggatgaaatcaacaagcgtaccactgctgagaatgagtttgtgatgctgaagaaggatgtagatgctgcctacatgaacaaggtggagctggaggccaaggttgatgcactgatggatgagattaacttcatgaagatgttctttgatgcggagctgtcccagatgcagacgcatgtctctgacacctcagtggtcctctccatggacaacaaccgcaacctggacctggatagcatcatcgctgaggtcaaggcccagtatgaggagattgccaaccgcagccggacagaagccgagtcctggtatcagaccaagtatgaggagctgcagcagacagctggccggcatggcgatgacctccgcaacaccaagcatgagatctctgagatgaaccggatgatccagaggctgagagccgagattgacaatgtcaagaaacagtgcgccaatctgcagaacgccattgcggatgccgagcagcgtggggagctggccctcaaggatgccaggaacaagctggccgagctggaggaggccctgcagaaggccaagcaggacatggcccggctgctgcgtgagtaccaggagctcatgaacaccaagctggccctggacgtggagatcgccacttaccgcaagctgctggagggcgaggaatgcagactcagtggagaaggagttggaccagtcaacatctctgttgtcacaagcagtgtttcctctggatatggcagtggcagtggctatggcggtggcctcggtggaggtcttggcggcggcctcggtggaggtcttgccggaggtagcagtggaagctactactccagcagcagtgggggtgtcggcctaggtggtgggctcagtgtggggggctctggcttcagtgcaagcagtggccgagggctgggggtgggctttggcagtggcgggggtagcagctccagcgtcaaatttgtctccaccacctcctcctcccggaagagcttcaagagctaagaacctgctgcaagtcactgccttccaagtgcagcaacccagcccatggagattgcctcttctaggcagttgctcaagccatgttttatccttttctggagagtagtctagaccaagccaattgcagaaccacattctttggttcccaggagagccccattcccagcccctggtctcccgtgccgcagttctatattctgcttcaaatcagccttcaggtttcccacagcatggcccctgctgacacgagaacccaaagttttcccaaatctaaatcatcaaaacagaatccccaccccaatcccaaattttgttttggttctaactacctccagaatgtgttcaataaaatgcttttataatataatcgacagctctctcgcccagcccagttctggaagggataaaaagggggcatcaccgttcctgggtaacagagccaccttctgcgtcctgctgagctctgttctctccagcacctcccaacccactagtgcctggttctcttgctccaccaggaacaagccaccatgtctcgccagtcaagtgtgtccttccggagcgggggcagtcgtagcttcagcaccgcctctgccatcaccccgtctgtctcccgcaccagcttcacctccgtgtcccggtccgggggtggcggtggtggtggcttcggcagggtcagccttgcgggtgcttgtggagtgggtggctatggcagccggagcctctacaacctggggggctccaagaggatatccatcagcactagtggtggcagcttcaggaaccggtttggtgctggtgctggaggcggctatggctttggaggtggtgccggtagtggatttggtttcggcggtggagctggtggtggctttgggctcggtggcggagctggctttggaggtggcttcggtggccctggctttcctgtctgccctcctggaggtatccaagaggtcactgtcaaccagagtctcctgactcccctcaacctgcaaatcgaccccagcatccagagggtgaggaccgaggagcgcgagcagatcaagaccctcaacaataagtttgcctccttcatcgacaaggtgcggttcctggagcagcagaacaaggttctggacaccaagtggaccctgctgcaggagcagggcaccaagactgtgaggcagaacctggagccgttgttcgagcagtacatcaacaacctcaggaggcagctggacagcatcgtgggggaacggggccgcctggactcagagctgagaaacatgcaggacctggtggaagacttcaagaacaagtatgaggatgaaatcaacaagcgtaccactgctgagaatgagtttgtgatgctgaagaaggatgtagatgctgcctacatgaacaaggtggagctggaggccaaggttgatgcactgatggatgagattaacttcatgaagatgttctttgatgcggagctgtcccagatgcagacgcatgtctctgacacctcagtggtcctctccatggacaacaaccgcaacctggacctggatagcatcatcgctgaggtcaaggcccagtatgaggagattgccaaccgcagccggacagaagccgagtcctggtatcagaccaagtatgaggagctgcagcagacagctggccggcatggcgatgacctccgcaacaccaagcatgagatctctgagatgaaccggatgatccagaggctgagagccgagattgacaatgtcaagaaacagtgcgccaatctgcagaacgccattgcggatgccgagcagcgtggggagctggccctcaaggatgccaggaacaagctggccgagctggaggaggccctgcagaaggccaagcaggacatggcccggctgctgcgtgagtaccaggagctcatgaacaccaagctggccctggacgtggagatcgccacttaccgcaagctgctggagggcgaggaatgcagactcagtggagaaggagttggaccagtcaacatctctgttgtcacaagcagtgtttcctctggatatggcagtggcagtggctatggcggtggcctcggtggaggtcttggcggcggcctcggtggaggtcttgccggaggtagcagtggaagctactactccagcagcagtgggggtgtcggcctaggtggtgggctcagtgtggggggctctggcttcagtgcaagcagtggccgagggctgggggtgggctttggcagtggcgggggtagcagctccagcgtcaaatttgtctccaccacctcctcctcccggaagagcttcaagagctaagaacctgctgcaagtcactgccttccaagtgcagcaacccagcccatggagattgcctcttctaggcagttgctcaagccatgttttatccttttctggagagtagtctagaccaagccaattgcagaaccacattctttggttcccaggagagccccattcccagcccctggtctcccgtgccgcagttctatattctgcttcaaatcagccttcaggtttcccacagcatggcccctgctgacacgagaacccaaagttttcccaaatctaaatcatcaaaacagaatccccaccccaatcccaaattttgttttggttctaactacctccagaatgtgttcaataaaatgcttttataatataatcgacagctctctcgcccagcccagttctggaagggataaaaagggggcatcaccgttcctgggtaacagagccaccttctgcgtcctgctgagctctgttctctccagcacctcccaacccactagtgcctggttctcttgctccaccaggaacaagccaccatgtctcgccagtcaagtgtgtccttccggagcgggggcagtcgtagcttcagcaccgcctctgccatcaccccgtctgtctcccgcaccagcttcacctccgtgtcccggtccgggggtggcggtggtggtggcttcggcagggtcagccttgcgggtgcttgtggagtgggtggctatggcagccggagcctctacaacctggggggctccaagaggatatccatcagcactagtggtggcagcttcaggaaccggtttggtgctggtgctggaggcggctatggctttggaggtggtgccggtagtggatttggtttcggcggtggagctggtggtggctttgggctcggtggcggagctggctttggaggtggcttcggtggccctggctttcctgtctgccctcctggaggtatccaagaggtcactgtcaaccagagtctcctgactcccctcaacctgcaaatcgaccccagcatccagagggtgaggaccgaggagcgcgagcagatcaagaccctcaacaataagtttgcctccttcatcgacaaggtgcggttcctggagcagcagaacaaggttctggacaccaagtggaccctgctgcaggagcagggcaccaagactgtgaggcagaacctggagccgttgttcgagcagtacatcaacaacctcaggaggcagctggacagcatcgtgggggaacggggccgcctggactcagagctgagaaacatgcaggacctggtggaagacttcaagaacaagtatgaggatgaaatcaacaagcgtaccactgctgagaatgagtttgtgatgctgaagaaggatgtagatgctgcctacatgaacaaggtggagctggaggccaaggttgatgcactgatggatgagattaacttcatgaagatgttctttgatgcggagctgtcccagatgcagacgcatgtctctgacacctcagtggtcctctccatggacaacaaccgcaacctggacctggatagcatcatcgctgaggtcaaggcccagtatgaggagattgccaaccgcagccggacagaagccgagtcctggtatcagaccaagtatgaggagctgcagcagacagctggccggcatggcgatgacctccgcaacaccaagcatgagatctctgagatgaaccggatgatccagaggctgagagccgagattgacaatgtcaagaaacagtgcgccaatctgcagaacgccattgcggatgccgagcagcgtggggagctggccctcaaggatgccaggaacaagctggccgagctggaggaggccctgcagaaggccaagcaggacatggcccggctgctgcgtgagtaccaggagctcatgaacaccaagctggccctggacgtggagatcgccacttaccgcaagctgctggagggcgaggaatgcagactcagtggagaaggagttggaccagtcaacatctctgttgtcacaagcagtgtttcctctggatatggcagtggcagtggctatggcggtggcctcggtggaggtcttggcggcggcctcggtggaggtcttgccggaggtagcagtggaagctactactccagcagcagtgggggtgtcggcctaggtggtgggctcagtgtggggggctctggcttcagtgcaagcagtggccgagggctgggggtgggctttggcagtggcgggggtagcagctccagcgtcaaatttgtctccaccacctcctcctcccggaagagcttcaagagctaagaacctgctgcaagtcactgccttccaagtgcagcaacccagcccatggagattgcctcttctaggcagttgctcaagccatgttttatccttttctggagagtagtctagaccaagccaattgcagaaccacattctttggttcccaggagagccccattcccagcccctggtctcccgtgccgcagttctatattctgcttcaaatcagccttcaggtttcccacagcatggcccctgctgacacgagaacccaaagttttcccaaatctaaatcatcaaaacagaatccccaccccaatcccaaattttgttttggttctaactacctccagaatgtgttcaataaaatgcttttataatataatcgacagctctctcgcccagcccagttctggaagggataaaaagggggcatcaccgttcctgggtaacagagccaccttctgcgtcctgctgagctctgttctctccagcacctcccaacccactagtgcctggttctcttgctccaccaggaacaagccaccatgtctcgccagtcaagtgtgtccttccggagcgggggcagtcgtagcttcagcaccgcctctgccatcaccccgtctgtctcccgcaccagcttcacctccgtgtcccggtccgggggtggcggtggtggtggcttcggcagggtcagccttgcgggtgcttgtggagtgggtggctatggcagccggagcctctacaacctggggggctccaagaggatatccatcagcactagtggtggcagcttcaggaaccggtttggtgctggtgctggaggcggctatggctttggaggtggtgccggtagtggatttggtttcggcggtggagctggtggtggctttgggctcggtggcggagctggctttggaggtggcttcggtggccctggctttcctgtctgccctcctggaggtatccaagaggtcactgtcaaccagagtctcctgactcccctcaacctgcaaatcgaccccagcatccagagggtgaggaccgaggagcgcgagcagatcaagaccctcaacaataagtttgcctccttcatcgacaaggtgcggttcctggagcagcagaacaaggttctggacaccaagtggaccctgctgcaggagcagggcaccaagactgtgaggcagaacctggagccgttgttcgagcagtacatcaacaacctcaggaggcagctggacagcatcgtgggggaacggggccgcctggactcagagctgagaaacatgcaggacctggtggaagacttcaagaacaagtatgaggatgaaatcaacaagcgtaccactgctgagaatgagtttgtgatgctgaagaaggatgtagatgctgcctacatgaacaaggtggagctggaggccaaggttgatgcactgatggatgagattaacttcatgaagatgttctttgatgcggagctgtcccagatgcagacgcatgtctctgacacctcagtggtcctctccatggacaacaaccgcaacctggacctggatagcatcatcgctgaggtcaaggcccagtatgaggagattgccaaccgcagccggacagaagccgagtcctggtatcagaccaagtatgaggagctgcagcagacagctggccggcatggcgatgacctccgcaacaccaagcatgagatctctgagatgaaccggatgatccagaggctgagagccgagattgacaatgtcaagaaacagtgcgccaatctgcagaacgccattgcggatgccgagcagcgtggggagctggccctcaaggatgccaggaacaagctggccgagctggaggaggccctgcagaaggccaagcaggacatggcccggctgctgcgtgagtaccaggagctcatgaacaccaagctggccctggacgtggagatcgccacttaccgcaagctgctggagggcgaggaatgcagactcagtggagaaggagttggaccagtcaacatctctgttgtcacaagcagtgtttcctctggatatggcagtggcagtggctatggcggtggcctcggtggaggtcttggcggcggcctcggtggaggtcttgccggaggtagcagtggaagctactactccagcagcagtgggggtgtcggcctaggtggtgggctcagtgtggggggctctggcttcagtgcaagcagtggccgagggctgggggtgggctttggcagtggcgggggtagcagctccagcgtcaaatttgtctccaccacctcctcctcccggaagagcttcaagagctaagaacctgctgcaagtcactgccttccaagtgcagcaacccagcccatggagattgcctcttctaggcagttgctcaagccatgttttatccttttctggagagtagtctagaccaagccaattgcagaaccacattctttggttcccaggagagccccattcccagcccctggtctcccgtgccgcagttctatattctgcttcaaatcagccttcaggtttcccacagcatggcccctgctgacacgagaacccaaagttttcccaaatctaaatcatcaaaacagaatccccaccccaatcccaaattttgttttggttctaactacctccagaatgtgttcaataaaatgcttttataatataatcgacagctctctcgcccagcccagttctggaagggataaaaagggggcatcaccgttcctgggtaacagagccaccttctgcgtcctgctgagctctgttctctccagcacctcccaacccactagtgcctggttctcttgctccaccaggaacaagccaccatgtctcgccagtcaagtgtgtccttccggagcgggggcagtcgtagcttcagcaccgcctctgccatcaccccgtctgtctcccgcaccagcttcacctccgtgtcccggtccgggggtggcggtggtggtggcttcggcagggtcagccttgcgggtgcttgtggagtgggtggctatggcagccggagcctctacaacctggggggctccaagaggatatccatcagcactagtggtggcagcttcaggaaccggtttggtgctggtgctggaggcggctatggctttggaggtggtgccggtagtggatttggtttcggcggtggagctggtggtggctttgggctcggtggcggagctg

SEQ ID NO: 752 - DNA, 32765 bp, Homo sapiens; identical to SEQ ID NO: 751
  misc_feature (284)..(284): second gene starts at position 284

SEQ ID NO: 753 - DNA, 4588 bp, Homo sapiens
  misc_feature (2330)..(2330): second gene starts at position 2330
atggcggccgtgcgcggggcgcccctgctcagctgcctcctggcgttgctggccctgtgccctggagggcgcccgcagacggtgctgaccgacgacgagatcgaggagttcctcgagggcttcctgtcagagctagaacctgagccccgggaggacgacgtggaggccccgccgcctcccgagcccaccccgcgggtccgaaaagcccaggcggggggcaagccagggaagcggccagggacggccgcagaagtgcctccggaaaagaccaaagacaaagggaagaaaggcaagaaagacaaaggccccaaggtgcccaaggagtccttggaggggtcccccaggccgcccaagaaggggaaggagaagccacccaaggccaccaagaagcccaaggagaagccacctaaggccaccaagaagcccaaggagaagccacccaaggccaccaagaagcccaaagagaagccacccaaggccaccaagaagcccccgtcagggaagaggccccccattctggctccctcagaaaccctggagtggccactgcccccaccccccagccctggccccgaggagctaccccaggagggaggggcgcccctctcaaataactggcagaatccaggagaggagacccatgtggaggcacgggagcaccagcctgagccggaggaggagaccgagcaacccacactggactacaatgaccagatcgagagggaggactatgaggactttgagtacattcggcgccagaagcaacccaggccacccccaagcagaaggaggaggcccgagcgggtctggccagagccccctgaggagaaggccccggccccagccccggaggagaggattgagcctcctgtgaagcctctgctgcccccgctgccccctgactatggtgatggttacgtgatccccaactacgatgacatggactattactttgggcctcctccgccccagaagcccgatgctgagcgccagacagacgaagagaaggaggagctgaagaaacccaaaaaggaggacagcagccccaaggaggagaccgacaagtgggcagtggagaagggcaaggaccacaaagagccccgaaagggcgaggagttggaggaggagtggacgcctacggagaaagtcaagtgtccccccattgggatggagtcacaccgtattgaggacaaccagatccgagcctcctccatgctgcgccacggcctgggggcacagcgcggccggctcaacatgcagaccggtgccactgaggacgactactatgatggtgcgtggtgtgccgaggacgatgccaggacccagtggatagaggtggacaccaggaggactacccggttcacaggcgtcatcacccagggcagagactccagcatccatgacgattttgtgaccaccttcttcgtgggcttcagcaatgacagccagacatgggtgatgtacaccaacggctatgaggaaatgacctttcatgggaacgtggacaaggacacacccgtgctgagtgagctcccagagccggtggtggctcgtttcatccgcatctacccactcacctggaatggcagcctgtgcatgcgcctggaggtgctggggtgctctgtggcccctgtctacagctactacgcacagaatgaggtggtggccaccgatgacctggatttccggcaccacagctacaaggacatgcgccagctcatgaaggtggtgaacgaggagtgccccaccatcacccgcacttacagcctgggcaagagctcacgaggcctcaagatctatgccatggagatctcagacaaccctggggagcatgaactgggggagcccgagttccgctacactgctgggatccatggcaacgaggtgctgggccgagagctgttgctgctgctcatgcagtacctgtgccgagagtaccgcgatgggaacccacgtgtgcgcagcctggtgcaggacacacgcatccacctggtgccctcactgaaccctgatggctacgaggtggcagcgcagatgggctcagagtttgggaactgggcgctgggactgtggactgaggagggctttgacatctttgaagatttcccggatctcaactctgtgctctggggagctgaggagaggaaatgggtcccctaccgggtccccaacaataacttgcccatccctgaacgctacctttcgccagatgccacggtatccacggaggtccgggccatcattgcctggatggagaagaaccccttcgtgctgggagcaaatctgaacggcggcgagcggctagtatcctacccctacgatatggcccccccccgccccccccgcgctcactcgcactcacacccgggcgcaggaggcgggcggcccgggccccaccggccccccatggacgcccccagcacggggcgctgagacccccgcgtcgctgcccagcccggtccggcgcgccacgccgagggatctctggacaggacaagactccgaagctactcccccagcacacagcccgggacccacaaacccagcttgcccccagccctcccacctgccactccctggcccctcccaccgcccgccccccttggggcgcagggcatggtgtgaaaggccaagtgctgaggcgggtatcatgggtgctgtgccctagggcctgggtggcagggggtgggtggcctgtgggtgtgccgggggggccagtgtgcccaccccagtctcttggcgtgctggagggcatcctggatggaattgaagtgaatggaacagaagccaagcaaggtggagtgtgggtcagacccagaggagaacagtgccaggtcaccagatggaaagcgaaaaagaaagaacggccaatgttccctgaaaaccagcatgtcagggtatatccctagttacctggacaaagacgagcagtgtgtcgtgtgtggggacaaggcaactggttatcactaccgctgtatcacttgtgagggctgcaagggcttctttcgccgcacaatccagaagaacctccatcccacctattcctgcaaatatgacagctgctgtgtcattgacaagatcacccgcaatcagtgccagctgtgccgcttcaagaagtgcatcgccgtgggcatggccatggacttggttctagatgactcgaagcgggtggccaagcgtaagctgattgagcagaaccgggagcggcggcggaaggaggagatgatccgatcactgcagcagcgaccagagcccactcctgaagagtgggatctgatccacattgccacagaggcccatcgcagcaccaatgcccagggcagccattggaaacagaggcggaaattcctgcccgatgacattggccagtcacccattgtctccatgccggacggagacaaggtggacctggaagccttcagcgagtttaccaagatcatcaccccggccatcacccgtgtggtggactttgccaaaaaactgcccatgttctccgagctgccttgcgaagaccagatcatcctcctgaaggggtgctgcatggagatcatgtccctgcgggcggctgtccgctacgaccctgagagcgacaccctgacgctgagtggggagatggctgtcaagcgggagcagctcaagaatggcggcctgggcgtagtctccgacgccatctttgaactgggcaagtcactctctgcctttaacctggatgacacggaagtggctctgctgcaggctgtgctgctaatgtcaacagaccgctcgggcctgctgtgtgtggacaagatcgagaagagtcaggaggcgtacctgctggcgttcgagcactacgtcaaccaccgcaaacacaacattccgcacttctggcccaagctgctgatgaaggtgactgacctccgcatgatcggggcctgccacgccagccgcttcctccacatgaaagtcgagtgccccaccgaactcttccccccactcttcctcgaggtctttgaggatcaggaagtctaaagcctcaggcggccagagggtgtgcggagctggtggggaggagcctggagagaaggggcagagctgggggctgagggagacccccccacaccccttctctccttcctctcgtccttggatagattcagctcccacacacacacccgcactgcccaggtccctcctcagacctccagccctgggacagggcaaacaactgaacttgctatggaaaggacagtgtgggaggctgggggagctgtgtcctgcagttcccaggaccccatcctctcagaaggtaggggaagggcgggaggattgagaagggacaagccaccttgaccgtaggggaaggaggaatgtgggctgggggaagatgccctcaactcaccccctacacacacatgagagagagcccccacccagttccttggcctaggtctcccctccaggctgagggcctctctacttccccagatgcctgggtgcaaagaacggcttggcttggctcctcctctggaggttaaaatttatagtcattctaactgcactttggaaaccaagcaaggggagaagacaaatgaagaaaaactagacagag

SEQ ID NO: 754 - DNA, 4731 bp, Homo sapiens
  misc_feature (2330)..(2330): second gene starts at position 2330
atggcggccgtgcgcggggcgcccctgctcagctgcctcctggcgttgctggccctgtgccctggagggcgcccgcagacggtgctgaccgacgacgagatcgaggagttcctcgagggcttcctgtcagagctagaacctgagccccgggaggacgacgtggaggccccgccgcctcccgagcccaccccgcgggtccgaaaagcccaggcggggggcaagccagggaagcggccagggacggccgcagaagtgcctccggaaaagaccaaagacaaagggaagaaaggcaagaaagacaaaggccccaaggtgcccaaggagtccttggaggggtcccccaggccgcccaagaaggggaaggagaagccacccaaggccaccaagaagcccaaggagaagccacctaaggccaccaagaagcccaaggagaagccacccaaggccaccaagaagcccaaagagaagccacccaaggccaccaagaagcccccgtcagggaagaggccccccattctggctccctcagaaaccctggagtggccactgcccccaccccccagccctggccccgaggagctaccccaggagggaggggcgcccctctcaaataactggcagaatccaggagaggagacccatgtggaggcacgggagcaccagcctgagccggaggaggagaccgagcaacccacactggactacaatgaccagatcgagagggaggactatgaggactttgagtacattcggcgccagaagcaacccaggccacccccaagcagaaggaggaggcccgagcgggtctggccagagccccctgaggagaaggccccggccccagccccggaggagaggattgagcctcctgtgaagcctctgctgcccccgctgccccctgactatggtgatggttacgtgatccccaactacgatgacatggactattactttgggcctcctccgccccagaagcccgatgctgagcgccagacagacgaagagaaggaggagctgaagaaacccaaaaaggaggacagcagccccaaggaggagaccgacaagtgggcagtggagaagggcaaggaccacaaagagccccgaaagggcgaggagttggaggaggagtggacgcctacggagaaagtcaagtgtccccccattgggatggagtcacaccgtattgaggacaaccagatccgagcctcctccatgctgcgccacggcctgggggcacagcgcggccggctcaacatgcagaccggtgccactgaggacgactactatgatggtgcgtggtgtgccgaggacgatgccaggacccagtggatagaggtggacaccaggaggactacccggttcacaggcgtcatcacccagggcagagactccagcatccatgacgattttgtgaccaccttcttcgtgggcttcagcaatgacagccagacatgggtgatgtacaccaacggctatgaggaaatgacctttcatgggaacgtggacaaggacacacccgtgctgagtgagctcccagagccggtggtggctcgtttcatccgcatctacccactcacctggaatggcagcctgtgcatgcgcctggaggtgctggggtgctctgtggcccctgtctacagctactacgcacagaatgaggtggtggccaccgatgacctggatttccggcaccacagctacaaggacatgcgccagctcatgaaggtggtgaacgaggagtgccccaccatcacccgcacttacagcctgggcaagagctcacgaggcctcaagatctatgccatggagatctcagacaaccctggggagcatgaactgggggagcccgagttccgctacactgctgggatccatggcaacgaggtgctgggccgagagctgttgctgctgctcatgcagtacctgtgccgagagtaccgcgatgggaacccacgtgtgcgcagcctggtgcaggacacacgcatccacctggtgccctcactgaaccctgatggctacgaggtggcagcgcagatgggctcagagtttgggaactgggcgctgggactgtggactgaggagggctttgacatctttgaagatttcccggatctcaactctgtgctctggggagctgaggagaggaaatgggtcccctaccgggtccccaacaataacttgcccatccctgaacgctacctttcgccagatgccacggtatccacggaggtccgggccatcattgcctggatggagaagaaccccttcgtgctgggagcaaatctgaacggcggcgagcggctagtatcctacccctacgatatggcccccccccgccccccccgcgctcactcgcactcacacccgggcgcaggaggcgggcggcccgggccccaccggccccccatggacgcccccagcacggggcgctgagacccccgcgtcgctgcccagcccggtccggcgcgccacgccgagggatctctggacaggacaagactccgaagctactcccccagcacacagcccgggacccacaaacccagcttgcccccagccctcccacctgccactccctggcccctcccaccgcccgccccccttggggcgcagggcatggtgtgaaaggccaagtgctgaggcgggtatcatgggtgctgtgccctagggcctgggtggcagggggtgggtggcctgtgggtgtgccgggggggccagtgtgcccaccccagtctcttggcgtgctggagggcatcctggatggaattgaagtgaatggaacagaagccaagcaaggtggagtgtgggtcagacccagaggagaacagtgccaggtcaccagatggaaagcgaaaaagaaagaacggccaatgttccctgaaaaccagcatgtcagggtatatccctagttacctggacaaagacgagcagtgtgtcgtgtgtggggacaaggcaactggttatcactaccgctgtatcacttgtgagggctgcaagggcttctttcgccgcacaatccagaagaacctccatcccacctattcctgcaaatatgacagctgctgtgtcattgacaagatcacccgcaatcagtgccagctgtgccgcttcaagaagtgcatcgccgtgggcatggccatggacttggttctagatgactcgaagcgggtggccaagcgtaagctgattgagcagaaccgggagcggcggcggaaggaggagatgatccgatcactgcagcagcgaccagagcccactcctgaagagtgggatctgatccacattgccacagaggcccatcgcagcaccaatgcccagggcagccattggaaacagaggcggaaattcctgcccgatgacattggccagtcacccattgtctccatgccggacggagacaaggtggacctggaagccttcagcgagtttaccaagatcatcaccccggccatcacccgtgtggtggactttgccaaaaaactgcccatgttctccgagctgccttgcgaagaccagatcatcctcctgaaggggtgctgcatggagatcatgtccctgcgggcggctgtccgctacgaccctgagagcgacaccctgacgctgagtggggagatggctgtcaagcgggagcagctcaagaatggcggcctgggcgtagtctccgacgccatctttgaactgggcaagtcactctctgcctttaacctggatgacacggaagtggctctgctgcaggctgtgctgctaatgtcaacagaccgctcgggcctgctgtgtgtggacaagatcgagaagagtcaggaggcgtacctgctggcgttcgagcactacgtcaaccaccgcaaacacaacattccgcacttctggcccaagctgctgatgaaggagagagaagtgcagagttcgattctgtacaagggggcagcggcagaaggccggccgggcgggtcactgggcgtccacccggaaggacagcagcttctcggaatgcatgttgttcagggtccgcaggtccggcagcttgagcagcagcttggtgaagcgggaagtctccaagggccggttcttcagcaccagagcccgaagagcccgcagcagcgtctcctggagctgctccaccgaagcggaattctccatgcccgagcggtctgtggggaagacgacagcagtgaggcggactccccgagctcctctgaggaggaaccggaggtctgcgaggacctggcaggcaatgcagcctctccctgaagccccccagaaggccgatggggaaggagaaggagtgccataccttctcccaggcctctgccccaagagcaggaggtgcctgaaagctgggagcgtgggctcagcagggctggtcacctcccatcccgtaagaccaccttcccttcctcagcaggccaaacatggccagactcccttgctttttgctgtgtagttccctctgcctgggatgcccttccccctttctctgcctggcaacatcttacttgtcctttgaggccccaactcaagtgtcacctccttccccagctcccccaggcagaaatagttgtctgtgcttccttggttcatgcttctactgtgacacttatctcactgttttataattagtcgggcatgagtctgtttcccaagctagactgtgtctgaatcatgtctgtatccccagtgcccggtgcagggcctggcatagagtaggtactccataaaaggtgtgttgaattg

SEQ ID NO: 755 - DNA, 4614 bp, Homo sapiens
  misc_feature (2330)..(2330): second gene starts at position 2330
atggcggccgtgcgcggggcgcccctgctcagctgcctcctggcgttgctggccctgtgccctggagggcgcccgcagacggtgctgaccgacgacgagatcgaggagttcctcgagggcttcctgtcagagctagaacctgagccccgggaggacgacgtggaggccccgccgcctcccgagcccaccccgcgggtccgaaaagcccaggcggggggcaagccagggaagcggccagggacggccgcagaagtgcctccggaaaagaccaaagacaaagggaagaaaggcaagaaagacaaaggccccaaggtgcccaaggagtccttggaggggtcccccaggccgcccaagaaggggaaggagaagccacccaaggccaccaagaagcccaaggagaagccacctaaggccaccaagaagcccaaggagaagccacccaaggccaccaagaagcccaaagagaagccacccaaggccaccaagaagcccccgtcagggaagaggccccccattctggctccctcagaaaccctggagtggccactgcccccaccccccagccctggccccgaggagctaccccaggagggaggggcgcccctctcaaataactggcagaatccaggagaggagacccatgtggaggcacgggagcaccagcctgagccggaggaggagaccgagcaacccacactggactacaatgaccagatcgagagggaggactatgaggactttgagtacattcggcgccagaagcaacccaggccacccccaagcagaaggaggaggcccgagcgggtctggccagagccccctgaggagaaggccccggccccagccccggaggagaggattgagcctcctgtgaagcctctgctgcccccgctgccccctgactatggtgatggttacgtgatccccaactacgatgacatggactattactttgggcctcctccgccccagaagcccgatgctgagcgccagacagacgaagagaaggaggagctgaagaaacccaaaaaggaggacagcagccccaaggaggagaccgacaagtgggcagtggagaagggcaaggaccacaaagagccccgaaagggcgaggagttggaggaggagtggacgcctacggagaaagtcaagtgtccccccattgggatggagtcacaccgtattgaggacaaccagatccgagcctcctccatgctgcgccacggcctgggggcacagcgcggccggctcaacatgcagaccggtgccactgaggacgactactatgatggtgcgtggtgtgccgaggacgatgccaggacccagtggatagaggtggacaccaggaggactacccggttcacaggcgtcatcacccagggcagagactccagcatccatgacgattttgtgaccaccttcttcgtgggcttcagcaatgacagccagacatgggtgatgtacaccaacggctatgaggaaatgacctttcatgggaacgtggacaaggacacacccgtgctgagtgagctcccagagccggtggtggctcgtttcatccgcatctacccactcacctggaatggcagcctgtgcatgcgcctggaggtgctggggtgctctgtggcccctgtctacagctactacgcacagaatgaggtggtggccaccgatgacctggatttccggcaccacagctacaaggacatgcgccagctcatgaaggtggtgaacgaggagtgccccaccatcacccgcacttacagcctgggcaagagctcacgaggcctcaagatctatgccatggagatctcagacaaccctggggagcatgaactgggggagcccgagttccgctacactgctgggatccatggcaacgaggtgctgggccgagagctgttgctgctgctcatgcagtacctgtgccgagagtaccgcgatgggaacccacgtgtgcgcagcctggtgcaggacacacgcatccacctggtgccctcactgaaccctgatggctacgaggtggcagcgcagatgggctcagagtttgggaactgggcgctgggactgtggactgaggagggctttgacatctttgaagatttcccggatctcaactctgtgctctggggagctgaggagaggaaatgggtcccctaccgggtccccaacaataacttgcccatccctgaacgctacctttcgccagatgccacggtatccacggaggtccgggccatcattgcctggatggagaagaaccccttcgtgctgggagcaaatctgaacggcggcgagcggctagtatcctacccctacgatatggcccccccccgccccccccgcgctcactcgcactcacacccgggcgcaggaggcgggcggcccgggccccaccggccccccatggacgcccccagcacggggcgctgagacccccgcgtcgctgcccagcccggtccggcgcgccacgccgagggatctctggacaggacaagactccgaagctactcccccagcacacagcccgggacccacaaacccagcttgcccccagccctcccacctgccactccctggcccctcccaccgcccgccccccttggggcgcagggcatggtgtgaaaggccaagtgctgaggcgggtatcatgggtgctgtgccctagggcctgggtggcagggggtgggtggcctgtgggtgtgccgggggggccagtgtgcccaccccagtctcttggcgtgctggagggcatcctggatggaattgaagtgaatggaacagaagccaagcaaggtggagtgtgggtcagacccagaggagaacagtgccaggtcaccagatggaaagcgaaaaagaaagaacggccaatgttccctgaaaaccagcatgtcagggtatatccctagttacctggacaaagacgagcagtgtgtcgtgtgtggggacaaggcaactggttatcactaccgctgtatcacttgtgagggctgcaagggcttctttcgccgcacaatccagaagaacctccatcccacctattcctgcaaatatgacagctgctgtgtcattgacaagatcacccgcaatcagtgccagctgtgccgcttcaagaagtgcatcgccgtgggcatggccatggacttggttctagatgactcgaagcgggtggccaagcgtaagctgattgagcagaaccgggagcggcggcggaaggaggagatgatccgatcactgcagcagcgaccagagcccactcctgaagagtgggatctgatccacattgccacagaggcccatcgcagcaccaatgcccagggcagccattggaaacagaggcggaaattcctgcccgatgacattggccagtcacccattgtctccatgccggacggagacaaggtggacctggaagccttcagcgagtttaccaagatcatcaccccggccatcacccgtgtggtggactttgccaaaaaactgcccatgttctccgagctgccttgcgaagaccagatcatcctcctgaaggggtgctgcatggagatcatgtccctgcgggcggctgtccgctacgaccctgagagcgacaccctgacgctgagtggggagatggctgtcaagcgggagcagctcaagaatggcggcctgggcgtagtctccgacgccatctttgaactgggcaagtcactctctgcctttaacctggatgacacggaagtggctctgctgcaggctgtgctgctaatgtcaacagaccgctcgggcctgctgtgtgtggacaagatcgagaagagtcaggaggcgtacctgctggcgttcgagcactacgtcaaccaccgcaaacacaacattccgcacttctggcccaagctgctgatgaagggtccgcaggtccggcagcttgagcagcagcttggtgaagcgggaagtctccaagggccggttcttcagcaccagagcccgaagagcccgcagcagcgtctcctggagctgctccaccgaagcggaattctccatgcccgagcggtctgtggggaagacgacagcagtgaggcggactccccgagctcctctgaggaggaaccggaggtctgcgaggacctggcaggcaatgcagcctctccctgaagccccccagaaggccgatggggaaggagaaggagtgccataccttctcccaggcctctgccccaagagcaggaggtgcctgaaagctgggagcgtgggctcagcagggctggtcacctcccatcccgtaagaccaccttcccttcctcagcaggccaaacatggccagactcccttgctttttgctgtgtagttccctctgcctgggatgcccttccccctttctctgcctggcaacatcttacttgtcctttgaggccccaactcaagtgtcacctccttccccagctcccccaggcagaaatagttgtctgtgcttccttggttcatgcttctactgtgacacttatctcactgttttataattagtcgggcatgagtctgtttcccaagctagactgtgtctgaatcatgtctgtatccccagtgcccggtgcagggcctggcatagagtaggtactccataaaaggtgtgttgaattg

SEQ ID NO: 756 - DNA, 8078 bp, Homo sapiens
  misc_feature (475)..(475): second gene starts at position 475
atgagtagctcccactctcgggcgggccagagcgcagcaggcgcggctccgggcggcggcgtcgacacgcgggacgccgagatgccggccaccgagaaggacctggcggaggacgcgccgtggaagaagatccagcagaacactttcacgcgctggtgcaacgagcacctgaagtgcgtgagcaagcgcatcgccaacctgcagacggacctgagcgacgggctgcggcttatcgcgctgttggaggtgctcagccagaagaagatgcaccgcaagcacaaccagcggcccactttccgccaaatgcagcttgagaacgtgtcggtggcgctcgagttcctggaccgcgagagcatcaaactggtgtccatcgacagcaaggccatcgtggacgggaacctgaagctgatcctgggcctcatctggaccctgatcctgcactactccatctccatgcccatgtgggacgaggaggaggatgaggaggccaagaagcagacccccaagcagaggctcctgggctggatccagaacaagctgccgcagctgcccatcaccaacttcagccgggactggcagagcggccgggccctgggcgccctggtggacagctgtgccccgggcctgtgtcctgactgggactcttgggacgccagcaagcccgttaccaatgcgcgagaggccatgcagcaggcggatgactggctgggcatcccccaggtgatcacccccgaggagattgtggaccccaacgtggacgagcactctgtcatgacctacctgtcccagttccccaaggccaagctgaagccaggggctcccttgcggcccaaactgaacccgaagaaagcccgtgcctacgggccaggcatcgagcccacaggcaacatggtgaagaagcgggcagagttcactgtggagaccagaagtgctggccagggagaggtgctggtgtacgtggaggacccggccggacaccaggaggaggcaaaagtgaccgccaataacgacaagaaccgcaccttctccgtctggtacgtccccgaggtgacggggactcataaggttactgtgctctttgctggccagcacatcgccaagagccccttcgaggtgtacgtggataagtcacagggtgacgccagcaaagtgacagcccaaggtcccggcctggagcccagtggcaacatcgccaacaagaccacctactttgagatctttacggcaggagctggcacgggcgaggtcgaggttgtgatccaggaccccatgggacagaagggcacggtagagcctcagctggaggcccggggcgacagcacataccgctgcagctaccagcccaccatggagggcgtccacaccgtgcacgtcacgtttgccggcgtgcccatccctcgcagcccctacactgtcactgttggccaagcctgtaacccgagtgcctgccgggcggttggccggggcctccagcccaagggtgtgcgggtgaaggagacagctgacttcaaggtgtacacaaagggcgctggcagtggggagctgaaggtcaccgtgaagggccccaagggagaggagcgcgtgaagcagaaggacctgggggatggcgtgtatggcttcgagtattaccccatggtccctggaacctatatcgtcaccatcacgtggggtggtcagaacatcgggcgcagtcccttcgaagtgaaggtgggcaccgagtgtggcaatcagaaggtacgggcctggggccctgggctggagggcggcgtcgttggcaagtcagcagactttgtggtggaggctatcggggacgacgtgggcacgctgggcttctcggtggaagggccatcgcaggctaagatcgaatgtgacgacaagggcgacggctcctgtgatgtgcgctactggccgcaggaggctggcgagtatgccgttcacgtgctgtgcaacagcgaagacatccgcctcagccccttcatggctgacatccgtgacgcgccccaggacttccacccagacagggtgaaggcacgtgggcctggattggagaagacaggtgtggccgtcaacaagccagcagagttcacagtggatgccaagcacggtggcaaggccccacttcgggtccaagtccaggacaatgaaggctgccctgtggaggcgttggtcaaggacaacggcaatggcacttacagctgctcctacgtgcccaggaagccggtgaagcacacagccatggtgtcctggggaggcgtcagcatccccaacagccccttcagggtgaatgtgggagctggcagccaccccaacaaggtcaaagtatacggccccggagtagccaagacagggctcaaggcccacgagcccacctacttcactgtggactgcgccgaggctggccagggggacgtcagcatcggcatcaagtgtgcccctggagtggtaggccccgccgaagctgacatcgacttcgacatcatccgcaatgacaatgacaccttcacggtcaagtacacgccccggggggctggcagctacaccattatggtcctctttgctgaccaggccacgcccaccagccccatccgagtcaaggtggagccctctcatgacgccagtaaggtgaaggccgagggccctggcctcagtcgcactggtgtcgagcttggcaagcccacccacttcacagtaaatgccaaagctgctggcaaaggcaagctggacgtccagttctcaggactcaccaagggggatgcagtgcgagatgtggacatcatcgaccaccatgacaacacctacacagtcaagtacacgcctgtccagcagggtccagtaggcgtcaatgtcacttatggaggggatcccatccctaagagccctttctcagtggcagtatctccaagcctggacctcagcaagatcaaggtgtctggcctgggagagaaggtggacgttggcaaagaccaggagttcacagtcaaatcaaagggtgctggtggtcaaggcaaagtggcatccaagattgtgggcccctcgggtgcagcggtgccctgcaaggtggagccaggcctgggggctgacaacagtgtggtgcgcttcctgccccgtgaggaagggccctatgaggtggaggtgacctatgacggcgtgcccgtgcctggcagcccctttcctctggaagctgtggcccccaccaagcctagcaaggtgaaggcgtttgggccggggctgcagggaggcagtgcgggctcccccgcccgcttcaccatcgacaccaagggcgccggcacaggtggcctgggcctgacggtggagggcccctgtgaggcgcagctcgagtgcttggacaatggggatggcacatgttccgtgtcctacgtgcccaccgagcccggggactacaacatcaacatcctcttcgctgacacccacatccctggctccccattcaaggcccacgtggttccctgctttgacgcatccaaagtcaagtgctcaggccccgggctggagcgggccaccgctggggaggtgggccaattccaagtggactgctcgagcgcgggcagcgcggagctgaccattgagatctgctcggaggcggggcttccggccgaggtgtacatccaggaccacggtgatggcacgcacaccattacctacattcccctctgccccggggcctacaccgtcaccatcaagtacggcggccagcccgtgcccaacttccccagcaagctgcaggtggaacctgcggtggacacttccggtgtccagtgctatgggcctggtattgagggccagggtgtcttccgtgaggccaccactgagttcagtgtggacgcccgggctctgacacagaccggagggccgcacgtcaaggcccgtgtggccaacccctcaggcaacctgacggagacctacgttcaggaccgtggcgatggcatgtacaaagtggagtacacgccttacgaggagggactgcactccgtggacgtgacctatgacggcagtcccgtgcccagcagccccttccaggtgcccgtgaccgagggctgcgacccctcccgggtgcgtgtccacgggccaggcatccaaagtggcaccaccaacaagcccaacaagttcactgtggagaccaggggagctggcacgggcggcctgggcctggctgtagagggcccctccgaggccaagatgtcctgcatggataacaaggacggcagctgctcggtcgagtacatcccttatgaggctggcacctacagcctcaacgtcacctatggtggccatcaagtgccaggcagtcctttcaaggtccctgtgcatgatgtgacagatgcgtccaaggtcaagtgctctgggcccggcctgagcccaggcatggttcgtgccaacctccctcagtccttccaggtggacacaagcaaggctggtgtggccccattgcaggtcaaagtgcaagggcccaaaggcctggtggagccagtggacgtggtagacaacgctgatggcacccagaccgtcaattatgtgcccagccgagaagggccctacagcatctcagtactgtatggagatgaagaggtaccccggagccccttcaaggtcaaggtgctgcctactcatgatgccagcaaggtgaaggccagtggccccgggctcaacaccactggcgtgcctgccagcctgcccgtggagttcaccatcgatgcaaaggacgccggggagggcctgctggctgtccagatcacggatcccgaaggcaagccgaagaagacacacatccaagacaaccatgacggcacgtatacagtggcctacgtgccagacgtgacaggtcgctacaccatcctcatcaagtacggtggtgacgagatccccttctccccgtaccgcgtgcgtgccgtgcccaccggggacgccagcaagtgcactgtcacagtgtcaatcggaggtcacgggctaggtgctggcatcggccccaccattcagattggggaggagacggtgatcactgtggacactaaggcggcaggcaaaggcaaagtgacgtgcaccgtgtgcacgcctgatggctcagaggtggatgtggacgtggtggagaatgaggacggcactttcgacatcttctacacggccccccagccgggcaaatacgtcatctgtgtgcgctttggtggcgagcacgtgcccaacagccccttccaagtgacggctctggctggggaccagccctcggtgcagccccctctacggtctcagcagctggccccacagtacacctacgcccagggcggccagcagacttgggccccggagaggcccctggtgggtgtcaatgggctggatgtgaccagcctgaggccctttgaccttgtcatccccttcaccatcaagaagggcgagatcacaggggaggttcggatgccctcaggcaaggtggcgcagcccaccatcactgacaacaaagacggcaccgtgaccgtgcggtatgcacccagcgaggctggcctgcacgagatggacatccgctatgacaacatgcacatcccaggaagccccttgcagttctatgtggattacgtcaactgtggccatgtcactgcctatgggcctggcctcacccatggagtagtgaacaagcctgccaccttcaccgtcaacaccaaggatgcaggagaggggggcctgtctctggccattgagggcccgtccaaagcagaaatcagctgcactgacaaccaggatgggacatgcagcgtgtcctacctgcctgtgctgccgggggactacagcattctagtcaagtacaatgaacagcacgtcccaggcagccccttcactgctcgggtcacaggtgacgactccatgcgtatgtcccacctaaaggtcggctctgctgccgacatccccatcaacatctcagagacggatctcagcctgctgacggccactgtggtcccgccctcgggccgggaggagccctgtttgctgaagcggctgcgtaatggccacgtggggatttcattcgtgcccaaggagacgggggagcacctggtgcatgtgaagaaaaatggccagcacgtggccagcagccccatcccggtggtgatcagccagtcggaaattggggatgccagtcgtgttcgggtctctggtcagggccttcacgaaggccacacctttgagcctgcagagtttatcattgatacccgcgatgcaggctatggtgggctcagcctgtccattgagggccccagcaaggtggacatcaacacagaggacctggaggacgggacgtgcagggtcacctactgccccacagagccaggcaactacatcatcaacatcaagtttgccgaccagcacgtgcctggcagccccttctctgtgaaggtgacaggcgagggccgggtgaaagagagcatcacccgcaggcgtcgggctccttcagtggccaacgttggtagtcattgtgacctcagcctgaaaatccctgaaattagcatccaggatatgacagcccaggtgaccagcccatcgggcaagacccatgaggccgagatcgtggaaggggagaaccacacctactgcatccgctttgttcccgctgagatgggcacacacacagtcagcgtgaagtacaagggccagcacgtgcctgggagccccttccagttcaccgtggggcccctaggggaagggggagcccacaaggtccgagctgggggccctggcctggagagagctgaagctggagtgccagccgaattcagtatctggacccgggaagctggtgctggaggcctggccattgctgtcgagggccccagcaaggctgagatctcttttgaggaccgcaaggacggctcctgtggtgtggcttatgtggtccaggagccaggtgactacgaagtctcagtcaagttcaacgaggaacacattcccgacagccccttcgtggtgcctgtggcttctccgtctggcgacgcccgccgcctcactgtttctagccttcaggagtcagggctaaaggtcaaccagccagcctcttttgcagtcagcctgaacggggccaagggggcgatcgatgccaaggtgcacagcccctcaggagccctggaggagtgctatgtcacagaaattgaccaagataagtatgctgtgcgcttcatccctcgggagaatggcgtttacctgattgacgtcaagttcaacggcacccacatccctggaagccccttcaagatccgagttggggagcctgggcatggaggggacccaggcttggtgtctgcttacggagcaggtctggaaggcggtgtcacagggaacccagctgagttcgtcgtgaacacgagcaatgcgggagctggtgccctgtcggtgaccattgacggcccctccaaggtgaagatggattgccaggagtgccctgagggctaccgcgtcacctatacccccatggcacgacattttgtttatttatttaaaacaaacatctgtgcgctatgtacaggcccggctcccagggaggtgggcgggcagggggccaagctgggtgggagagcgatggcagctgggggttggggggggtctggccccttgcctggccagcagggtcagcttctccattcctgccacctgccagctggcccaagctgatggcttcccgcaggacagccacctccctgcaggagagcagggccagaggagcctcttctcaaagcaaaataaatacgggactgacccagctccgcccacagcccgctctcggcatcagccttcatcgtaagagagaaaagctggttccgaggccgggcaggagaaaggccagcagtgcctggtccagccggcgtcgccttgggcggtgagcagtgccaggcaggggcgaggggccgggcagaccccgaggctttaaggcaaagcagggcaagggtgtacgcagcccgggccgggtcagcctttggcacaattaggggcggcaaccgcagtgaccacagggcatggccgagtacaggggctggaggaccagaagccccttggtcctgaacctccactccaggccctggcag

SEQ ID NO: 757 - DNA, 8078 bp, Homo sapiens; identical to SEQ ID NO: 756
  misc_feature (475)..(475): second gene starts at position 475

SEQ ID NO: 758 - DNA, 8054 bp, Homo sapiens
  misc_feature (451)..(451): second gene starts at position 451
atgagtagctcccactctcgggcgggccagagcgcagcaggcgcggctccgggcggcggcgtcgacacgcgggacgccgagatgccggccaccgagaaggacctggcggaggacgcgccgtggaagaagatccagcagaacactttcacgcgctggtgcaacgagcacctgaagtgcgtgagcaagcgcatcgccaacctgcagacggacctgagcgacgggctgcggcttatcgcgctgttggaggtgctcagccagaagaagatgcaccgcaagcacaaccagcggcccactttccgccaaatgcagcttgagaacgtgtcggtggcgctcgagttcctggaccgcgagagcatcaaactggtgtccatcgacagcaaggccatcgtggacgggaacctgaagctgatcctgggcctcatctggaccctgatcctgcactactccatctccatgcccatgtgggacgaggaggaggatgaggaggccaagaagcagacccccaagcagaggctcctgggctggatccagaacaagctgccgcagctgcccatcaccaacttcagccgggactggcagagcggccgggccctgggcgccctggtggacagctgtgccccgggcctgtgtcctgactgggactcttgggacgccagcaagcccgttaccaatgcgcgagaggccatgcagcaggcggatgactggctgggcatcccccaggtgatcacccccgaggagattgtggaccccaacgtggacgagcactctgtcatgacctacctgtcccagttccccaaggccaagctgaagccaggggctcccttgcggcccaaactgaacccgaagaaagcccgtgcctacgggccaggcatcgagcccacaggcaacatggtgaagaagcgggcagagttcactgtggagaccagaagtgctggccagggagaggtgctggtgtacgtggaggacccggccggacaccaggaggaggcaaaagtgaccgccaataacgacaagaaccgcaccttctccgtctggtacgtccccgaggtgacggggactcataaggttactgtgctctttgctggccagcacatcgccaagagccccttcgaggtgtacgtggataagtcacagggtgacgccagcaaagtgacagcccaaggtcccggcctggagcccagtggcaacatcgccaacaagaccacctactttgagatctttacggcaggagctggcacgggcgaggtcgaggttgtgatccaggaccccatgggacagaagggcacggtagagcctcagctggaggcccggggcgacagcacataccgctgcagctaccagcccaccatggagggcgtccacaccgtgcacgtcacgtttgccggcgtgcccatccctcgcagcccctacactgtcactgttggccaagcctgtaacccgagtgcctgccgggcggttggccggggcctccagcccaagggtgtgcgggtgaaggagacagctgacttcaaggtgtacacaaagggcgctggcagtggggagctgaaggtcaccgtgaagggccccaagggagaggagcgcgtgaagcagaaggacctgggggatggcgtgtatggcttcgagtattaccccatggtccctggaacctatatcgtcaccatcacgtggggtggtcagaacatcgggcgcagtcccttcgaagtgaaggtgggcaccgagtgtggcaatcagaaggtacgggcctggggccctgggctggagggcggcgtcgttggcaagtcagcagactttgtggtggaggctatcggggacgacgtgggcacgctgggcttctcggtggaagggccatcgcaggctaagatcgaatgtgacgacaagggcgacggctcctgtgatgtgcgctactggccgcaggaggctggcgagtatgccgttcacgtgctgtgcaacagcgaagacatccgcctcagccccttcatggctgacatccgtgacgcgccccaggacttccacccagacagggtgaaggcacgtgggcctggattggagaagacaggtgtggccgtcaacaagccagcagagttcacagtggatgccaagcacggtggcaaggccccacttcgggtccaagtccaggacaatgaaggctgccctgtggaggcgttggtcaaggacaacggcaatggcacttacagctgctcctacgtgcccaggaagccggtgaagcacacagccatggtgtcctggggaggcgtcagcatccccaacagccccttcagggtgaatgtgggagctggcagccaccccaacaaggtcaaagtatacggccccggagtagccaagacagggctcaaggcccacgagcccacctacttcactgtggactgcgccgaggctggccagggggacgtcagcatcggcatcaagtgtgcccctggagtggtaggccccgccgaagctgacatcgacttcgacatcatccgcaatgacaatgacaccttcacggtcaagtacacgccccggggggctggcagctacaccattatggtcctctttgctgaccaggccacgcccaccagccccatccgagtcaaggtggagccctctcatgacgccagtaaggtgaaggccgagggccctggcctcagtcgcactggtgtcgagcttggcaagcccacccacttcacagtaaatgccaaagctgctggcaaaggcaagctggacgtccagttctcaggactcaccaagggggatgcagtgcgagatgtggacatcatcgaccaccatgacaacacctacacagtcaagtacacgcctgtccagcagggtccagtaggcgtcaatgtcacttatggaggggatcccatccctaagagccctttctcagtggcagtatctccaagcctggacctcagcaagatcaaggtgtctggcctgggagagaaggtggacgttggcaaagaccaggagttcacagtcaaatcaaagggtgctggtggtcaaggcaaagtggcatccaagattgtgggcccctcgggtgcagcggtgccctgcaaggtggagccaggcctgggggctgacaacagtgtggtgcgcttcctgccccgtgaggaagggccctatgaggtggaggtgacctatgacggcgtgcccgtgcctggcagcccctttcctctggaagctgtggcccccaccaagcctagcaaggtgaaggcgtttgggccggggctgcagggaggcagtgcgggctcccccgcccgcttcaccatcgacaccaagggcgccggcacaggtggcctgggcctgacggtggagggcccctgtgaggcgcagctcgagtgcttggacaatggggatggcacatgttccgtgtcctacgtgcccaccgagcccggggactacaacatcaacatcctcttcgctgacacccacatccctggctccccattcaaggcccacgtggttccctgctttgacgcatccaaagtcaagtgctcaggccccgggctggagcgggccaccgctggggaggtgggccaattccaagtggactgctcgagcgcgggcagcgcggagctgaccattgagatctgctcggaggcggggcttccggccgaggtgtacatccaggaccacggtgatggcacgcacaccattacctacattcccctctgccccggggcctacaccgtcaccatcaagtacggcggccagcccgtgcccaacttccccagcaagctgcaggtggaacctgcggtggacacttccggtgtccagtgctatgggcctggtattgagggccagggtgtcttccgtgaggccaccactgagttcagtgtggacgcccgggctctgacacagaccggagggccgcacgtcaaggcccgtgtggccaacccctcaggcaacctgacggagacctacgttcaggaccgtggcgatggcatgtacaaagtggagtacacgccttacgaggagggactgcactccgtggacgtgacctatgacggcagtcccgtgcccagcagccccttccaggtgcccgtgaccgagggctgcgacccctcccgggtgcgtgtccacgggccaggcatccaaagtggcaccaccaacaagcccaacaagttcactgtggagaccaggggagctggcacgggcggcctgggcctggctgtagagggcccctccgaggccaagatgtcctgcatggataacaaggacggcagctgctcggtcgagtacatcccttatgaggctggcacctacagcctcaacgtcacctatggtggccatcaagtgccaggcagtcctttcaaggtccctgtgcatgatgtgacagatgcgtccaaggtcaagtgctctgggcccggcctgagcccaggcatggttcgtgccaacctccctcagtccttccaggtggacacaagcaaggctggtgtggccccattgcaggtcaaagtgcaagggcccaaaggcctggtggagccagtggacgtggtagacaacgctgatggcacccagaccgtcaattatgtgcccagccgagaagggccctacagcatctcagtactgtatggagatgaagaggtaccccggagccccttcaaggtcaaggtgctgcctactcatgatgccagcaaggtgaaggccagtggccccgggctcaacaccactggcgtgcctgccagcctgcccgtggagttcaccatcgatgcaaaggacgccggggagggcctgctggctgtccagatcacggatcccgaaggcaagccgaagaagacacacatccaagacaaccatgacggcacgtatacagtggcctacgtgccagacgtgacaggtcgctacaccatcctcatcaagtacggtggtgacgagatccccttctccccgtaccgcgtgcgtgccgtgcccaccggggacgccagcaagtgcactgtcacaggtgctggcatcggccccaccattcagattggggaggagacggtgatcactgtggacactaaggcggcaggcaaaggcaaagtgacgtgcaccgtgtgcacgcctgatggctcagaggtggatgtggacgtggtggagaatgaggacggcactttcgacatcttctacacggccccccagccgggcaaatacgtcatctgtgtgcgctttggtggcgagcacgtgcccaacagccccttccaagtgacggctctggctggggaccagccctcggtgcagccccctctacggtctcagcagctggccccacagtacacctacgcccagggcggccagcagacttgggccccggagaggcccctggtgggtgtcaatgggctggatgtgaccagcctgaggccctttgaccttgtcatccccttcaccatcaagaagggcgagatcacaggggaggttcggatgccctcaggcaaggtggcgcagcccaccatcactgacaacaaagacggcaccgtgaccgtgcggtatgcacccagcgaggctggcctgcacgagatggacatccgctatgacaacatgcacatcccaggaagccccttgcagttctatgtggattacgtcaactgtggccatgtcactgcctatgggcctggcctcacccatggagtagtgaacaagcctgccaccttcaccgtcaacaccaaggatgcaggagaggggggcctgtctctggccattgagggcccgtccaaagcagaaatcagctgcactgacaaccaggatgggacatgcagcgtgtcctacctgcctgtgctgccgggggactacagcattctagtcaagtacaatgaacagcacgtcccaggcagccccttcactgctcgggtcacaggtgacgactccatgcgtatgtcccacctaaaggtcggctctgctgccgacatccccatcaacatctcagagacggatctcagcctgctgacggccactgtggtcccgccctcgggccgggaggagccctgtttgctgaagcggctgcgtaatggccacgtggggatttcattcgtgcccaaggagacgggggagcacctggtgcatgtgaagaaaaatggccagcacgtggccagcagccccatcccggtggtgatcagccagtcggaaattggggatgccagtcgtgttcgggtctctggtcagggccttcacgaaggccacacctttgagcctgcagagtttatcattgatacccgcgatgcaggctatggtgggctcagcctgtccattgagggccccagcaaggtggacatcaacacagaggacctggaggacgggacgtgcagggtcacctactgccccacagagccaggcaactacatcatcaacatcaagtttgccgaccagcacgtgcctggcagccccttctctgtgaaggtgacaggcgagggccgggtgaaagagagcatcacccgcaggcgtcgggctccttcagtggccaacgttggtagtcattgtgacctcagcctgaaaatccctgaaattagcatccaggatatgacagcccaggtgaccagcccatcgggcaagacccatgaggccgagatcgtggaaggggagaaccacacctactgcatccgctttgttcccgctgagatgggcacacacacagtcagcgtgaagtacaagggccagcacgtgcctgggagccccttccagttcaccgtggggcccctaggggaagggggagcccacaaggtccgagctgggggccctggcctggagagagctgaagctggagtgccagccgaattcagtatctggacccgggaagctggtgctggaggcctggccattgctgtcgagggccccagcaaggctgagatctcttttgaggaccgcaaggacggctcctgtggtgtggcttatgtggtccaggagccaggtgactacgaagtctcagtcaagttcaacgaggaacacattcccgacagccccttcgtggtgcctgtggcttctccgtctggcgacgcccgccgcctcactgtttctagccttcaggagtcagggctaaaggtcaaccagccagcctcttttgcagtcagcctgaacggggccaagggggcgatcgatgccaaggtgcacagcccctcaggagccctggaggagtgctatgtcacagaaattgaccaagataagtatgctgtgcgcttcatccctcgggagaatggcgtttacctgattgacgtcaagttcaacggcacccacatccctggaagccccttcaagatccgagttggggagcctgggcatggaggggacccaggcttggtgtctgcttacggagcaggtctggaaggcggtgtcacagggaacccagctgagttcgtcgtgaacacgagcaatgcgggagctggtgccctgtcggtgaccattgacggcccctccaaggtgaagatggattgccaggagtgccctgagggctaccgcgtcacctatacccccatggcacgacattttgtttatttatttaaaacaaacatctgtgcgctatgtacaggcccggctcccagggaggtgggcgggcagggggccaagctgggtgggagagcgatggcagctgggggttggggggggtctggccccttgcctggccagcagggtcagcttctccattcctgccacctgccagctggcccaagctgatggcttcccgcaggacagccacctccctgcaggagagcagggccagaggagcctcttctcaaagcaaaataaatacgggactgacccagctccgcccacagcccgctctcggcatcagccttcatcgtaagagagaaaagctggttccgaggccgggcaggagaaaggccagcagtgcctggtccagccggcgtcgccttgggcggtgagcagtgccaggcaggggcgaggggccgggcagaccccgaggctttaaggcaaagcagggcaagggtgtacgcagcccgggccgggtcagcctttggcacaattaggggcggcaaccgcagtgaccacagggcatggccgagtacaggggctggaggaccagaagccccttggtcctgaacctccactccaggccctggcag

SEQ ID NO: 759 - DNA, 8054 bp, Homo sapiens; identical to SEQ ID NO: 758
  misc_feature (451)..(451): second gene starts at position 451

SEQ ID NO: 760 - DNA, 3935 bp, Homo sapiens
  misc_feature (203)..(203): second gene starts at position 203
ataagagaccacaagcgacccgcagggccagacgttcttcgccgagagtcgtcggggtttcctgcttcaacagtgcttggacggaacccggcgctcgttccccaccccggccggccgcccatagccagccctccgtcacctcttcaccgcaccctcggactgccccaaggcccccgccgccgctccagcgccgcgcagccacggcggcggcggcggcggcgggcggtgtgagcgaggaggagctggtgcggcgccagagcaaggtggaggcgctgtacgagctgctgcgcgaccaggtgctgggcgtgctgcggcggccgctggaggcgccgcccgagcggctgcgccaggcgctggccgtggtggcggagcaggagcgcgaggaccgccaggcggcggcggcggggccggggacctcggggctggcggccacgcgcccgcggcgctggctgcagctgtggcggcgcggcgtggcggaggcggccgaggagcgcatgggccagcggccggccgcgggcgccgaggtccccgagagcgtctttctgcacttgggccgcaccatgaaggaggacctggaggccgtggtggagcggctgaagccgctgttccccgccgagttcggcgtcgtggcggcctacgccgagagctaccaccagcacttcgcggcccacctggccgccgtggcgcagttcgagctgtgcgagcgcgacacctacatgctgctgctctgggtgcagaacctctaccccaatgacatcatcaacagccccaagctggtgggtgagctgcagggtatggggctcgggagcctcctgccccccaggcagatccgactgctggaggccacattcctgtccagtgaggcggccaatgtgagggagttgatggaccgagctctggagctagaggcacggcgctgggctgaggatgtgcctccccagaggctggacggccactgccacagcgagctggccatcgacatcatccagatcacctcccaggcccaggccaaggccgagagcatcacgctggacttgggctcacagataaagcgggtgctgctggtggagctgcctgcgttcctgaggagctaccagcgcgcctttaatgaatttctggagagaggcaagcagctgacgaattacagggccaatgttattgccaacatcaacaactgcctgtccttccggatgtccatggagcagaattggcaggtaccccaggacaccctgagcctcctgctgggccccctgggtgagctcaagagccacggctttgacaccctgctccagaacctgcatgaggacctgaagccactgttcaagaggttcacgcacacccgctgggcggcccctgtggagaccctggaaaacatcatcgccactgtagacacgaggctgcctgagttctcagagctgcagggctgtttccgggaggagctcatggaggccttgcacctgcacctggtgaaggagtacatcatccaactcagcaaggggcgcctggtcctcaagacggccgagcagcagcagcagctggctgggtacatcctggccaatgctgacaccatccagcacttctgcacccagcacggctccccggcgacctggctgcagcctgctctccctacgctggccgagatcattcgcctgcaggaccccagtgccatcaagattgaggtggccacttatgccacctgctaccctgacttcagcaaaggccacctgagcgctatcctggccatcaaggggaacctatccaacagtgaggtcaagcgcatccggagcatcttggacgtcagcatgggggcgcaggagccctcccggcccctattttcccttataaaggttggttagcttttcctgtggcctgacctgcctgtgagtgcccagcaagccttgggcacaccccgctgggagctgttaagagcagcgctggttctcggttcctcccgggtctcctgtgctctgatgctacttctgcctagccctggcggaggtgcaggccctgtcagctggaactggacagaccttggtttgtttacatgtccgatgggggcaggagctcccatcctgggcagccaaccaggcaacaccaaggactctttgtaaacgatagctgatcgtgtgcacgcaaggaaagaaccaggagggagagtgcagccaggctcagggatccccggacacctctgtccagagcccctccacagtcggcctcatgactgtcctcctcgtgggtggggccgagggccctcttcagctctctggagacaggggccgagcctcacccatctgccctctgcagcccagggccgccgtgagcgggattcagcaatggtggaatggaagacagaactggaagagaaagaaggaaaagatgagctctcgtctggcaggggcttttagggtcctgtggcgagctgtgagcaccgccagcattagacgtcacatccaggtggccccacggcccctacaggctggccctgcaatggggccctgagccctccctcttcatcccccaaggcctcaactagagggtggtcccccgagggcttggtgtctactaccgaagggcccaagacctcctgggtcctctcaggctcccccttccccaaggcagggacaggccctgggggtgccaccgtgggccctgccacccagaagtctggctgaggtctgggcaggggcagggcaagcttgacctctcactgttgaccctttggcctctgtatttgtttcctattgccgtgacaggtttccacaaacttcgtggatcaaaacgaggtcttccagttctgcgggtcagaaggctgacccggggctcaaatctgggtgtcggcagtcctgcactccttctggaggctctaggggagaattcatttctggccttttcatttttagaggctgaccgtaattcttgacttcaggctcctccatcttcagagccagctgtgggtagttgaatctttttcccgtcacctcattgaggcctcccctctcctgcctccctccaccacttttttttttttttttttgagacagggtcttgctgtgttgcccaggctggagtgcagtggcctggtcatggcatcaaggctcactgcagcctggacctcctggttcaagtgatcctcttgtctcagtcccctgagacaatcccccacgcccagctacatattttttgtggatacagggtctcattctgttgcctaggcttgtctggaactcctgggctcaagggatcttgtagccttagcctcctaaagtgctgggattataggcatgagtcactgtacccggcctgctctaccgcttttaaggacgcttatgatcacattgcgcctacccagagaacccaggtcgtctttctattttcaggtcagctgattagccaccttagttccatctgcaactttagttcccactggctgtgtaacctaacatagtcacaggctctggggactgtcacgtggacatctttgggaggccgttattctgcccaccgcaccctccgttcatcccctgccctgccgggcacctcgctctaccccaggaaaatgtgagctcgttttcctgctcggcatgtgctccccctaaggctctgctcctccctgggcctgaaagttccttctcagcctgagagggggcccttcggactcaggcatgactcagcccggctgatgcctctgcagtgctgagtcaggatttggggccggctctcttgggtccgtccccttttcccaggtactgccttacaaagctgtggccaggaagtggccggtataaaggatgcccaaggtctttgtacgtgtgtaggagttagcgtgtttgatattgttaatataataataattattttttagagtactgcttttgtatgtatgttgaacaggatccaggtttttatagcttgatataaaacagaattcaaaagtg

SEQ ID NO: 761 - DNA, 2372 bp, Homo sapiens
  misc_feature (529)..(529): second gene starts at position 529
atgatgagctttgtgcaaaaggggagctggctacttctcgctctgcttcatcccactattattttggcacaacaggaagctgttgaaggaggatgttcccatcttggtcagtcctatgcggatagagatgtctggaagccagaaccatgccaaatatgtgtctgtgactcaggatccgttctctgcgatgacataatatgtgacgatcaagaattagactgccccaacccagaaattccatttggagaatgttgtgcagtttgcccacagcctccaactgctcctactcgccctcctaatggtcaaggacctcaaggccccaagggagatccaggccctcctggtattcctgggagaaatggtgaccctggtattccaggacaaccagggtcccctggttctcctggcccccctggaatctgtgaatcatgccctactggtcctcagaactattctccccagtatgattcatatgatgtcaagtctggagtagcagtaggaggactcgcaggctatcctggaccagctggcctcccaggccccccaggcccagcgggtcccagaggagagcgaggaccccaaggtaactccggtgagaagggcgaccagggatttcaaggccagccaggctttccgggcccaccgggtccccctggattcccaggcaaagttggatcacctggcccacctggccctcaagcagagaagggcagcgaagggattcgaggcccatcaggcctgcctggctcccctgggccaccgggacctcctgggattcagggccccgccggtctggatggtttggatgggaaggacggcaagcctggcttgaggggggaccctggtcctgctggcccccctggactcatgggaccaccgggctttaaggggaaaacaggacatcctggcctcccaggacctaagggtgactgtggcaaaccaggtccccctggcagcactggccggcctggcgcagagggtgaacctggtgccatgggaccccagggaagacccggtcccccgggacacgttgggccaccagggcctccaggccagccaggaccagctgggatctctgcagtgggtctgaaaggagaccgaggagccaccggagaaaggggccttgcaggcctcccaggccagcccggcccccctggacaccctggccccccaggcgaacctggtacggatggtgcagctggcaaagagggaccccctggaaagcagggattctatggacctcctggtcccaagggtgatccaggagctgcaggacagaagggccaggcaggagagaaggggagagccggcatgcctggtggacctggcaagagtggttccatggggcctgttgggccaccgggccctgcaggagagagaggccaccctggagctccggggccttcggggagccctggcttgcctggtgtgcctggctccatgggagacatggtgaattatgatgaaatcaagaggttcatcagacaagagatcattaaaatgtttgatgagagaatggcttactacacctccaggatgcagttccccatggagatggcggcagctccgggacgaccagggcctccagggaaggatggtgctccgggcaggccaggtgctccagggtcacctgggctccctggtcagattggcagagaaggacggcagggcttgccaggagtaagaggattgcctggtaccaaaggtgaaaaaggggacattggtattggcattgcaggagaaaatggtcttcccggccccccaggtcctcaaggtcctccaggctatggcaagatgggtgcaacaggaccaatgggccagcaaggcatccctggcatccctgggcccccgggtcccatgggccagccaggcaaggctggccactgtaatccctctgactgctttggggccatgccgatggagcagcagtacccacccatgaaaaccatgaaggggccttttggctgaaattccccacctgcctttggatgaaagactccgttgggaataaatggccaaagcttataggactctgtgacaggttgtgaatgttttttttgttgttgttgttgtttttaattgctgttaatattttttaaataataaagaaacaaaactatctgccctttcccttccagtgggttcctctggtgctgcagccagagctccctgttgccctccttttcccgtttagtcccaggaacaaaaaagggcattttgggtacaggggcatatacctgtaatcctagctattcaaggggctgaggtgggaggatcgcctgagcccaggagtttgagaccagtctaagcaacataatgagactcagtctccgaaaaataaaaattaaaaaataaagggtatttccctcctt

SEQ ID NO: 762 - DNA, 4328 bp, Homo sapiens
  misc_feature (1506)..(1506): second gene starts at position 1506
atggccagcacatccaccaccatcaggagccacagcagcagccgccggggtttcagtgccaactcagccaggctccctggggtcagccgctctggcttcagcagcgtctccgtgtcccgctccaggggcagtggtggcctgggtggtgcatgtggaggagctggctttggcagccgcagtctgtatggcctggggggctccaagaggatctccattggagggggcagctgtgccatcagtggcggctatggcagcagagccggaggcagctatggctttggtggcgccgggagtggatttggtttcggtggtggagccggcattggctttggtctgggtggtggagccggccttgctggtggctttgggggccctggcttccctgtgtgcccccctggaggcatccaagaggtcaccgtcaaccagagtctcctgactcccctcaacctgcaaatcgatcccaccatccagcgggtgcgggctgaggagcgtgaacagatcaagaccctcaacaacaagtttgcctccttcatcgacaaggtgcggttcctggagcagcagaacaaggttctggaaacaaagtggaccctgctgcaggagcagggcaccaagactgtgaggcagaacctggagccgttgttcgagcagtacatcaacaacctcaggaggcagctggacagcattgtcggggaacggggccgcctggactcagagctcagaggcatgcaggacctggtggaggacttcaagaacaaatatgaggatgaaatcaacaagcgcacagcagcagagaatgaatttgtgactctgaagaaggatgtggatgctgcctacatgaacaaggttgaactgcaagccaaggcagacactctcacagacgagatcaacttcctgagagccttgtatgatgcagagctgtcccagatgcagacccacatctcagacacatctgtggtgctgtccatggacaacaaccgcaacctggacctggacagcatcatcgctgaggtcaaggcccaatatgaggagattgctcagagaagccgggctgaggctgagtcctggtaccagaccaagtacgaggagctgcaggtcacagcaggcagacatggggacgacctgcgcaacaccaagcaggagattgctgagatcaaccgcatgatccagaggctgagatctgagatcgaccacgtcaagaagcagtgcgccaacctgcaggccgccattgctgatgctgagcagcgtggggagatggccctcaaggatgccaagaacaagctggaagggctggaggatgccctgcagaaggccaagcaggacctggcccggctgctgaaggagtaccaggagctgatgaatgtcaagctggccctggacgtggagatcgccacctaccgcaagctgctggagggtgaggagtgcaggctgaatggcgaaggcgttggacaagtcaacatctctgtggtgcagtccaccgtctccagtggctatggcggtgccagtgggcggggcccgtggggccggcgctggagccaccgacgctgccgctgcaccgcgcgctcacgctgcgcttcctgctccagcacctgggccgcgtggccagccgcgccccggccctgggtcccgcggtccgggccctgggcgccacctttgggccgctgctgctgcgcgcgccgccgccgccgtcctcgccgccgccagggggcgctcccgacgggagtgagcccagccctgacttcccggcgctgctggtggagaagctgcttcaggaacacttggaagagcaggaggttgcgcccccagcgctgccgcctaaaccccccaaggcaaagccggcctccacagtcctggccaatggagggagcccaccctccctgcaggatgctgagtggtactggggggacatttcaagggaggaggtgaacgagaaactccgggacactcccgatggcaccttcctagtccgagatgcttctagcaagatccagggcgagtacacgctgaccctcaggaaaggcgggaacaataagctgatcaaggtcttccaccgagatgggcactatggcttctcagagccactcaccttctgctccgttgtggacctcatcaatcactaccgccacgagtctctggcccagtacaatgccaagctggacacacggctcctctaccctgtgtccaaataccagcaggaccagattgtcaaggaggacagcgtggaggcagtgggcgcccagcttaaggtctatcaccagcagtaccaggacaagagccgcgagtatgaccagctttatgaagagtacacacggacctcccaggagctgcagatgaagcgtactgcaattgaggccttcaatgagactatcaagatctttgaagagcagggccagactcaagagaaatgcagcaaggaatacctggagcgcttccggcgtgagggcaacgagaaagagatgcaaaggatcctgctgaactccgagcggctcaagtcccgcattgccgagatccatgagagccgcacgaagctggagcagcagctgcgggcccaggcctcggacaacagagagatcgacaagcgcatgaacagcctcaagccggacctcatgcagctgcgcaagatccgagaccagtacctcgtgtggctcacccagaaaggcgcccggcagaagaaaatcaacgagtggctggggattaaaaatgagactgaggaccagtacgcactcatggaggacgaggacgatctcccgcaccacgaggaacgcacttggtacgtgggcaagatcaaccgcacgcaggcagaggagatgctgagtggcaagcgggatggcaccttcctcatccgcgagagcagccagcggggctgctacgcctgctccgtggtagtggacggcgacaccaagcactgcgtcatctaccgcacggccaccggcttcggcttcgcggagccctacaacctgtacgggtcgctgaaggagctggtgctgcactaccagcacgcctcgctggtgcagcacaacgacgcgctcaccgtcaccctggcgcacccagtgcgcgccccgggccccggcccgccgcctgccgcccgctgagcaccgaggacccgccccaagcagagccgcccctgggcccgtctgcgccggaggctgcggcggcgggagccacggaccagaccagccacatccaggggtcctcatttctccggctctggctcttgtttggggttctctcaccctctttctctttccttccctcccccattctccagatctccctctgtctccttttctctgtctttcttggcccctgtctctctccatgttgggggtcctaactcccccaccccatatctacgtgtcctccgggcattgccctctccatggctctggtcaccctgaccctctgccctgcccaccgcaggtcccccggggtcccggaagccccttctggctgcacctgccatgtttacagagggcccctgggctgcgcggccccagcctgggcaccctgatttttaagccatagacctggggtcagggcaggaaggaacttcactctgctgcttccgagaacctcggccgtgacattcggggccgggcgggacccgccccacagactccaacttcccctccaaaccccgaagtgaaacccgccaccgggttacccccacaagggggccgctgcgagaagttcacccacccccgaaaaaataattaaactcgcaggccaggcacggtggctcatgcctgtaatcccagcactttgggaggccaagacgggcggatcttttgaggtcgggagttggaggccagcctggccaaaatggcaaaaccccgcatctactaaaatacaaaaattagccgggcgtggtggcggccgcctgtaatcccagctacttgggaggctgaggcgtgagaatctcttgaacccaggagatggaggttgcagtgagcagagatcgtgccactgcactccagcctgggtaacagagggagactcctccgtctcaaaaaaataaataaataaacttgtgagctggccccaacccctcctaggaatcacagctccccgtactggtgccgccgcagtggccaagttgcgacactgcccacggcccctccctctgatgcagattcagggcttctcttcgatcatgttgggttttgattctgtttttccttgactgcaaaaccctctttcctctcctcttttgggacaagagccctggttttctacgctgcccttggccaccacactgcctgccccacgagctgggaggcaggttttgtacggtacgttgttattgatatgatataaaacatcaaacgtcg

SEQ ID NO: 763 - DNA, 6763 bp, Homo sapiens
  misc_feature (995)..(995): second gene starts at position 995
atgctcagctttgtggatacgcggactttgttgctgcttgcagtaaccttatgcctagcaacatgccaatctttacaagaggaaactgtaagaaagggcccagccggagatagaggaccacgtggagaaaggggtccaccaggccccccaggcagagatggtgaagatggtcccacaggccctcctggtccacctggtcctcctggcccccctggtctcggtgggaactttgctgctcagtatgatggaaaaggagttggacttggccctggaccaatgggcttaatgggacctagaggcccacctggtgcagctggagccccaggccctcaaggtttccaaggacctgctggtgagcctggtgaacctggtcaaactggtcctgcaggtgctcgtggtccagctggccctcctggcaaggctggtgaagatggtcaccctggaaaacccggacgacctggtgagagaggagttgttggaccacagggtgctcgtggtttccctggaactcctggacttcctggcttcaaaggcattaggggacacaatggtctggatggattgaagggacagcccggtgctcctggtgtgaagggtgaacctggtgcccctggtgaaaatggaactccaggtcaaacaggagcccgtgggcttcctggtgagagaggacgtgttggtgcccctggcccagctggtgcccgtggcagtgatggaagtgtgggtcccgtgggtcctgctggtcccattgggtctgctggccctccaggcttcccaggtgcccctggccccaagggtgaaattggagctgttggtaacgctggtcctgctggtcccgccggtccccgtggtgaagtgggtcttccaggcctctccggccccgttggacctcctggtaatcctggagcaaacggccttactggtgccaagggtgctgctggccttcccggcgttgctggggctcccggcctccctggaccccgcggtattcctggccctgttggtgctgccggtgctactggtgccagaggacttgttggtgagcctggtccagctggctccaaaggagagagcggtaacaagggtgagcccggctctgctgggccccaaggtcctcctggtcccagtggtgaagaaggaaagagaggccctaatggggaagctggatctgccggccctccaggacctcctgggctgagaggtagtcctggttctcgtggtcttcctggagctgatggcagagctggcgtcatgggccctcctggtagtcgtggtgcaagtggccctgctggagtccgaggacctaatggagatgctggtcgccctggggagcctggtctcatgggacccagaggtcttcctggttcccctggaaatatcggccccgctggaaaagaaggtcctgtcggcctccctggcatcgacggcaggcctggcccaattggcccagctggagcaagaggagagcctggcaacattggattccctggacccaaaggccccactggtgatcctggcaaaaacggtgataaaggtcatgctggtcttgctggtgctcggggtgctccaggtcctgatggaaacaatggtgctcagggacctcctggaccacagggtgttcaaggtggaaaaggtgaacagggtccccctggtcctccaggcttccagggtctgcctggcccctcaggtcccgctggtgaagttggcaaaccaggagaaaggggtctccatggtgagtttggtctccctggtcctgctggtccaagaggggaacgcggtcccccaggtgagagtggtgctgccggtcctactggtcctattggaagccgaggtccttctggacccccagggcctgatggaaacaagggtgaacctggtgtggttggtgctgtgggcactgctggtccatctggtcctagtggactcccaggagagaggggtgctgctggcatacctggaggcaagggagaaaagggtgaacctggtctcagaggtgaaattggtaaccctggcagagatggtgctcgtggtgctcctggtgctgtaggtgcccctggtcctgctggagccacaggtgaccggggcgaagctggggctgctggtcctgctggtcctgctggtcctcggggaagccctggtgaacgtggtgaggtcggtcctgctggccccaatggatttgctggtcctgctggtgctgctggtcaacctggtgctaaaggagaaagaggagccaaagggcctaagggtgaaaacggtgttgttggtcccacaggccccgttggagctgctggcccagctggtccaaatggtccccccggtcctgctggaagtcgtggtgatggaggcccccctggtatgactggtttccctggtgctgctggacggactggtcccccaggaccctctggtatttctggccctcctggtccccctggtcctgctgggaaagaagggcttcgtggtcctcgtggtgaccaaggtccagttggccgaactggagaagtaggtgcagttggtccccctggcttcgctggtgagaagggtccctctggagaggctggtactgctggacctcctggcactccaggtcctcagggtcttcttggtgctcctggtattctgggtctccctggctcgagaggtgaacgtggtctaccaggtgttgctggtgctgtgggtgaacctggtcctcttggcattgccggccctcctggggcccgtggtcctcctggtgctgtgggtagtcctggagtcaacggtgctcctggtgaagctggtcgtgatggcaaccctgggaacgatggtcccccaggtcgcgatggtcaacccggacacaagggagagcgcggttaccctggcaatattggtcccgttggtgctgcaggtgcacctggtcctcatggccccgtgggtcctgctggcaaacatggaaaccgtggtgaaactggtccttctggtcctgttggtcctgctggtgctgttggcccaagaggtcctagtggcccacaaggcattcgtggcgataagggagagcccggtgaaaaggggcccagaggtcttcctggcttaaagggacacaatggattgcaaggtctgcctggtatcgctggtcaccatggtgatcaaggtgctcctggctccgtgggtcctgctggtcctaggggccctgctggtccttctggccctgctggaaaagatggtcgcactggacatcctggtacagttggacctgctggcattcgaggccctcagggtcaccaaggccctgctggcccccctggtccccctggccctcctggacctccaggtgtaagcggtggtggttatgactttggttacgatggagacttctacagggctgaccagcctcgctcagcaccttctctcagacccaaggactatgaagttgatgctactctgaagtctctcaacaaccagattgagacccttcttactcctgaaggctctagaaagaacccagctcgcacatgccgtgacttgagactcagccacccagagtggagcagtggttactactggattgaccctaaccaaggatgcactatggatgctatcaaagtatactgtgatttctctactggcgaaacctgtatccgggcccaacctgaaaacatcccagccaagaactggtataggagctccaaggacaagaaacacgtctggctaggagaaactatcaatgctggcagccagtttgaatataatgtagaaggagtgacttccaaggaaatggctacccaacttgccttcatgcgcctgctggccaactatgcctctcagaacatcacctaccactgcaagaacagcattgcatacatggatgaggagactggcaacctgaaaaaggctgtcattctacagggctctaatgatgttgaacttgttgctgagggcaacagcaggttcacttacactgttcttgtagatggctgctctaaaaagacaaatgaatggggaaagacaatcattgaatacatgggttttttgttttttttgtttttggcagggtcggtgggggggttggttggttggttggttttgtcggaacctaggcaaatgaccatattagtgaatctgttaatagttgtagcttgggatggttattgtagttgttttggtaaaatcttcatttcctggttttttttaccaccttatttaaatctcgattatctgctctctcttttatatacatacacacacccaaacataacatttataatagtgtggtagtggaatgtatccttttttaggtttccctgctttccagttaatttttaaaatggtagcgctttgtatgcatttagaatacatgactagtagtttatatttcactggtagtttaaatctggttggggcagtctgcagatgtttgaagtagtttagtgttctagaaagagctattactgtggatagtgcctaggggagtgctccacgccctctgggcatacggtagatattatctgatgaattggaaaggagcaaaccagaaatggctttattttctcccttggactaatttttaagtctcgattggaattcagtgagtaggttcataatgtgcatgacagaaataagctttatagtggtttaccttcatttagctttggaagttttctttgccttagttttggaagtaaattctagtttgtagttctcatttgtaatgaacacattaacgactagattaaaatattgccttcaagattgttcttacttacaagacttgctcctacttctatgctgaaaattgaccctggatagaatactataaggttttgagttagctggaaaagtgatcagattaataaatgtatattggtagttgaatttagcaaagaaatagagataatcatgattatacctttatttttacaggaagagatgatgtaactagagtatgtgtctacaggagtaataatggtttccaaagagtattttttaaaggaacaaaacgagcatgaattaactcttcaatataagctatgaagtaatagttggttgtgaattaaagtggcaccagctagcacctctgtgttttaagggtctttcaatgtttctagaataagcccttattttcaagggttcataacaggcataaaatctcttctcctggcaaaagctgctatgaaaagcctcagcttgggaagatagatttttttccccccaattacaaaatctaagtattttggcccttcaatttggaggagggcaaaagttggaagtaagaagttttattttaagtactttcagtgctcaaaaaaatgcaatcactgtgttgtatataatagttcataggttgatcactcataataattgactctaaggcttttattaagaaaacagcagaaagattaaatcttgaattaagtctggggggaaatggccactgcagatggagttttagagtagtaatgaaattctacctagaatgcaaaattgggtatatgaattacatagcatgttgttgggattttttttaatgtgcagaagatcaaagctacttggaaggagtgcctataatttgccagtagccacagattaagattatatcttatatatcagcagattagctttagcttagggggagggtgggaaagtttggggggggggttgtgaagatttagggggaccttgatagagaactttataaacttctttctctttaataaagacttgtcttacaccgtgctgccattaaaggcagctgttctagagtttcagtcacctaagtacacccacaaaacaatatgaatatggagatcttcctttacccctcaactttaatttgcccagttatacctcagtgttgtagcagtactgtgatacctggcacagtgctttgatcttacgatgccctctgtactgacctgaaggagacctaagagtcctttccctttttgagtttgaatcatagccttgatgtggtctcttgttttatgtccttgttcctaatgtaaaagtgcttaactgcttcttggttgtattgggtagcattgggataagattttaactgggtattcttgaattgcttttacaataaaccaattttataatctttaaatttatcaactttttacatttgtgttattttcagtcagggcttcttagatctacttatggttgatggagcacattgatttggagtttcagatcttccaaagcactatttgttgtaataacttttctaaatgtagtgcctttaaaggaaaaatgaacacagggaagtgactttgctacaaataatgttgctgtgttaagtattcatattaaatacatgccttctatatggaacatggcagaaagactgaaaaataacagtaattaattgtgtaattcagaattcataccaatcagtgttgaaactcaaacattgcaaaagtgggtggcaatattcagtgcttaacacttttctagcgttggtacatctgagaaatgagtgctcaggtggattttatcctcgcaagcatgttgttataagaattgtgggtgtgcctatcataacaattgttttctgtatcttgaaaaagtattctccacattttaaatgttttatattagagaattctttaatgcacacttgtcaaatatatatatatagtaccaatgttacctttttattttttgttttagatgtaagagcatgctcatatgttaggtacttacataaattgttacattattttttcttatgtaatacctttttgtttgtttatgtggttcaaatatattctttccttaaactctt

SEQ ID NO: 764 - DNA, 6763 bp, Homo sapiens; identical to SEQ ID NO: 763
  misc_feature (995)..(995): second gene starts at position 995

SEQ ID NO: 765 - DNA, 6763 bp, Homo sapiens; identical to SEQ ID NO: 763
  misc_feature (995)..(995): second gene starts at position 995

SEQ ID NO: 766 - DNA, 6763 bp, Homo sapiens; identical to SEQ ID NO: 763
  misc_feature (995)..(995): second gene starts at position 995

SEQ ID NO: 767 - DNA, 4454 bp, Homo sapiens
  misc_feature (185)..(185): second gene starts at position 185
atggctgcgaagggcgcgcacggctcctacctgaaggtggagagcgagctggagcgctgccgcgccgagggccactgggaccgcatgccggagctggtccggcagctgcagacgctgagcatgcccggcggcggaggtaacaggcgaggcagcccgagcgcagcgttcacctttccggacaccgattttataatcaatggataaagtgggaaaaatgtggaataacttcaaatacaggtgtcagaatctcttcggtcatgagggaggaagccgtagtgaaaatgtggacatgaactccaacagatgtttgtctgtcaaagagaaaaacatcagcataggagactcaactcctcagcaacaaagcagtcccttaagagaaaatattgccttacaactgggattaagcccttcgaagaattcttcaaggagaaatcaaaattgtgccacagaaatccctcaaattgttgaaataagcatcgaaaaggataatgattcttgtgttaccccaggaacaagacttgcacgaagagattcctactctcgacatgctccatggggtgggaagaaaaaacattcctgttctacaaagacccagagttcattggatgctgataaaaagtttggtagaactcgaagtggacttcaaaggagagagaggcgctacggcgtaagttctgtacacgacatggacagtgtttccagcagaactgtaggaagtcgctctctaagacagaggttgcaggatactgtgggcttgtgttttcccatgagaacttacagcaagcagtcaaagcctctcttttccaataaaagaaaaatccatctctctgaattaatgcttgagaaatgcccttttcctgctggctcagatttagcccaaaaatggcatttgattaaacagcatacagctcctgtgagcccacattcaacattttttgatacatttgatccatctttggtttctacagaagatgaagaagataggcttagagagagaaggcggcttagtattgaagaaggggttgatccccctcccaatgcacaaatacatacatttgaagctactgcacaggttaatccattatataaactgggaccaaaattagctcctggaatgactgaaataagtggggacagttctgcaattccacaagctaattgtgactcggaagaggatacaaccaccctgtgtttgcagtcacggaggcagaagcagcgtcagatatctggagacagccatacccatgttagcagacagggagcttggaaagtccacacacagattgattacatacactgcctcgtgcctgatttgcttcaaattacagggaatccctgttactggggagtgatggaccgttatgaagcagaagcccttctcgaagggaaacctgaaggcacgtttttgctcagggactctgcgcaagaggactacctcttctctgtgagcttccgccgctacaacagatccctgcatgcccgaattgagcagtggaatcacaactttagtttcgacgcccatgacccgtgtgtatttcactcctccactgtaacgggacttttagaacattataaagatcccagttcgtgcatgttttttgaaccattgcttactatatcactaaataggactttcccttttagcctgcagtatatctgtcgcgcggtaatctgcaggtgcactacgtatgatggaattgatgggctccctctaccctcaatgttacaggattttttaaaagagtatcattataaacaaaaagttagagttcgctggttggaacgagaaccagtcaaggcaaagtaaactctccggtccccaaaggttgttaactaggtccgctttcatgtgcatcagacagtacacctatagcaagcacacgtagcagtgttaggctttttcatacagtatgtaagcttagtgttagtatctgtcagatgctacctgctgttacttattcagataaacatggtgcctattggaacaatagcggatagagctacaggtgttcagtaagactacaaaaacattttgcctatttcgctaacagtttggtttttaatggctgtggtatttgagtgaggcaactctggggcatttgttatgaagaattctatttcttactgaagaacaaattattaatattggatgagtatttcaacagtgtgactaatgtttgaaattattttttctaagagtttttctataaccttccaaaagtcgtgatgtttgtagttactataaatcaagctttggaagtccaaaaagaataaaagactgccttccttttagaaaaaaatgcaattttctggccacaagggcatagtgcagttcacttacgtgttgatgtagtttataatcagacgccttttctcttctgcaaaaggtactgttaagtaaaccagattttctaaataggcattcttaaaatttcagacttacaaagctagtagtagaattttattgaaaggcctaggtattaattttttaaatgagtgctttaacttaaaacaggcgtttggaatagctgctgcaatgtagtcttgtgtgtgatttttttttaagttgatgtgcagtctaattgttgtttcataaaagttggatctgttcctatgcccaggatgattttgtgaaccgtgaagtacgtgagactagaagacgcccaaacaagtcagataatagtaactacaatggttgctgatgttgagattattgttgaactataattaataatttggatggcagaatttatctcttttttgtaaactctcataactgaattgcttaagtataatttatagaatttcagtgcagttcattcttaatggaaaatctgaaacctaaattgcagatttaaaaggtactgtacaaccattatatctgtaaataacttagcacctttttgtcacttagaataatatgtactactacttgagtgagcgcttttggaagttatatcaagttctagtgtttgcttcttagtaactgaactgaatttacagttctgtcctagacattttgcactaaagtagccgaatccactctcatgtcttttcgttaatgtgctctgtaccactggtgagtgctccatagtttccttacctgctgctacagaatgttattttacatccctatggctattgccaaggctacaaaaaaggaaagctatatttgtatgcaacactaaccttttgactgctaatgtatgtttctgcttgctgtgccttgttatggctgctttttttgtgctaataaagtatgtttggtgttctccttgtatatctgctgttttatacatttgcaacaatttctcttgtaaatggaatggtttggggtttttaaataagcattaactaacaacctttctatagttaatgcagagttaatgaacagtctaatattgacttatcagaataagctaactctaaatttaatgctctacatcttatcagtcataattatatatactgtggaacagtatctgtagttactgcaaattactgtacagtttaggttataacagaaaactgacagagaagtaataaacctattgatttctctgcttataaatgaaagattgaaactatccaatgacatattatagtaaatgagtatctgtaacctcccactgcatcagaagcaggttaaatgaagtcttgtgaatttgtaatagatcagtaccatttattggtttggggaccatcttaattaaaaataaatgcccaaaatgtagaactttaaccaaagacttgtcccttttaaagcaaaatggggattgaagggacttataatttctgttgtttctaattaaagtccctgaagatcatataccaaagtgtttgagaacttcatccaaacctactttaaagcattatgtgcaattaagttgttatgacataattatattgcctaattgttgggtcttttttcttgagcttataatgtacctggaaaataaacctcttgagaaaaagaaaagttcatactgattattggaaaaggactatatatgtgagcaagattgtgttttagagaggaaacttgaaactccaagaaagcacttgatgtttttatatgcttgtagcaaattgatgttctaactgtagttttatagaaagtattaatgcttttatgtatttcaaaactttcatatgttaaatggaaattgttttaaatgtgtttgagtttatgtaagcatgtatacactgtgctaaaagtcacatgtttcagtttgtgtataatattaatatgcaatttttggtttaaatttttgtcttaaaatattagtggcttacattttaaaaaagaaaaatcaccagcatgaacttgcacctaagtctatattcactgtgtccttttctgaatcccattgtagcctgtcaactaaatttgagtgttaacggtctttttaaagtgcatttaaatacaaaccaggaatttctttagaagttga

SEQ ID NO: 768 - DNA, 4454 bp, Homo sapiens; identical to SEQ ID NO: 767
  misc_feature (185)..(185): second gene starts at position 185

SEQ ID NO: 769 - DNA, 2186 bp, Homo sapiens
  misc_feature (376)..(376): second gene starts at position 376
atggacatgctggacccgggtctggatcccgctgcctcggccaccgctgctgccgccgccagccacgacaagggacccgaggcggaggagggcgtcgagctgcaggaaggcggggacggcccaggagcggaggagcagacagcggtggccatcaccagcgtccagcaggcggcgttcggcgaccacaacatccagtaccagttccgcacagagacaaatggaggacaggtgacataccgcgtagtccaggtgactgatggtcagctggacggccagggcgacacagctggcgccgtcagcgtcgtgtccaccgctgccttcgcgggggggcagcaggctgtgacccaggtgggtgtggacggggcagcccagcgcggcagcgcgggggcccggggcggcctgggtgccggagcctcggagctgaacgcctcggggtccctgtccaacgtgctctcgtccgtgtacggggcgccctacgccgcggccgctgcggccgccgccgcccaaggctacggcgccttcctgccctacgccgcggagctgcccatcttcccgcagctgggcgcgcagtatgagctgaaggacagccccggggtgcagcatccggccgcggctgccgcgtttccgcacccgcaccccgccttctacccgtatggccagtaccagttcggggacccgtcccgtcccaagaacgccaccagggagagcaccagcacgctgaaggcctggctcaacgagcaccgcaagaacccctaccccaccaagggcgagaagatcatgctggccatcatcaccaagatgaccctcacccaggtgtccacctggttcgccaacgcgcgccggcgcctcaagaaggagaataagatgacttgggcgcctcgcagccgcactgacgaggagggaaacgcttatgggagcgagcgcgaggaggaagacgaagaggaggacgaggaggacggcaaacgcgagctagagctggaggaggaggagctcgggggggaggaggaggacacggggggcgagggcctggctgacgacgacgaggacgaggagatcgatttggagaacttagacggcgcggccaccgagcctgagctgtccctggctggggcggcgcgcagggatggcgacctaggcctgggacccatttcggactccaaaaatagcgactcggaagatagctctgagggcttagaggaccggccactaccggtcctgagtctggctccagcgccaccaccagtggccgtggcctcgccgtctctgccgtcgccccccgtgagcctggacccctgcgctcccgcaccagcccccgcctccgccctgcagaagcccaagatctggtccctcgcggagactgccacaagcccggacaacccgcgccgctcgcctcccggcgcgggggggtctccaccgggggcagcggtcgcgccttccgccctgcagctctctccggccgccgccgccgccgccgctcacagactggtctcagcgccgctgggcaagttcccggcttggaccaaccggccgtttccaggcccaccgcccggcccccgcctgcacccgctctccctgctgggctctgcccctccgcacctgctgggacttcccggagccgcgggccacccggctgccgccgccgccttcgctcggccagcggagcccgaaggcggaacagatcgctgtagtgccttggaagtggagaaaaagttactcaagacagctttccagcccgtgcccaggcggccccagaaccatctggacgccgccctggtcttatcggctctctcctcatcctagttctttaaaaaaaacaaaaaaacaaaaaaaactttttttaatcgttgtaataattgtataaaaaaaatcgctctgtatagttacaacttgtaagcatgtccgtgtataaatacctaaaagcaaaactaaacaaagaaagtaagaaaaagaaataaaaccagtcctcctcagccctccccaagtcgcttctgtggcaccccgcattcgctgtgaggtttgtttgtccggttgattttggggggtggagtttcagtgagaataaacgtgtctgcctttgtgtgtgtgtatatatacagagaaatgtacatatgtgtgaaccaaattgtacgagaaagtatctatttttggctaaataaatgagctgctgccactttgactataacccg

SEQ ID NO: 770 - DNA, 674 bp, Homo sapiens
  misc_feature (354)..(354): second gene starts at position 354
atgtcgaagcgaggacgtggtgggtcctctggtgcgaaattccggatttccttgggtcttccggtaggagctgtaatcaattgtgctgacaacacaggagccaaaaacctgtatatcatctccgtgaaggggatcaagggacggctgaacagacttcccgctgctggtgtgggtgacatggtgatggccacagtcaagaaaggcaaaccagagctcagaaaaaaggtacatccagcagtggtcattcgacaacgaaagtcataccgtagaaaagatggcgtgtttctttattttgaagataatgcaggagtcatagtgaacaataaaggcgagatgaaaggttctgccattacctggtcctgctgatgatgaagcccctgatgctgaaaccactgctgctgcaaccactgcaaccactgctgctcctaccactgcaaccaccgctgcttctaccactgctcgtaaagacattccagttttacccaaatgggttggggatctcccgaatggtagagtgtgtccctgagatggaatcagcttgagtcttctgcaattggtcacaactattcatgcttcctgtgatttcatccaactacttaccttgcctacgatatcccctttatctctaatcagtttattttctttcaaataaaaaataactatgagcaacataa

SEQ ID NO: 771 - DNA, 6309 bp, Homo sapiens
  misc_feature (206)..(206): second gene starts at position 206
ataagagaccacaagcgacccgcagggccagacgttcttcgccgagagtcgtcggggtttcctgcttcaacagtgcttggacggaacccggcgctcgttccccaccccggccggccgcccatagccagccctccgtcacctcttcaccgcaccctcggactgccccaaggcccccgccgccgctccagcgccgcgcagccaccgcggcggcggcggcggggcgcagggctgagcgagcgtccgggttccggggctccggggaaggcggttgcagctcctgagtgcagcgcggcttcctgccactgtcccggcccggccacctctctgtcatggctctggcggacagcacacgtggattacccaacgggggcggcggcgggggcggcagtggctcctcgtcgtcctccgcggagccaccgctcttccccgacatcgtggagctgaacgtggggggccaggtgtacgtgacccggcgctgcacggtggtgtcggtgcccgactcgctgctctggcgcatgttcacgcagcagcagccgcaggagctggcccgggacagcaaaggccgcttctttctggaccgggacggcttcctcttccgctacatcctggattacctgcgggacttgcagctcgtgctgcccgactacttccccgagcgcagccggctgcagcgcgaggccgagtacttcgagctgccagagctcgtgcgccgcctcggggcgccccagcagcccggcccggggccgccgccctcgcggcgcggggtgcacaaggagggctcgctgggtgacgagctgctgccgcttggctactcggagcccgaacagcaggagggcgcctctgccggggcgccgtcgcccacgctggagctggctagccgcagtccgtccgggggcgcggcgggcccgctgctcacgccgtcccagtcgctggacggcagccggcgctcgggctacatcaccatcggctaccgcggctcctacaccatcgggcgggacgcgcaggcggacgccaagttccggcgagtggcgcgcatcaccgtttgcggaaagacgtcgctggccaaggaggtgtttggggacaccctgaacgaaagccgggaccccgaccgtcccccggagcgctacacctcgcgctattacctcaagttcaacttcctggagcaggccttcgacaagctgtccgagtcgggcttccacatggtggcgtgcagctccacgggcacctgcgcctttgccagcagcaccgaccagagcgaggacaagatctggaccagctacaccgagtacgtcttctgcagggagtgagctccccagaccccctcgccactccagcgcccagtccttctcctgcccgagagatgattacagagcctcttgtcccacctttgtcccctggctgctgccctcccattctccccctccagtagtagctgggtgagacctgtccgcccaccttccctccactacagaacctgcagccgcaaatcctctgggctgcttcgtcttctttggacctcctgaaccgagagaacccagaggaacccccaccccacccccacctaccactccatgctttctctactccctgcctcaaaccacccctcccccagatggtacttcagtttggatctattgggggagtgtggccacagaccgggggatgattgaattgttcagaacctgattggaccgtgtccaatgtgcggaagatttccttgaaatcttctcaagctcttatgactcactgggggtttaagagatcaggattggttccactgtctggggttagtgttttacaaggtcattacacagtctttttgacctcttttgaaggtagagttttagaaggctggatggaagattctgagcctggaattaggaccccatggaggcagttcagtaactaaactaataaagttttgaaaagttacacgtaaagtagaagaatctagtgcgtgggacagtaaaggatcctttctcgtacagaataaaaggtctcagcctgtagcttaaacttatagaaagtgatccgcctgcctgcagaggcgcccttttcagctgctgctcgccagaagcccttgattccactggttgacatggcagcagttactggcaagagggagaaaggacgctgccgcctaagagtgcaaggctgctcaggtctccaagcgccgtaggaggtcacctggcagtgactgtagggagctgggtcatagtgcacgtcgtgggtattaggaaagcctgtattctttcaatgaatgtcagtaggaccttcctttagctgtaagacttggtgggcggggtggggtggggagggaggaaagggtaggaagggtgggaagggagaagcagacatagtcatttatgatttgaaagttggaagtttgtaccatctgtttgagtatatgcacatttaaaaaatatcatatagtaaatgcaaacatgccaagtattttataaagattaataacagacctactcttacctggcagtttacttaacttactgttttgagtcctaaacttagagttgttaatgcttatatataatctaaccaaagagttacccagtagggttttagtttttgaacttttattttcttgttgattataaatcctgattttggaatctattgcgcaaaagaagtttcattttggttacttagacctaagatcacttattaaaaatccttattttctccaagcccagcaaacgttgacttctgggcaaacctgaaaacctgaaaatgccactttcatgcagtttgtttgaagttaagtggaatcctttcaaatgacgagctgcagagaactcagcaccaagggctgcctatctgtagatagctgtaaaatggaatatttttaaatgaaggcaaataagtacttaaaagtgagctgagcaataaaatggtccaataataggtaaatgcaacagaaacagaaggagacctggttgccttatgcctttactcttacatggaataaattcccaatgcatatcctatgtaaaccataagtgaagggaaataaacctcgtcatgctccatgctgtgaggtgtcctttggatattctgtgatgacagagaagcctattttgttttgttttcagcatctttctctgatgtacgtttttaaggattttgtaagagctgttttcagtgtttaaattagtgctatttttccttgtttttaaaaatgaatctcgtactgtatcttactatgtccatacagatgttacaaatcgacagttttattcttagactcatgtgatccaagctgtatataccatatataaacattttacatgaatcatttagttttttaattcatttactaatgctataaaatttcctatattaccccagtaatttgcatcagctggtttatatactaaagcaacatgttttgatgagtttcttacatccttatcgaggaattgggttaggaaaaaatacataattgtaaaactgagtttgctgtattatactttttttcttgagtattagttgtattactaatcatatgttgattaactgtctacttaaagtcaaggtacctgtatttttaatccactaatttttttttagttgggaaatagatttcaggtcttttattagactaacattttttgagaagtaaaattgacttcatatacaaagcctgtaattttaggcgaaatggaagcagaaatctaggaagttgtgcttgcttgtatgttgagtttggtctcagactaagtaatgcatcagaattcatctgtttgaagcctgaaataatttaggactctgattcactgaccaaaagtcagtgttgcagagatttctctaccccgtatggtattttgttagattgttcaacaggaagcacatgattgagaacatcttgggacagaccaaaaccactgacagatggcaaggctcggcgattctgatttcccttctcaaatctgctcaactccaagagtcttgagaaactgctaaaattttgcctctgtcactcaagtcttacaaatgttatcttgtaaacctttgaggtgaactattccactgtcttgtacataggcatcttattcactgcaccctgtcacacccagcaccccccgccccgcacattatttgaaagactgggaatttaatggttagggacagtaaatctacttctttttccagggacgactgtcccctctaaagttaaagtcaatacaagaaaactgtctatttttagcctaaagtaaaggctgtgaagaaaattcattttacattgggtagacagtaaaaaacaagtaaaataacttgacatgagcacctttagatcccttcccctccatgggctttgggccacagaatgaacctttgaggcctgtaaagtggattgtaatttcctataagctgtaatagtggaggtattgtgggttcatttgagtaagccctccaaagataccattcaaataacctgggagaatgtcataaattattcagataattaacactgcatgaatctgattcagaggcatgcatttacatatgttgccctaattaccatttgatgatcataaatacaagtgaatgacattggacttttagtaacaaacttaatttttaaaaaggtgtagacaatggtggttaaaaaaaaaaaaaaaacaggtaccaggttctgtgtgtttgcaccaagtaattgacatgttttttaatacatgtggaccatgaacagtattcattctactttttcaaatgatatgctgtagaaaatattccttgaagatgtgagatttaaaaatttttccctttcaatgttgttatgtattctactggtttttgattgatagcacagtgataaatcataatactagacaaaattgtcttctctttcaaaccagagccatatatatgtctgtatatatgggacctactgcttctctgaggaaatgcataatctgttaatatcagacaaaatgagcaattggcagtgctcataatatattccaatttttattggaattttcgatggaatgttatttcaataaagccatgtaaggtgaaactttgataactttttactcttcaagttagggtaaattctgatccaatattcaattcatttgtgtactcccacatgcaaaatgctaaattacaatgcagacattaagaaaaagtattgactggaggggttgaattccttgagaatttattttatagtctaaatcacaaatactttactcaatttagtttttaaaatagtaaactgaatatttttgttgtaagcctatcagagtcaatccttcgtttggaattgttttcctgtttttccttactataaatcatttaaaaactgaattcattttcttagatggcataagtctgtctcttgagaaataagtaaaatactcctattttcagtatctgtagcacctgaaataggtctttgtatagccagaaacaagttatgttgaagttagcttttctttgtcaacagttttggacaataaaaatctgaaagtattaacacttgattttctactggggcccttcaaacttggttggaagaaattcaaccagaatatctacattagagtataatcatgtgtggtaggaagatggactagttaatcaagatttgttgtcacttaaattttttgtgatttttttccaagccagtttttttaaattctaaatgtgttttgaggtatgggtacattaattgtaatgtaaactattatacaactgtttttgcgactttataggcaggtaaattttgctattactattgaatacaaatgacaattcatttatgaccactcaaacagcgttagtaaccatttagtgacaaaggattaaaacatccatctggatgttaattttgaagatgtaaattatatgttgtttaaatttttccaggcatctgaaaaccttatctgctagacaatgtaagattcacacagagttatctgggattctgattttttaaatagtacatatcattaaaccattttctctaaatgtaagaagagcagaaaaaatcttataagattatcagatttttctaatgacacagaaatgtaagaaaaaaatccctttatattgaaaaaagatgcagtcaaagtcttttcagacatgcccaaactttgagaatttcttcaaccatctaatgctataaagatttttgttcttcctgttcacaaccagttgtataacagaaatactagctactgttttccttcctgtgtgtgaagtaatgaatcattgattatgtgacttgttatgtattcaattaaacactaaagaataaaacattcactcctttaattattc

(The sequence listing continues in the following parts.)

What is claimed is:

1. A primer pair comprising first and second primers, wherein an amplification reaction comprising said first and second primers has the ability to amplify a nucleic acid having a fusion partner A sequence and a fusion partner B sequence, wherein said fusion partner A sequence is present in a first human gene set forth in Table 3, 4, 5, 6, 8, or 10 and said fusion partner B sequence is present in a second human gene set forth in Table 3, 4, 5, 6, 8, or 10 as being a fusion partner with said first human gene.

2. The primer pair of claim 1, wherein said fusion partner A sequence is at least 10 nucleotides.

3. The primer pair of claim 1, wherein said fusion partner A sequence is at least 50 nucleotides.

4. The primer pair of claim 1, wherein said fusion partner A sequence is at least 100 nucleotides.

5. The primer pair of claim 1, wherein said fusion partner B sequence is at least 10 nucleotides.

6. The primer pair of claim 1, wherein said fusion partner B sequence is at least 50 nucleotides.

7. The primer pair of claim 1, wherein said fusion partner B sequence is at least 100 nucleotides.

8. The primer pair of claim 1, wherein said first primer is between 13 and 100 nucleotides in length.

9. The primer pair of claim 1, wherein said first primer is between 15 and 50 nucleotides in length.

10. The primer pair of claim 1, wherein said second primer is between 13 and 100 nucleotides in length.

11. The primer pair of claim 1, wherein said second primer is between 15 and 50 nucleotides in length.

12. The primer pair of claim 1, wherein said fusion partner A sequence is present in a human LIMA1 nucleic acid, and said fusion partner B sequence is present in a human USP22 nucleic acid; or
wherein said fusion partner A sequence is present in a human LIMA1 nucleic acid, and said fusion partner B sequence is present in a human USP22 nucleic acid; or
wherein said fusion partner A sequence is present in a human ACACA nucleic acid, and said fusion partner B sequence is present in a human STAC2 nucleic acid; or
wherein said fusion partner A sequence is present in a human FAM102A nucleic acid, and said fusion partner B sequence is present in a human CIZ1 nucleic acid; or
wherein said fusion partner A sequence is present in a human GLB1 nucleic acid, and said fusion partner B sequence is present in a human CMTM7 nucleic acid; or
wherein said fusion partner A sequence is present in a human MED1 nucleic acid, and said fusion partner B sequence is present in a human STXBP4 nucleic acid; or
wherein said fusion partner A sequence is present in a human PIP4K2B nucleic acid, and said fusion partner B sequence is present in a human RAD51C nucleic acid; or
wherein said fusion partner A sequence is present in a human RAB22A nucleic acid, and said fusion partner B sequence is present in a human MYO9B nucleic acid; or
wherein said fusion partner A sequence is present in a human RPS6KB1 nucleic acid, and said fusion partner B sequence is present in a human SNF8 nucleic acid; or
wherein said fusion partner A sequence is present in a human STARD3 nucleic acid, and said fusion partner B sequence is present in a human DOK5 nucleic acid; or
wherein said fusion partner A sequence is present in a human TRPC4AP nucleic acid, and said fusion partner B sequence is present in a human MRPL45 nucleic acid; or
wherein said fusion partner A sequence is present in a human ZMYND8 nucleic acid, and said fusion partner B sequence is present in a human CEP250 nucleic acid; or
wherein said fusion partner A sequence is present in a human CTAGE5 nucleic acid, and said fusion partner B sequence is present in a human SIP1 nucleic acid; or
wherein said fusion partner A sequence is present in a human MLL5 nucleic acid, and said fusion partner B sequence is present in a human LHFPL3 nucleic acid; or
wherein said fusion partner A sequence is present in a human SEC22B nucleic acid, and said fusion partner B sequence is present in a human NOTCH2 nucleic acid; or
wherein said fusion partner A sequence is present in a human EIF3K nucleic acid, and said fusion partner B sequence is present in a human CYP39A1 nucleic acid; or
wherein said fusion partner A sequence is present in a human RAB7A nucleic acid, and said fusion partner B sequence is present in a human LRCH3 nucleic acid; or
wherein said fusion partner A sequence is present in a human RNF187 nucleic acid, and said fusion partner B sequence is present in a human OBSCN nucleic acid; or
wherein said fusion partner A sequence is present in a human SLC37A1 nucleic acid, and said fusion partner B sequence is present in a human ABCG1 nucleic acid; or
wherein said fusion partner A sequence is present in a human EXOC7 nucleic acid, and said fusion partner B sequence is present in a human CYTH1 nucleic acid; or
wherein said fusion partner A sequence is present in a human BRE nucleic acid, and said fusion partner B sequence is present in a human DPYSL5 nucleic acid; or
wherein said fusion partner A sequence is present in a human CD151 nucleic acid, and said fusion partner B sequence is present in a human DRD4 nucleic acid; or
wherein said fusion partner A sequence is present in a human LDLRAD3 nucleic acid, and said fusion partner B sequence is present in a human TCP11L1 nucleic acid; or
wherein said fusion partner A sequence is present in a human RFT1 nucleic acid, and said fusion partner B sequence is present in a human UQCRC2 nucleic acid; or
wherein said fusion partner A sequence is present in a human GSDMC nucleic acid, and said fusion partner B sequence is present in a human PVT1 nucleic acid; or
wherein said fusion partner A sequence is present in a human INTS1 nucleic acid, and said fusion partner B sequence is present in a human PRKAR1B nucleic acid; or
wherein said fusion partner A sequence is present in a human POLDIP2 nucleic acid, and said fusion partner B sequence is present in a human BRIP1 nucleic acid; or
wherein said fusion partner A sequence is present in a human MYH9 nucleic acid, and said fusion partner B sequence is present in a human EIF3D nucleic acid; or
wherein said fusion partner A sequence is present in a human BRIP1 nucleic acid, and said fusion partner B sequence is present in a human TMEM49 nucleic acid; or
wherein said fusion partner A sequence is present in a human SUPT4H1 nucleic acid, and said fusion partner B sequence is present in a human CCDC46 nucleic acid; or
wherein said fusion partner A sequence is present in a human TMEM104 nucleic acid, and said fusion partner B sequence is present in a human CDK12 nucleic acid; or
wherein said fusion partner A sequence is present in a human RIMS2 nucleic acid, and said fusion partner B sequence is present in a human ATP6V1C1 nucleic acid; or
wherein said fusion partner A sequence is present in a human TIAL1 nucleic acid, and said fusion partner B sequence is present in a human C10orf119 nucleic acid; or
wherein said fusion partner A sequence is present in a human MECP2 nucleic acid, and said fusion partner B sequence is present in a human TMLHE nucleic acid; or
wherein said fusion partner A sequence is present in a human ARID1A nucleic acid, and said fusion partner B sequence is present in a human MAST2 nucleic acid; or
wherein said fusion partner A sequence is present in a human UBR5 nucleic acid, and said fusion partner B sequence is present in a human SLC25A32 nucleic acid; or
wherein said fusion partner A sequence is present in a human KLHDC2 nucleic acid, and said fusion partner B sequence is present in a human SNTB1 nucleic acid; or
wherein said fusion partner A sequence is present in a human ARID1A nucleic acid, and said fusion partner B sequence is present in a human WDTC1 nucleic acid; or
wherein said fusion partner A sequence is present in a human HDGF nucleic acid, and said fusion partner B sequence is present in a human S100A10 nucleic acid; or
wherein said fusion partner A sequence is present in a human PPP1R12B nucleic acid, and said fusion partner B sequence is present in a human SNX27 nucleic acid; or
wherein said fusion partner A sequence is present in a human SRGAP2 nucleic acid, and said fusion partner B sequence is present in a human PRPF3 nucleic acid; or
wherein said fusion partner A sequence is present in a human WIPF2 nucleic acid, and said fusion partner B sequence is present in a human ERBB2 nucleic acid.

13. An isolated nucleic acid comprising a fusion partner A sequence and a fusion partner B sequence, wherein said fusion partner A sequence is present in a first human gene set forth in Table 3, 4, 5, 6, 8, or 10 and said fusion partner B sequence is present in a second human gene set forth in Table 3, 4, 5, 6, 8, or 10 as being a fusion partner with said first human gene.

14. The isolated nucleic acid of claim 13, wherein said fusion partner A sequence is at least 10 nucleotides.

15. The isolated nucleic acid of claim 13, wherein said fusion partner A sequence is at least 50 nucleotides.

16. The isolated nucleic acid of claim 13, wherein said fusion partner A sequence is at least 100 nucleotides.

17. The isolated nucleic acid of claim 13, wherein said fusion partner B sequence is at least 10 nucleotides.

18. The isolated nucleic acid of claim 13, wherein said fusion partner B sequence is at least 50 nucleotides.

19. The isolated nucleic acid of claim 13, wherein said fusion partner B sequence is at least 100 nucleotides.

20. The isolated nucleic acid of claim 13, wherein said fusion partner A sequence is present in a human LIMA1 nucleic acid, and said fusion partner B sequence is present in a human USP22 nucleic acid; or
wherein said fusion partner A sequence is present in a human LIMA1 nucleic acid, and said fusion partner B sequence is present in a human USP22 nucleic acid; or
wherein said fusion partner A sequence is present in a human ACACA nucleic acid, and said fusion partner B sequence is present in a human STAC2 nucleic acid; or
wherein said fusion partner A sequence is present in a human FAM102A nucleic acid, and said fusion partner B sequence is present in a human CIZ1 nucleic acid; or
wherein said fusion partner A sequence is present in a human GLB1 nucleic acid, and said fusion partner B sequence is present in a human CMTM7 nucleic acid; or
wherein said fusion partner A sequence is present in a human MED1 nucleic acid, and said fusion partner B sequence is present in a human STXBP4 nucleic acid; or
wherein said fusion partner A sequence is present in a human PIP4K2B nucleic acid, and said fusion partner B sequence is present in a human RAD51C nucleic acid; or
wherein said fusion partner A sequence is present in a human RAB22A nucleic acid, and said fusion partner B sequence is present in a human MYO9B nucleic acid; or
wherein said fusion partner A sequence is present in a human RPS6KB1 nucleic acid, and said fusion partner B sequence is present in a human SNF8 nucleic acid; or
wherein said fusion partner A sequence is present in a human STARD3 nucleic acid, and said fusion partner B sequence is present in a human DOK5 nucleic acid; or
wherein said fusion partner A sequence is present in a human TRPC4AP nucleic acid, and said fusion partner B sequence is present in a human MRPL45 nucleic acid; or
wherein said fusion partner A sequence is present in a human ZMYND8 nucleic acid, and said fusion partner B sequence is present in a human CEP250 nucleic acid; or
wherein said fusion partner A sequence is present in a human CTAGE5 nucleic acid, and said fusion partner B sequence is present in a human SIP1 nucleic acid; or
wherein said fusion partner A sequence is present in a human MLL5 nucleic acid, and said fusion partner B sequence is present in a human LHFPL3 nucleic acid; or
wherein said fusion partner A sequence is present in a human SEC22B nucleic acid, and said fusion partner B sequence is present in a human NOTCH2 nucleic acid; or
wherein said fusion partner A sequence is present in a human EIF3K nucleic acid, and said fusion partner B sequence is present in a human CYP39A1 nucleic acid; or
wherein said fusion partner A sequence is present in a human RAB7A nucleic acid, and said fusion partner B sequence is present in a human LRCH3 nucleic acid; or
wherein said fusion partner A sequence is present in a human RNF187 nucleic acid, and said fusion partner B sequence is present in a human OBSCN nucleic acid; or
wherein said fusion partner A sequence is present in a human SLC37A1 nucleic acid, and said fusion partner B sequence is present in a human ABCG1 nucleic acid; or
wherein said fusion partner A sequence is present in a human EXOC7 nucleic acid, and said fusion partner B sequence is present in a human CYTH1 nucleic acid; or
wherein said fusion partner A sequence is present in a human BRE nucleic acid, and said fusion partner B sequence is present in a human DPYSL5 nucleic acid; or
wherein said fusion partner A sequence is present in a human CD151 nucleic acid, and said fusion partner B sequence is present in a human DRD4 nucleic acid; or
wherein said fusion partner A sequence is present in a human LDLRAD3 nucleic acid, and said fusion partner B sequence is present in a human TCP11L1 nucleic acid; or
wherein said fusion partner A sequence is present in a human RFT1 nucleic acid, and said fusion partner B sequence is present in a human UQCRC2 nucleic acid; or
wherein said fusion partner A sequence is present in a human GSDMC nucleic acid, and said fusion partner B sequence is present in a human PVT1 nucleic acid; or
wherein said fusion partner A sequence is present in a human INTS1 nucleic acid, and said fusion partner B sequence is present in a human PRKAR1B nucleic acid; or
wherein said fusion partner A sequence is present in a human POLDIP2 nucleic acid, and said fusion partner B sequence is present in a human BRIP1 nucleic acid; or
wherein said fusion partner A sequence is present in a human MYH9 nucleic acid, and said fusion partner B sequence is present in a human EIF3D nucleic acid; or
wherein said fusion partner A sequence is present in a human BRIP1 nucleic acid, and said fusion partner B sequence is present in a human TMEM49 nucleic acid; or
wherein said fusion partner A sequence is present in a human SUPT4H1 nucleic acid, and said fusion partner B sequence is present in a human CCDC46 nucleic acid; or
wherein said fusion partner A sequence is present in a human TMEM104 nucleic acid, and said fusion partner B sequence is present in a human CDK12 nucleic acid; or
wherein said fusion partner A sequence is present in a human RIMS2 nucleic acid, and said fusion partner B sequence is present in a human ATP6V1C1 nucleic acid; or
wherein said fusion partner A sequence is present in a human TIAL1 nucleic acid, and said fusion partner B sequence is present in a human C10orf119 nucleic acid; or
wherein said fusion partner A sequence is present in a human MECP2 nucleic acid, and said fusion partner B sequence is present in a human TMLHE nucleic acid; or
wherein said fusion partner A sequence is present in a human ARID1A nucleic acid, and said fusion partner B sequence is present in a human MAST2 nucleic acid; or
wherein said fusion partner A sequence is present in a human UBR5 nucleic acid, and said fusion partner B sequence is present in a human SLC25A32 nucleic acid; or
wherein said fusion partner A sequence is present in a human KLHDC2 nucleic acid, and said fusion partner B sequence is present in a human SNTB1 nucleic acid; or
wherein said fusion partner A sequence is present in a human ARID1A nucleic acid, and said fusion partner B sequence is present in a human WDTC1 nucleic acid; or
wherein said fusion partner A sequence is present in a human HDGF nucleic acid, and said fusion partner B sequence is present in a human S100A10 nucleic acid; or
wherein said fusion partner A sequence is present in a human PPP1R12B nucleic acid, and said fusion partner B sequence is present in a human SNX27 nucleic acid; or
wherein said fusion partner A sequence is present in a human SRGAP2 nucleic acid, and said fusion partner B sequence is present in a human PRPF3 nucleic acid; or
wherein said fusion partner A sequence is present in a human WIPF2 nucleic acid, and said fusion partner B sequence is present in a human ERBB2 nucleic acid.
